United States Patent Application Publication US 2014/0057251 A1 - sequence listing, part 60

SEQ ID NO: 85849 - DNA, 2068 bp, Cannabis sativa
atcataaaaatagcataattctagagtaataaaaatctccggaattgagaaattataatctaatacctatttctaataatgaaatctacaattaaataaattcataaataattataaaaatgtgaatgattaacgctaattatctttactaatccatattctaaaaatgcgatcattgcagtcgtaagcctcaaaatcaattaaaatatttttaattaattattattcaataaacttttatttaaaacacctttataaaccctctaaattaattaaaataattttaattaatttaatcttaaataaactatttatttaagataattttataatcaacaaaaaaattaaaaaaaaatttaattaatttattcttaaataaactatttattttagataactttattatcatattagttttatcataaaataataatatttattattttaattagggtttagacagattttatcttaatatggttatagatttgaatttgaatttcaaacctaaaattatttatatttatttaatttaaaaataaatatcctacaaaattgtattattttatcttaattattaaaaaataataaaaaaacaatttcattatttaatattatttaataattaagataattatcaatttaaatttgatttttaaataataactatgatattaatttggaattcaagttcaaataaatatcccaaaataataattaattattttatatactatatatagctatatacattatataatatatttacataaccgaatacatatatatatataattaggttcgtgtcaatagaatagggctgaccacctccatggaccatcgtggctagcagctttgacagccaccatggcttatgatggccatggaggccacgatgaggagcagtcgcggtcacacacgacccgaaaagacgcagtcgagtctcaccatgcatggggaagggacattgcatgtcccttgcatgctacgcccgagccacaaaacaaagacctcgatggtccttttgtcgtcgactagtggtcggaccattaggttgtcctcggtcgatgtcaatcgtaaggactatagtcccttggtgcgatcaactttcatggttggccgacgtcagagaagaaaggaccgaaggtccttgtactgtgacagtcatggtaaatgaggtcgaaccaccttgctcctcaaaggactcacgtcccacacgcatgcatcgcatgcatggattttttacacgagcacggtacctgaggcaatggtatcatcgtgcatggtcagggaataaattctcgagctcacatgcatgtgattttaacgtgcatggttggattttaagtttagaaattgagctcacatgcaatgtacattacagaggtatataatttatgtataaattaattttcataaaattaaaattacattaaaaattcctacacccacaatggcttacattattttttaagaaaaataattacgacacctacaccaattaactatataattaacgattcatcacctctcatacattcacaatagtgtaaccatctattcacatacatatcatatatataattgaataaaacccacacaatatttaatgtacatacattcatggaactgctctgataccaattgttagttttatggtactaaattaggtacgcaacaaaagagtttcatatttgattatcattgtaccatagaccaatagatctctagatgtgtatgcattaaatcaaaacataaaatataagttaataacatatacctcttgttattttaatagtattttataatttaaatttttcaaataaaaattaattttataaaataatgaaaagtaatagtgttttttattagaatattattaaaaaagtttagcaaaaaagtaggaaactattacatttaaagagctccttatctattttttattatatagagtcattttttatatgattgaagtatggttggagatactgtaataatagagtaaatattattttggactctgtgttttacaaaaattatcaattagaccttcaattttattaaatga

SEQ ID NO: 85850 - DNA, 859 bp, Cannabis sativa
agacggtgtagccatacaaaaaagaagactatcatccgcaaacagcagatgagtgagagaaggggcagtgcgagatatagcaacacctttaagaaccccttggcactgagagtgatgaaggagtgcagagagtccttcagaacagaggataaaaaggtaaggagaaagaggatctccttgccttagccctctagtaggaaagactttaccacaaacctccccattaacagagaaagaaatggtagcagtagttaggcatttcatgatattagaaacaaactttacaggaaagttaaagtgatacatcagacttcgaaggaagtcccattcaaccctatcaaaagcttttgacatgtcaagtttaagggccgcccagcctactttcccattcttcctagtattaatggcatgaacaacttcattcgcaaggagaatgttgtcaaaaatgatacgcccagaaataaaagcactttggttgggggaaactattttatccaaaacaaccttcagccgatttgccaggattttcgaaataattttatatagggtggtacaaagactaataggcctgaagtccttaagagaatgagcccgatgctttttgggaatgagaacaatgagcgaagaatttactgaggaaaaatccgcaccatgattaaggcaatccaagatagccttagtcaagtcagaccccaagacagaccaattcttttggtaaaaataagcattgaagccatcaagacctacagccttatcaccagagatttggaaaacagctttccttacctcatcaggcgtaaaatcctgatcaagaaaactgacatcagattcttctaaccctgagttaaggcaagaaaat

SEQ ID NO: 85851 - DNA, 974 bp, Cannabis sativa
tgttgatgacttccttgttacaggccccaatgaagccctcatcaacaagttcattgaacagctcaatcagtccttctcattaaaagacctgggcaatgttcattagattgagattttcagggatcatactggcatgtacctttctcaatctaagtatatcactgatctgttagtaaaactcaaaatggaaggagctaagccctgtccgaaccccacaagtgcaagtgttaaactatctctcactgatggtgaccctctagaagacaaaactctgtacagaagcacacttggtgccttacaatatctcactctcactcgtcctgatgttgcttatattatcaataaactcagtcaatttattcatgctcccacctcaatccactgggaagcatgtaagagattgatgagatacctaaaagggactctttcacacgggttacacttcacacctgctacatccttaactcttcaaggatattcagatgcggattgggcctcgtgtattgatgataggagaagtactggtggatatgtcatgttttttggcaacaacattgtctcttggtctgccaagaaacagaatgtggtggctcgcagcagctctgagagtgaattcagagcacttgccaatgctgctgcagaaataaagtggcttgtctctttgctctctgaattgcacatacaacaatctcagtgccccatactttgggttgataaccaaagtgcagctgcaattgcagcgaatccagtctttcacgctcggtcaaaacacattgaaatcgacttgcattttgttcgagatctcattttggccaaagaactctctgtgagatatgtccctgctcttgatcaaattgctgatgttttgaccaaacccctctctacagacagatacaagtacttaactgccaaactcaagatgtctactacaccttttcgtttgaggggggatattaacaacattcttgctgatg

SEQ ID NO: 85852 - DNA, 523 bp, Cannabis sativa
attgtcttgtattgtccacatggtctaattaattcttcgtcgggtttgatacaaacttgaacaacaacgtaatgatctccgagctctttacctccaacttcttttgatgaatctttactaacaactagaccaatagcaattgtttcaggatcagcagcaacgcttttaagattaaccatttcaccaacctacacaatcaattataacataataaaatatatttttcattaataatttttttgatatttaaataatatctaaactctgtaagtatattaatatatacctcaataactggagtatcatatgctgatgatgaaaaccacaattggcgttgaattccttgttatgtgatgtacacggcttttttgcctacatatgtaattaaatataaataacatatttcattggttactaattctttttattatatcatttgaaaaattaaaacttaacgaattgtgaagaagtgacatcccgattgtagttaagagcctgtacataaatatattcagttctaaat

SEQ ID NO: 85853 - DNA, 668 bp, Cannabis sativa
gtgagggtatcagtgacaactttgctgagttgccactcataaaatcatttatatacataaaattagttatcagtggcgccatgtcccctttaatgatgacaagttttatttaatctcagtgaagataatatcgtcactgataatattttatgaattttgaaaaaaaaaactagtaggatttttccctctaaaatatttttcatttatttattttatcttttataaatttttttcatttgaaagagcccaaaccccttccctttgttatcaatattaactaatgctagttagtttcctgttaattcacaaagtcgaaataaacaccatcttgccgtgagtgatcggtgaagatgcaagcttatgcggcctttggcaatggaaaatttggtgttcgacctttttgccaactgcaattctgttgctccaaccaatcagcaagcaccgccaacagctcgaggcatgaatttttccaggtttcctaatcagagggtagtgtgtcaagtatgcatgagattggtcatgcacactactgctgtgtgtcattatcgttttgacaagaattggacagccccaaaacaaggttaccttgctaattgtgcctttttcactgaattaaaatttgactgcaatcctcaagcatacatcaccactattgtgcaagactttca

SEQ ID NO: 85854 - DNA, 555 bp, Cannabis sativa
  modified_base (37)..(66): a, c, t, g, unknown or other
caagtcaataccaaacattgtattgtattaaataatnnnnnnnnnnnnnnnnnnnnnnnnnnnnnntacggcgtaccaaacgagccctttaagtttacttttgtccatgctttacaaaaaataaattacgtcccctcactttaaattttgggtctgctattatatgtatttgttattttgttgttaatttttgttatttgtatattattttttgtgttattttcctcttaatttcatgtagtttttttttattgttttcgtattcgttttataaaatactataaaaatcccacccaaagtattttttttctttacaagtttacttttgccctcctatcttaaaaaaaaaattacatcccctcactttaaatcttgggtctatcgttatatatatctattctatataaagtgtgcttacataacagaactcttagtttatgagaaatttatgggtgactttttattcatattaaaaataaaataatttatgaaaaattcatagatcactttttatttatatataataaaataagtgatgtgatcaatgcatgatca

SEQ ID NO: 85855 - DNA, 1610 bp, Cannabis sativa
cgctgatattatggttaattgttctatcgtacaaactttccatacctagtacgcattggacgtgggatagggttgtgattatttgtatgggcgcttggtctcaatctagttttatatttatgcttttcttaggagtctatcgactcacagatattgtttacatgtgtaggtaaaggaaaaagaaaggctgagcagcagtgacctcgagctagatgaagattgtacatatcgaggcagttagaccaggagtgtttagatgttcaggacagttgaactttattatgatagtcactaagcgatgacttttgtagtacatgtattttgtaactcatataacgggatctcgagatatgtattaatttatatttatttaagtttaagtttattcatgaaattttaattattctcattctacaataaaaccttggattagtaaaggagtgcacattacttagaaaaaatgataacaagcctaatgtagtaggacgttaccatttggtatcccaaccgctaggttgtcttctaaagatcgtcacgatatgtacaatctattggaaagcctgttttatcataatcttatttactattcatgtatgttggattaaactaatctaacaacctaatatggattcttgaaacaattaaaataaacacataaagggattaagaaatcattacaatggtttcagcggaatatgaatatgttgtctccttctgttcagttctcttacccttgatcctttctgtcgtgaaataatctcccacaaaaaggcttgagtatcaccttgaatagtgtgagttgatactcaagcacccttagaataaatattttagagagttattgcttatgaatttcaaaaaataaagagaagaagaagaagtgacattaagtttcttcaattctcttctctttctttatataggcatcacatagggctaggtttagatgagatggactaaaataaagacttgaactgatatctaactcataacactgaatatattatgggctttagagttatatttttaccactttatttaaattaatgaatctaaagtgtatttttctattttaccatttatctcatttaattatctaaatactaactttattttaataattattaaataaaataaaatttaaatatatttatcaattagacccacaaagtgtactaattaacaaattaatccctatttcttttttcttctcaatattgtccaagcttggtgaaaattctcaaataagacatagtctattttcgaattctaattgacttattaaatcaattagttgagtgtacaagatgatattatcccaaaaaatgtggagattatgggtctatgtagtcaagctcctactaagtagatctaaaatttatcgagtaaatttcttatcttattaatttctcctaattctgctatagattcagaattacactattgattacatagaacgctctatatgccaaacatatatacactaaaaattatccatgattcaatcataacagttatttatcctctatatatgatttacattgagtagagacaaaattactattttaccctttaatgtattttatccttaaaacatttagctacttgta

SEQ ID NO: 85856 - DNA, 727 bp, Cannabis sativa
aatgttattacatacaaaaatcttacttttctacttaattttacaccgtaaagctatagtgtcattctttcagttttatagttataactcactcatcgatagatacttattccacgacacttggaaataaacatgaaacctctttaaaataaggtcaaccctaccatggcttatcgtagcccaactatttactttctgttgacttttaacaataagtcaaccataccaatctcataatgtattgatcagccaagttatcagggtaaggatactatatatataattggcaaatcataccgaacagacctaattctgtccatcactattatacctcctatacccccacttgtatttgatttacttctaaagactcactatttataatcccttagtgagggatccttgactcttacttcccatactacctttaagcacaagtcaatacttcgtttaagcttctcattgtacatccaagcgtaaccaaattatacatacctatcttgttcttttcttctaatttttcaactttcaattggacaaaacttagttgtgtgcaataagttagttattgtgagcttgagatattccttccaaagatctctgttactggatttttagattgggaaaaacatctaatatttttccaaattctttactcttaacaattttagcttttgacaaatccattgtcattctcttctcaggcattatagggcttagaaacacc

SEQ ID NO: 85857 - DNA, 3223 bp, Cannabis sativa
  modified_base (1992)..(1999): a, c, t, g, unknown or other
ctctctcgatattgctcaaaattgaacgattcaagatatccgggaagacaaaagagagatctagaacttttatgttttgactttttccaaaatctaatcaaaatatagtcgaattcaggcttgaagttttagctttattttcttgcacaattttctctattttatgtataatctttttgtgagattttttatctttttttcatcttattcctttgatattttctaatcttcttctattttaaatctgtagaaataaaagataaaaagcgtagaattactccaaacaagagtataactaaattaaaaatatactaaatttaatctaaaatactaaaaataatctaactcgtatgacaatcaaactacaatacacgaagaatcttatgtttcgtaaaaggtcaaaacacatagacataaagcttcaattcatcggtgatgtaattgccaaaggagactttggcagacgttcaagtgaagaagattagtaccaaagaaaatccagcaaacatgttgacaaagtatgttccattagcaaagtttagactttgtctaaacatgctaaccatacttagttgttgaggcttgacaagaccaaaacaactctcttctattacaaggctccaaacataagtgtattgtcaaagtggatgattgttatgtttgacaatatacttaagaggtcctaagagaactaatcctattttctagctcaaccaagactcaaacaactatagtcatatcagaattaactaacattctgttatgacattatttatgtctgttacagcataaccaagaggttgcaactataaaataggtttttcaaccattcgagctcgataccaaaacttagaaaagagagagagaaataggaatagagttgagagagaaaaaaagagattaaatggagggttgtacaaagagattagtgtgtctaatattctagtccacttatggtaagatctcttatgtaaattgaagcaaagctttatgagtgtactgaactgttttttatagttcttgatataatttctatttgaccaatcaataaagttcgcgagcccttgaggctgtttctggctgtagagtagtcaagataacttattgttacctttgttcgaaccatccagtaacttctctatctttactacttttatgtttacttttttcctagttctaaattcaattattttgctactgttacatcgattatcactgttcttgccttttttttttactgcgtgttttcacaacatatatgtttattacaactgtcagctcttaaacatcaattgattctagtcaataatgcttttagcatgtaaatacatagtggtgcattaatgtaacatgcacatatatatgtaaatgttggtaagctatagctatattagtcatatatatttatatagatagagatagtgggttcaaaacggcttgtttaaagcaatcaaataatggaaaacttggttccagcaaaaaaaaaaataataataacaataatattggaaaacttggggatcccaagctttcgtattcgatatttgacccataactttagctaaaaaccacacatttctttttgctatataaataattatatattaatgttgtgtatgtgattgagaatgagagcgaacccacaatataatgtagcaatgtctaaattcagggttttagagcaaatagaggagatctcagaataacaatattgggctacgcgttgaccaaacagcatggttgacttttggaacagagctatgtagtgatggtgtaatgagaacatggcagtagggttatagcttatgttcactcaaagagaatgggaattagggtgatttgcatataattatttactaaattttgaaaaggaaaaaaagtagtgagactggtacaaattaaaaaaaaaaaataataaagaccaaggtttttttccatttttataagaatacctttccattttctaatttaatttattttaattttaatttnnnnnnnnaaaaataaaaaagacaaatataccttttgaaaatctataaataaaaaataattacatgctttaataataataattttgacaaattaaaacattctgattacctttcctaattatgtaaacaacaaaataatatgattctagttttctttgaggacagtttagtaaccacctagcataataaaatattatttctaattattttctattttaagccaattcatttcgcccattaattattttaattctagttacagcttaataaatgtgtcaatatgtatatatggtgtagtaattatgttatattatttgttaagctataatatagagtaacatattatatattaaacaagattgatacatataatgtgtttaaataattaaattatataatatataatttcataatatttatttgttatggttataaaatttgaaaatggttttgtaacttaaggatcacatttaattatatatgtaattgggttattacatatgtggattatcaactcaatgaaataagtttctagctgtttaaaactgctacaatactcatttaatttatataatttaaatgagcgttggaatgttagaaaaagatttggctcagagaagagctacaaaaactcaatagtaagttttctaaaaatagttactttatggttgaaggcatgttattttatagttgtttcatttggagccaatttttaataatatccataaacgtacatagatttattgagcatgtttctagcttttttgtccaacgcttttatctcaataaacaccaattaaagtgctagtaacaaccatgtggtgaataaattttgattttcatatgtaatcctcaaacactataaatagatatatttggttcacttgtgaaaacactaatttctatcaagagagcatcttgataaatccacaaagctagctatttctattactcttttccctaagtgcttgtgggggaagataagctctttgacatgtatttaaatttggtgattcttctattatacacttgtaatgtatgtcattttgacatttctctcacatttttttatataaagatatatactttctaatatattgtgttttatacgttgtttatagttttgtgtttcccagcttcgcagagcagctctctccctagctttttatcttcacaaagttgtatacacacatgaatgatacaactaattggataaatattgatgttgcagg

SEQ ID NO: 85858 - DNA, 635 bp, Cannabis sativa
tttactcatcattcaataacttcctaggagcaactgtccagggatttcaaaaagaaatttcaggctgctagggataggcgacgtgaagcggcctcactaaccaagcaatagcctggcgagacacttaatgcttacttaagtcgttttagcacggctgtggccagggttagaaatttggatgatagcatccaacttacagcccttcaggcggggatcactattgatttattgaccgcagggggcaagttgtgggatgatttacaaggatgtccattgagaagcatcaatgagttcaaagaaagggcttaggtgtttgttcggaaagaagaagcccgagaggaaatgaatccgttgaaaactggctcgggatgcaaacccagcaatatttcaagaggaacaatttccacgagaattgataactcaggggcttccggttcgaagagaaaggacgaagttaaggaaccatcgaaggataaaaaaacaaaaaagcatgaaaaatatgtgccaatgtataaaaatttataccgagcttaatgaaactcgggagaagatttacctcgcacatgagcaaaaggtggccttcggcaagcccaagcctatgagcaatttgagaagcaaaagagtgttggaaatat

SEQ ID NO: 85859 - DNA, 652 bp, Cannabis sativa
atcattcaattcattttttttatttataattgctaattaaataattttatattccaacaatctaataacacttcaaacaaaataataaattatcttatatgattaatttatcaaaatcattaccaaaataatttcttataaagaatttaaacaatagatagtaatattgttggttttaaaagccagtaaaaaaaaatttgttacattaaagaataaaatgaaataataataatttttaatcttaattatatatgatattaactattttttctacatcaaaattcttaattttgttttctaaaatttgagaaaatcgtgataaggaaacatgacttactaatatatatttgattcaattttatgttttagtgaatagttatcacaatctcatttttcagttatatatgccattataattaacattctttatttgtttctggcattcttcaaaacatttgaagagaccttttatcataaaaataagagattattaatttttgagtaaatcaattaatttccatataatgtgtagtaatttatcgggactaaaggaagtgaaaagtaagtaaaactgaaaaaaaaaactcacattagcatttccttgtcgtttaaaacttacaaattgaccctaccccattattaatattttggg

SEQ ID NO: 85860 - DNA, 522 bp, Cannabis sativa
gtaagcccgtgcatgcaaaaaatagcctccttgtatgcaagcaacttctttgatttgaagagatcaacgtcataggatttagtacaatccaaaccagttattgtggaaaactcttcaactccaaaacgaacagccttgtctcctagtttgaaccaaagctcaacatcatctctttcggtgtgaatctgccgcaacagaacgagatgaatcagctgtatctgatagttgaagttgctcacatcaagaaaatgcccaaatggagacttgcgaaacaactccttctgttcatctgacaggttctcgttgatatcatcaatgacattatacggattgtagagttgaggtttcccagcaaacctcttcttcacatcaattttaaaataatattcctgtgatagaaaaaataatataaacaatcaaaattaaaaatacgcaaagaaaaaaaaaaagaaaaaatcaaaaattggttacccaccacaaagataaaaactagaaactgaaaataaacacatatatattata

SEQ ID NO: 85861 - DNA, 1154 bp, Cannabis sativa
  modified_base (61)..(61): a, c, t, g, unknown or other
ttcttaaaaaataattatatatatatatatatactataaagaaagaatgaaaccctaaatntaaactcagccgctcaaatctcttcttctatcccttacagtatgtttggtaggagatatttaaggagggaaggattgaagataatggattgggcttatctatccatagtctcatagtctatatttgttgagataatgtgataattacctcttttaattacacaatcataaaaaataaccgcaaaatagatttaattgaaatataccctattttataattgatttgctcaatatacccttatattataagttttaactttgattaattgagttgcaggggactcctattcctccatagcaaccgaacgtacgcaagttccactgcaagtcctccattgccaacgtccctccgattactccaccatattgtacttttgtaattacaactacaattgttaccatccttcaattttcaaatgtacgtaactttgtttgtctattttatattttctttctttttgaatttgttttagtttctctctctaaatctttgtctaaagcactcaaatttctctaccgatataatctgtaactagattttccacaaacacgtatacatatatatatatatatatataaattcattgtagattttaggtgtaattcatgtgttgctagtaatagtaatagaggagagaatttaaaaataaaatctttaaatggaataatgataattagccaaccaatttgaacaaaattacctttctctgatcacttagtaagagaagaaacacaaacaggccaataaatcatgaagatttggcgtatctaattactatattctctctttaaaatggtggctacgagtctataaaagctaaactttaaagatcttcatgggagtaatagtgttttttgaggggtggagataggtttcagcaaaatttaaatgaaaggagcaaatttggtaggtaatttgaaaaaagaggtaaaaataaaaaactataaaagagagggtaaaaataagagataacaatataaaatgggtataaagttcaatttcctcatatttgtttggtaagaaggaaagaagaattaagggaaggatagaggtgtggattccaaatccacaagggcccaccaaatttagtctt

SEQ ID NO: 85862 - DNA, 831 bp, Cannabis sativa
ttccaagaactacactgcaatcctgaaactacttaaatacaactgaaatactaactaacggaaggttgtcaaccactctaaatcaaagattacaaaagtatgttgttttacataaatctattattaaccaaggaaattgattcacttgaaatccattgtatgtgaacaccttcaacaatacaaaaacaacagaaatacaatctttttttgcagctacccaagtaatagtgtgcaacaatgtgataataattagaagtgaccatcactcaagatactcaattgtacagcaacctgacaacagcacaacaacaacaacaacaacaaaataactctaatttgctcaaaggcggggactagtttcaagtaatgttattttagttgatactggtactttaacagtagaatcaaccatacaacaagaaaagaactaaaagcaaacgccaaaagaagcaagtgaatattttgactttactgactatacgaggcttgttgctacagaaattgtagagaaactacagaacaaccagaaagaagacgaagaagttgacaacacatagatgtttatcattacagatccccacgtcacggaacgatagaaaaaggacagatatatacaaagacaaagatacattgataaataccttatacttctttgcgataaagaaaacctttcattaatatcaagtgttgaaatcatactctaaagaataaaatattgtttgtttggactcaaattgcaagtggagtttaaagacttctaaaaatgggaacatgcaaacattcataataagaagttatgaacaagaacatgggtgcatacctatcaaattc

SEQ ID NO: 85863 - DNA, 750 bp, Cannabis sativa
gcccagctaacaaggaccatgtcaaagcgcaacacggtatgcaatttcttaaatatttttttaatcgtaataagttaagtttcgtaacttagccttttctttttgtcattaatgttttgcatatattaaatggttctatgttctgaggcaatacaagcagcgagtttcggttgatgactgtttcttaatgcatttagttctttattgtttccagttcattggcaccccacattggatggctccagaagttatccaagaaagtcgctatgatgggaaggtatcgagagtttttgagtttggtgttttatgctgcatcttttagagaaatttcttactttttgtatgagtagcaaaagtcttcatcatttttttattcatgcgatttgtctccacctgtgagctgttgcatattttgaagccctcagtctctttgactgatgttttcccttttattctttttgtttaattttataatttgttttttttccaggttgatgtatgggcacttggtgtgtctgcaattgaaatggcagaggtactttactttctagagaagatgtaacttattttcaattcacaagaaaattttataaagcagatctgggggggagttatgtaatctgacgattcggatccctttccccacttattaatatacccaaaaacttgtttgaattttgctttgttggatctgggaaattagttttctgacagtaacgaatactacctgctatggtgaataaaacattg

SEQ ID NO: 85864 - DNA, 651 bp, Cannabis sativa
aaagttagaagagccagtcaagaatcctattcttgcaccaaagattgagattgagaaagatggtttaaaggaagaaaagtttactaagaacctttagaaacagtagccaccaattaattatgaccaccacatccaaattccatatcctcaacgacttcaaaagaagaaacttgacaagcagtttttgaagtttcttgatattttccgaaagtttcacataaacataccttttgttgaggtacctaaacaaattacaagttatgtgaagcttatgaagaaaatcttatcaaagaaaaagagattggaagattatgagattgtagcacttattgaggagtgcagtgctatcttgcaaaagaaactacccccaaagctcaaagatccaggtagttttaagatttcatgctctataggaggctcggttgaaacaaagactttaggtgatttgggggctagtgtgaatttaatgcctctatcagtctttcaaaagctgaaattgggagaagctcatccaacaaatgtctccttacaaatggcggatcactctattatgcatcgtaggggaatgattgaggatgtctaggtcaaggtgggtaaattcatctttcctgctgatttcatcactcttgatatggaggaagatattgttgg

SEQ ID NO: 85865 - DNA, 541 bp, Cannabis sativa
aagtctttttaagaccaatgcttacaaaaagagagggagcaacctcattaagattagcttggaatcagataagagtagactctttgtggagagaccaaacctctcgaaaggtagtgaatttagagagacgagcctctcaaaagcttgatattgtaacttcgtgactgtttttcagaataaagatcacttgaggaattccttactggtgtttattttgggaattggcaatagaatatttctactctaaattattctatcacatgcattctctttaactccttacttacaaccatataaatatataaatacactacctaattatatatagcatacttatgcatatgcactgtcaattatttactaaaatttcaatctacttctattctcgcacatgcaatttcagtctctctttctcccaatgccagaataagaaaaaataacttctttcaagtggaaatgaaagaaacttgaaatagctatcaagcaaaagattaaagaaaaggcaacaaaataatcaaaaaagtttactttctcagaataa

SEQ ID NO: 85866 - DNA, 995 bp, Cannabis sativa
aattctgattgtagttctaaggcttcgtaactcaagacattagtcaagtctaacacgtacttcctcaacatcaaaatatggaatacattctgtacaactaataattctagtggtaaggctagccgatatgctacctgcccgaccttctcgagtatctcgaatggcctatgaacctagggcttaactttccccttttcccaaagtgctttacacccttcattggtgagactcttaggaaaacatgttctcccaccagaaactcaatgtttctgtgcttaggattagaataactttttttttctgcattgccaagaaagcatttgagccttgatcttgtctatagcttcattggtcctctagattaactcacgacccagatatttcctttctctggtctcgtctgaatgaattgggtaatgatattttctaccatacaacatctcatagggagacatccctattgtactctgttggctgttgtcgtaggagaattctatcataggcaattatttactccatgaatcctcaaagtccatgacacaggctcgcaataaatcttctagtatctgtattgtcctctcggactatccatcagtctgaggatggaaagttgtactgaacttcaactttttaccaatagctctctgaagacttacccaaaactttattgtaaattttggatccctattcgaaacaatggattttagagttccatggagacaaactatctcttttacgtacacctctacatactgatcctctgtataggttgttttcaccaacaagaagtgtgctgacttcgtgaaacggtccactatgacccacacctaatcaaacattcctgtagttctaggcaacccaaccacgaagtccgttgtcagatcctcccatttccactcgagaagtgttaatggttgcaatagccctactagtttctgatgttttgtcttcatttgctgaagtgttaaacccttggacacgtattccactacatc

SEQ ID NO: 85867 - DNA, 732 bp, Cannabis sativa
aaaattctgggtccgtcactgcctacttgtatagatgatgttctcattatactctttaggttaatgtaaattatatgttagagttaagtggagggtggggatatattgtgcaatacgctcacaaaaatgggtatattttaataaaatataatataagaatatttttaattaatgaatacaaaaaagaaatatttctcaacttatcccaagagcgggacaaaggggccacgcccaagactccccaccaagaatcaaaaaatctattaataaaaatgtctcaaatttatttttttaaaatattatatcttgtattttcactattatttattaaaaaatatgactatttttttttaaaaaaataataattaatttattttttaagatacaatatttgaaattaaaaaaaaaaaaaaaaaagcttatgatatttttaaaatactatatttaaaatttttaccactatatatacaaacaaaaacataattttttttataaaaaaagctcaattagattttttgatctaaaaccctcaattaacttgagacggacctgatataagttcgtgtttctagtgtccctagctcaaattgtgagttcaaaaatgaaattatgtgacatttttctaagaataagaagtacagtgttcgaagtgattatcaagttgccatgagtattattgaatttgctgaaacttcctatatgagaaataatgagagttccccaaaaattaaa

SEQ ID NO: 85868 - DNA, 772 bp, Cannabis sativa
aatattactttcttggcaaaaaaaaaattaaaaatacttttttatgtatatttacaatttcatgtacgacctaaattttttatttataaaaatacgcttataaagtttaaaattataaaaatacaatatgctcaacaaaaagtaagaaaactactaaaaataacgagaaatcaatctcacgataattataaatcaactataaatacactaaaaaataatctcatgacaactataataaaactataaataaagtataaaacaaaaaaaaaatagtttattaattttataggagaaatatttttgtaaataaaaaagttcaaagcgtaaaaataaaaaaaagaatcgtgttgatatatttttggaattcttttaaaatttttggtctatatgtaaatttttcaaaaaaaaaaaatcacacttctttacactcaccccatcgtattatatttttgttactatcactgtctgacgaccttcatgcagctggctgccgcactatttatcgataacctgtagttgccattgcccatcacaaccacaaaaataataaatcttctaaaaaaagttcatttcttgctttctgaataaataaatctaagcaatttcatgtaccgctcatcaccatttaaattatgcctttttttttttgttctttttcatatcaatagccaaataaaaaaagaaaaaaaaaagaaaaattaaattggcctccatttatcaaagtcaatgttagatataagttagttattttattgattacccacaattatta

SEQ ID NO: 85869 - DNA, 800 bp, Cannabis sativa
tacctagaaacaaactaagaaatattatccaagtaagttcaaatctataaaataaaaggccaacaacttttagaagatatataaatcaatttattacatgttctccccacatccctatgcctggagctagtcatttggacaacttgttgtaaaggctctatagtactaaattatcaattaataaaaagtatgaactctatttaattattattttcttttttttttctttttaatttatagttaacagtttaattaggatgaaaatttttctctcttcttttttaattttacttttctgttttgtaatatatggttattatatttaattaatgataaattttatctattttatttcttgtatgattattaaataaggaaattaatatttaaaataataattataaatagataataattataaattgtgcttttttttaatgatcttaataaacggttctgtatttttctttcctttaatggattaaacacttttggtttgggtcaaataattacaaaatcgatagctacattataaacatatggattggtgagtaagctttcaattattcctattccaaagtagtgtcttcaattctaaattgggagtgtacgcgtctatgtgagtgagtatatgtatattaaatatccatgtgttgtgtgattttaattttatgggccattaccatcgatccaagtcatgatcactattaacactactattttcaccggctggcgccttctgcctaacgcgcctacctacctaggcctaggcataaaattttcatcccatcttttgcttc

SEQ ID NO: 85870 - DNA, 715 bp, Cannabis sativa
ggatttgagctattgtgcggatcggattggatccaaaaaatgaaatccgcacttagtgcagattgtatcgaatgaacaacattatataataaaagactaataatcataaaattgtaatatcaaatatatttgtactaattatattcatacagaaaaaatataatatttttatataatagtaaataaattaatataaaaatagaggaaaataaaaaaaatattaataaactttattcttgtaggtaattcttttatttattacttatatttatttattcttttatttattcattacatataaaaaaaaaaaaacaaactaatattacattatttctagaaaaaacagcgtcacatcacgtcttatcttcctagatatggaacttagagacctttgtcaacgacgtgaaagtataagtaggtagatattgctatagatatattattattctgttaataacttttcctctagctaggcttcatattaattatatatatatctatttattcttttatttattcattacataaaaaaaaaaaaaaactaacatgcacaaaatacaaagcagcacagcacagagtagtattacataccaaaaaaaacagtgtcatattacgtctgatcttcatacatatgtatgtagatcattccattgattttagttgatggaacttcgagaccttggtcaacgatgtgaaagtaaccattgtacccaac

SEQ ID NO: 85871 - DNA, 770 bp, Cannabis sativa
gtatttgttatcgtttattgatacacgtctaactggttgatttctcttctttttagggaggattggccttccatttagttgggtgtgtggtcaagcaccagggagagttgatcaagttctttagattttggaggaggagcgatattggaacattctattgtttgattcttctctttgagacatcactttgtgggatctcgttcatcgtcaacccgaaggtatatctcctccaaagaattgtgctaagtctcaagttgctatactccaaagaagttttgagattttggggtgtgaacctttatttctaatttatctgacgtcggatgaacgagattttgcagatcgattcatggcccaatcttctttcactattcctctggctagtgacagtgctatggaccgtttacactcacgcatataaaagactaggacgactcccaatgctgagaaggaggttgttactactgttgctccttcttgtccttctgtgacagctaacaagagaccatctctggttgagtaatacggttgatctttctttcccatctttagtggctacacattctgagtttggcctacaccttggtgaggccagtaagctattattcccagaggattgagctcaatttgagaacatcagggaaatagcttctatggagttgtccatctcacgctcctttaaggtatgcatgaatttctatgttacaatttatgtatggaaaaactcacgatattattgtgcctaaccattatggtactttatattgtat

SEQ ID NO: 85872 - DNA, 891 bp, Cannabis sativa
tgtccactaggctcatatttttgagtctcatggtgatggtggtactactagtagtaataatgtcaaaccagattgaggcatctcgggtagggttcagggatcgggtcaacaacccatgcaagaaacctggtggacctcaccctggttgccattctcgttttcgagttgtcgggaatgtaaggtcaattaattcatataagcgtagacgtaattgtttgaaaagtacaaaatgtcgtaacaacccatgaaacagtttcctcttctaattttcttgtgatacgaagaagaaaaaaaaaatcttcagtaaaattgtattcactaatagctaataaataaagattctaagatatgatttattattaaatatttctctacaatttagtatatattactcaataatattttgctatagtgaattgagaaaaatgttttaaaaaatcattagtatttagtggtatacacacaaattggaagtgagaaaaaatatgcaagtatgacccataacatttagatatttattattattatttaattttgcgcaattgatatttaaatatttttattcccattttttatctttatttgtataagttagttttcttggagattgttgaagttgtatctcttaagcaagtatttttgtggttgaagcgtgatttctcatgtgttagtattaacgactaattgtttggtattagtgtaaactgttcgaaatttagatgtattgcaatccacatttagtggtgtcgttgaggattgtaaagagttttatcttcttttagtggtgattttttatttttgtcaaacgatctgctaatcaggttactcatcttgtgattagagcttctcgtttacatgttgaacgtgtttttttgaagtttagtctctctt

SEQ ID NO: 85873 - DNA, 836 bp, Cannabis sativa
gtaaataaagttgtccatattattatattattgttaggtggtcttgtttctcgccaagtcaagttattcgggagttagatttcactcttgagtttaattttattgtaatagaggattgtatttgttgatgaaagtttaccttttattcaaaaaaaaatataaatatttatgaatattaattactaaaaatattttcattaaaaatgatttaattgaagttataataatttaagtagtttaaaaataaatttttttataacttcttataataaatcataacaaaatataacatcataattataattattaatgactattatatatagtcgatcactcacaactcatcgtgttgtcaattgttgttttaagttaattaaaaaaattaaaaagttgaaatgaaaattatgtcattagcaataagtgtgactcacaattcaataatagatccattcaaaatttgggtccacaaagcaaataaaattatatataatatatatatatatatagaaaataatggtagtacacctgttagtaggacttatgaaagagtgttggtcctaccattaaacacaattaataaaaaaatagcattaattaatattaggtatctaatatcttctagagatcatactgccatgtgatattttttaaaattttattattaaattatatagaatttaatatttaattgtaacaatagcaatatttaatatttcttatatgtcaatatcgctattgatataagtaataagtattggtccatataatttaatataatagtttttagagaatatcactagccaatcgcaactcgacatgtcgagaaggtgctaggc

SEQ ID NO: 85874 - DNA, 541 bp, Cannabis sativa
tcacgtgtattcatcaattgtgatgaaggtacatatctatcttttgttgttaactccattctttttctttttctatcatgattatctttacttaaattcccaaattaacatgtgttttttttgttctttatcattttattttatataacaatttttttttcaatacttttattattttcttttctgtttttgtagagaattgaaaaacaaattatcatttttttttgtaaaatctgttaataggactaattaaattttatacgtaaaaatatagcaattaaaatatttttagttatattattagtttttattaaaacaccccttttggatgttatccattagttatttatttttagtttataattactttgattatattttgtaaaaaatgatattcatataggtacgtcaaatatccctatttttttgaggggaagatgaaactttttactggttcggtttctcccgaggtagcggaatccattggcattcgtgaagcgttaagttggataaagaggcacaattggcaacatgttacact

SEQ ID NO: 85875 - DNA, 1585 bp, Cannabis sativa
aatgtatacacactttgtgggatttcctgagtcgagaataacctcttccaattcgttgattggtttcaatagggttctctcatcttgaactcaatggtcaagatcttcaccatcaattgatgactggctttcctatgctacagctcaatgcaatagcaattgcgagctagcatctggtcgcctcgcaccactcccacgacatctggtgtttggaatttaaaagataggtgcttgatcgaactgactgcccctagtccaattagtgctagacgacccaacaatatgttgtaagccgatggcaggtcgacaactaagaagtcttgcataacagtactagataaaggtgcctcgcctaaggttaatggaagctcgattatgccaaggctagcgatgctgtctctggtgaattcgcaaaggttcaccatacaaggccttaatttggccttttcgagccccattttcagtagagtctctttataaaggatatttaccgagcttccattgtctattgacaccctcttgatccttttattggcgagttgaatggttatcaccaatggatagacgtgaggatatctcacatttttctcatcttccttcgtgaatacaatgggaggttcctcggttttcaccttcttaaaaggttctggcgcaaaggccgactgctcgttctttatctctttcacatatcttttctgggcattattgctttcccatgcgatatgtagccctcttaaaataacaaggatgtcctctccttcaacaggaataggttgtagcccctgcttgtttgggttattgggcaaactgggctggttatatccctggccctatcttttcacgtactattttaaatggcatcgagcgataagactttctatctcatctttcaattggcaacatttgtcggtcctatgcccaatatccttatggaatttacaatattttttaggatctcttttgctcctcgaattcctcatacgctcgggtttaccgaaggcaaccttctgctcatgtgcgaggtaaatattctctcaagtttcattatgctctgtataaataatatacaccagcacatacttatcatgcttcttctgtttctttttatccttctacggttccttaactctgcctttctcttcgaaccagaagccaccgagttatcgattctcgtggagacagtacccgttgaaacattgttgggtttgcttctcgagcttgttttcaacagattcatttcctttcaagcttcttcctttcgaacgaacacttgagccctttcattgaactcagtgatgcttctcactggacgtccttgtaagtcatcccacaacttgcccccctgtagttattggatcagtagagttccccgtctgaagggctataagttgcgtgctgtcatcaaaattcctaaccctagctgcagccgtgctaaaatgattgaagtacgccttaagtgtctcgtcaggctgctggtttatattggttagtgaggccgcttcgggtgtcctatccctagcaccctggaattgtttcttaaaatccctagagagctgctccaaggaagttattgaatgatgagtaa

SEQ ID NO: 85876 - DNA, 1405 bp, Cannabis sativa
taaagagattttaagaaaaggggcatgcaagctaatatctgatgggagagagacaagtatttgggatgatccttgggctatccatggtactgattttcaccctaagcccaatgatctccaacatctgagtttggagaaagtgtcggaattacttttacccgacgggaattgggacatttctaagttgcaaaatatttttgaccaggaaactattagaaacatcttaagaggcagtaatccgagcggccatggaagggatagatgggtctggacaaaggaacctaatgacctattttcaaccaagtctgcctatcttatttaagcgctcgattaggctcctttgtgcaacattgctccggcactatgaaacaaactctggaactcaaagattttagaacgacacaaagttcattggtggagtatcctctccaatgcattacccttaagagcccctcttgctaagagaatgggttttgaggaggtctcctgccctatttgttgggaggctgaggagaccacagaacacttgttcctgtactgcaactttgctttccacctttggaggtcttctccttggggggtcatgcctgtcctagattctggaggcttcatgtgggactgggttacttttatctggaatcttaaatccaaaagagttgatactaatgagctattcgtctatgcctcgattgtggttgatacgatttggagagctcgcaacgacaaggtacataacaaatcaatgggtatcattaagcattgtattgactctatttcttcttgttacgcagattatggctcctgcctgttttccccaccacagtcttctgggactcatgcttggtctccgcctccggtggattgggttaaaattaactgcgatgtcaaggtcggaggtgacactatgtgtgttgtggcgattgcaagggaccataaggaatcagttttgtgggtggcggcaagaagactacacttctcggacccactcactggagaagctgcggcctgtcttttagctatggagatggatgtctcattacatcatccttttgttttggtggagagcgattcagagattattatcaaaactctaagaaggactgactctttttgggggattgagaactatgtgcgacaatgcaagatcctctctggttttatgactaattgtaatttttctcgtatttctagaaactgtaactatgcggcccataatattgcaaaatgggcgtttaccaataatgttacggggatggtaaagatatctactacctggtaatatattttgtaatgaccgtcaggtctaacttcgttttatttataaacacgtttttctcaaaaaaaaaagtcataaaaataaattttctcaaaaagaaagataataaaaatatatcgtggccgggcc

SEQ ID NO: 85877 - DNA, 978 bp, Cannabis sativa
gtaggttttttgatggttctacctctttttgtttggatgggaggatctagtggtttattgccagtgttattagagtttggtatagctgttatgtcagtgggattggctacagaattttttgatgcagcaggaggtgctgtcgtggtagcagtgggaatggctgctgaatttttggtagcaggagaagctacttttgaggaagcagggaatgatactgctatgtttttagtggcagcaggtgctgcaggtgttaaagcagtgggtggtactgctgtagaggtaggaacaacctgacttggttgtgatgttgcagttggaaaaactgctggtatgtgcgtgaggttggtatgttctgcactagatgggatattagtattgtctgcagaaaatttggtaggaaaaatattatgaatggtgttgtgattgttggatgattgattaacaagagggtaaatggattcatagaaaataatatctcgagagtgaaagatgtagttagtttggatatcaaggagggtgtaggctttcatatgatcgggatatcctatgaaaatgcatgctcgagctcttggagagaatttggttggtgtggagacatgagaggcatatgctagacaaccaaaatttctgaggtgagaatattgtggtggttttttgtggaggagttcatatggtgttttatcttttaaaaggattgatgatgttctatttatgagataaatagttgtttttaccatgtggctcctttatgaaataggtaaattggattggaaggtcaatgctcgagcaacatttagaatatgttgatgttttctttcgacaaccgcattttgctgaggtcgagctacacaagaatgataattgattttgccttggctagcataaaaggtagtgagtgttaattcttttgcattgtcagttcggacagctttgatgtttgagttgaaatgaacatgaacatatgtgaagaaattttga

SEQ ID NO: 85878 - DNA, 543 bp, Cannabis sativa
ctctctctctctcttagtatctcaacgccatttctaatccctaaacgatcatataaacattttaagtcctaaccctaatataaccttacatcaacgacttaatttttttaaaaatatatatatatatatatatataacatgtctcgtacatatattagtttactagtttgctaatataatactaatataataataataatattaccaataataataataataacagtaataataataataaactaaacaataagctctaatatatttacccatattattattaatatacctataataatattcataaataattaaatattaaattatctctaatagtttaattatttatctaacactatacatatcctcaaaataaaataataataataaaaaaataataaattttattgtcactagaaaaaaaaaatctcatacaccactaaactaataaatattcgaaatgattaattatccccattggcaaacaaaataaactaaaagtataaagaaaattaattacccaagaaagcagatattacagaa

SEQ ID NO: 85879 - DNA, 662 bp, Cannabis sativa
tacttgttagtaaatctacatcctggtaaaattttcccaacatacagatgatctagtgaatttttctgcactattctttgatagtaactcatctcacttatgatcataaagtgaacttatgcttgagcatcaagcacacaagacataacccactacaccttaacagtggtctatcgcactcacaagaaatagcttcaacatacaagactttaaagtttttcaccccaattactaagagatcaatgatgggggcaagagcagttaagctcagacagtatcaatgaaattgcaaacataatcgagacaaatatgatggttaatgatcaagcatcaacaaatattctataaaaagagtgggtcactctttaagagattcaacgccaagcaagcagctcatgtatggtttcaggtgagctaacatcactccgtgtggtaaaatctgattacgactcatagtcaaaactaccccgtggcacacatcaccatgactaccttcatagagatcgaaaccaagtctccctggagagtcaacacccagcgacctctaagccatctcacctatctatcacctgtctatcaagttctcgacagcatctagtatcgatcgtcaccttgctaaccaaagatttgcatgcaaaaattcttgggttttatgccctaaa

SEQ ID NO: 85880 - DNA, 600 bp, Cannabis sativa
ctccttatcaaaaaactgccaataatacatatatacttataataattgctggttccatcttaacacatatgggtcttttaatatcatataaaatctacttattaaaataacattataaactgattctaagcatcgtaatgttttggtaggattgttatagtaggacaaaaaaactgacttatatactccaagaacaaactgaatgcagttctactaaaacaagcacaaaaatcccactcatacttaaaagcttaagtattattaaaaaaaaaaaaaaaaaaaaaaaccaaagtaagagcttaaggccacctacggtgcaaaagaaaaaaaagatataacagtaaatatatactaactagatataacaataaatgtatacctgaagcagtcaaaaaagtggtatgggagaagtactttgctctaaatattctcgcatgtagagagtccgaacatgtaagtattctccatgcctgagcagccagtagcgccaggttatgatgtttaaaagttcgaaatcctaacccaccttgactctttggcaaacacattttcctccaagctaaccaatgagttttttgcttagcaacagaagaactccac

SEQ ID NO: 85881 - DNA, 717 bp, Cannabis sativa
atgatatatgattgtgttttaacttactttattacagtttgttaatttttatatcatttaataattaatagttaatatttttggcctggtgctagtaaatatatataagtatatgcatacgtgtgattgtttttatattaatttttacatcttacaataacatatataaatatatataactgtataaatataaaaatctatagatgttcctttcaattatcctaaattttgtttttaattatatagttattatagaaaatacaatttcatgagcatcaataaatcagtaatctcctactgtgattttaattagtgcattgaacaaacaagaattaactatccatatcatgttaaattagttcatctaatttaatagatttattataaattattgtgataatattgaaataataatttgacacaagtaaattcctcatgatctatcgcaataatataatcatttaaacacattcaaaattcttatttttttaaactttgttttctaactattttcaaaaaaaaagatcaaacacgctttattattttaaaaaaaaaaattatttttattgtcttgcatactaccaagcatttaaattataaataaaaacaatatttggaactacaccaaaattcataaaatttaaagataataacaaaaagtactctagccaaaactaacaataagattttaagattattgtggacaatgtcccacat

SEQ ID NO: 85882 - DNA, 655 bp, Cannabis sativa
atatgtaacatgtaaactatttattcatgaaaattttataaaataggctaaacattttaaaaatttataaaaatatatcatacaaaatttttgatttgtattttttgaatttttttattttacaatttttttttttaaaaataattgattgttttaaaatttatttatagttgtattatagttgtatgagattttttttttgttattttactatcgatttataattatcgtgaggttgatttcacgttgttatttaattgttttttttttttttactttttgctgagcaaagtatatttttgtaattttaaaattttacaagagtaatttcgtaaataaaaattttaggctgtaaaattataaataaaatataaaagaaatatatttttaaaaatttccctttattaatttattttgagtgtgaacttgataaatacgaagctcctaatttctaaatttgagtaacggtaagagattaagctaggttgtaaaaaaaattgtttttttttatgcaataaaaaaaaattgttagaagagtactttctatctattttttattttcctgaaatagtctttctatctattttaaaaatagagtattttatatatttatatatgaaattaatgtgaaatatcattttcaaaaaaaaaaaaa

SEQ ID NO: 85883 - DNA, 728 bp, Cannabis sativa
caagctccattgccggagctccagtccagaaagaattatcgatagctttttttattttaaaaaaaataaaataaataatattttctatgtcataggaaaaggattactccaaaatttagaaaacaccgatccggtgtcgtttcgattaacttcatgtgattttttttatattacattttttagttacctacattgattatcacatgaaatcctctgcacataccctaatacggccacttaagggattttttttttcttttatcaaagaagaactttgtttatcaagagcattgctattaggtaccattggtcactttctcgacatgttgcgttgtgattgactaacgatattccttaaaagttattatattaaactatatgggactcgatacttagttagaccgataacgatattgacacataggagggtgttaaacaccactgataccctttagcatttctcattattcaactaggcaatttataaccaaaacgaagtcaacacaaacagctccaaagaagctataggtgacttgtacacatcttaaccaacttttctcttttagtattctttccccgattacaagtgacaaacacactttcatgctccctctaatcaattgaactatacaatcaattgacaaacatttttgtttaaaaatacataagttcctattaagccaaatgttataggctaccccgacccgactaaatctgcatacttcagc

SEQ ID NO: 85884 - DNA, 725 bp, Cannabis sativa
ttattaagtgatacaattaataatggaagaaaaaatgttattaattattaagtgatacaattaataattgaagaaaaaatattattaagtggtgcttaatgcgcgcattcttagtcatatatttaatttatttaagtatatttattaaattatttttatcatatactttaatagttatatgcaatttaattaaattaacattttaatattaagaagaaaaaagatttaaaaagttagaactatcataacaattcaacaccaaacaagtgtcatcataattcaacaccaaacatcaatgtacacttataatatacattccaattcaatataaattctgcagcgctctcaaattaagtaattgaagaagaatacaataataccaaaatatcagtacaaatgcatgtacttaaaatcaatcaataagattacaatataatttttattcatgaactcaacaattatataaagctagtaataaagataaaaataagtagtgaaaaaataaaaaggtaagaagtaataatgtaattgttaataaataaattcatatataattaaaggaggagagccaagtcaatctttctagtaggtggaaacatggcctaccgacactgagagatgtgtgcatacatacagtttcggcaatagattctgtgagctcatattcataggcagtgttttcttataatggataccacaagttcatcattagaaccatatctttt

SEQ ID NO: 85885 - DNA, 1002 bp, Cannabis sativa
aacttgttttggaacaaacatggttaatgaaattttaactgtctcagtttcgggtctacaggataaggatgaaatagtttgggagtatgatagttcggggattttctctgttaaatctgcttatcacttagccttttcacatcaagaccttccttctacttcctctcctgataactctaagaagttctggtcaaaaatttggacctcaaaaattcctccaaaagtgaaaatttttatttggcgtttgctttctcaggcaattcctgttgctttttctctgtataagaaatgtatccttgattctcctttgtgtcctttgtgtaaaattcagcctgaaactgctaagcatgctttactagattgttccagatcgaggaaagcttggaaacactcaaggtttgttaattattattctcagtttaaacatcttagtttatatgattttttccacaatattactcaagcaagaactggataaggataatgttagtatgtattttttgcttgctgttttttatgggctctttggaatcaaagaaataatcttttccataataagttttcactgcagcctgttgatgtttatgattggagtgttgatttctttttcaagtatatggatgcgcaacaagtttcttctactcaacaggtggatttgttagatttgcatggcttacctgcaggggtttccctccagctttttacagatgcagccattgatacttctcgtaaaagatatagcattggggctgttgttatgaactcttcgaatcaggttattgctggttttgtgaagccttttgaaggttgtgtttcgccggtgatagctgaggccaaggcgattcttcaagctttgcaatgggttacttgtattcatcttcctgttgatgttctaaaaacagattgtaaatctattgtagataaaataagttcctctaagaggggttgtaatgtcctggatgattttatcacttgtataaggggcttattatctaactgccc

SEQ ID NO: 85886 - DNA, 766 bp, Cannabis sativa
ccgaatcatcctgaagacgagaaatcgtattgtgctttttcctagctgtagctttagcgtggaagaacttactattgctatcaccttcacgaagccacagttgtttagatctttggcgccaaaagatctcttgccgattcagagtctcacatagtttcagttcagcatcacgaaaacgttgtatagaagtagcatctctccctttcttccatctccgaatctcccttttacactgcgagatttttttgcttaaagttacatgtatactccctaccccaaactgcaagcatctccccgcaatacttcaacttctcagtaatcggctgaccactacaatgctcccaacagtcagacacaacttgtaaacacatgggctcacgcagccacgcattcttaaagcggaaatgccgaaatggaactacagagttactaaagataggctcaagaaataacgggcagtgatccgaagctgtgatttcaagatcagtgagcttgacaagattaaaccgttgaaaccattgagaagacaccagagcacgatccagtcggacttctatccaagcatcagtacctcttccgcgctcccaagtaaacggataccctaacaagtcaagatcaatgagatcacactcagcaagaacatcattaaatccatccagaagccattgaggataatcatgaccgcccctcttatcaagatgactagtaacactatttaaatcgctatgacacaccacggaaaattagactccaacctcagagttcg

SEQ ID NO: 85887 - DNA, 550 bp, Cannabis sativa
gtttttgaaaatatttcaagctgcttagaagaaacacatgacttaatattacataagcttgtaggaagcagtggagacaacttttgcaagaaactgatttttttggtcatatatataatctcattcctgtaacagttaaaacaaaaacatcataaacataataaacaaactataaagtaactatacaataaaaaataaaaaactacaccagtaacaaaaaaaaaaaggtactagcaaaaaaatagaaacaaaatacacacctcaagagaattttttttggaatatcaaaatcttcaaacttgtctgaactcctaaaaggaacatttaaaaatgtataacataaaaactcaaaaataaattaaaccaactaaatatttaattttaaaaaaatatttatcaaaatatcaaaaaaaaaaaaaaccaaaaaataactacaaaaaatatgttataacaatacaattaaaaacaaccaaaacaaaaatagcataaaaatttgaacaaaaaaaaaacataaaaacaactatttaaaaatatgaaaacacttgaaaaa

SEQ ID NO: 85888 - DNA, 787 bp, Cannabis sativa
atgttttcactggttttgatttttcagtactttgaactcccatatggtatttttattccatctttatttccttctgttaaggtaccattagtagaggaaagtaaagaaaatggagatttattacctaatcataagattattgatcataataatagctcaatttacaatgcttcaaactcaaatgacacttacttaactcagcttaatgacacaagaatctctggttctacaccaaaagaatccttggatttcgaaaaacataacaaaactgatgttgatcatggaaagatcaacaccacaaatagtagtttttctgttggttctccacctcaagataattccaacacctctttagtagtgaaaaaggaaagtcctgagccagtgcataccgagcttaaacaaaaggcgaaaacctcttccacgaacacagccccgaagattactaagaagcctgagactccggtgttggatgtttattcggtgtctgatatgaacaagttgttggttaagagtcaggcctcatactattcagtggtatgtaaatgaaaagactttggcattgtgtttgaacaagatagtgcttcaaattgtgcttatttttcttcatttttatgtattgcagatcccgaaatggccttctgcaactgagcgcgaattgcaggctgtgacattacagattgagaatgcaccaattgtaaagaatgatccaaaactatatgctcctctttatagaaatgtttccatattcaaaaggtaaatagattctgtgctagctacttctaatcac

SEQ ID NO: 85889 - DNA, 811 bp, Cannabis sativa
gaatcagccttggttggttttaggaggattttaatgagttgctttcaaatgatgacaaagatggaggtcccccaagaaatgatgctctaatgaacaacttccgaactactattgatctgtgtaaccttcggcctataccttattgtggagactctttcacctagaaaaataagaaccatcacggtaatatcctaagggaaagacttgatagaggttttattaatagtcactggtcatctgtttttgctgaggaagatattcaccacttagatttttatcattcagaccatcgagccattgtttatactgtttctcatcctaatcaaccgactcttcctaagaaaagaaactcaagatttcgctttgaacaattttggttaaaggatcctgattgtagaagcattattgctgctcactggaatgactcggctaatgatcaatccttgaatccgttgctgcaaaatattacagattgtgctacagccctgcagaattagcaccataacaaatatggcagaatgggaagagatatagcagctgctcatcatcactcagctcagttacataatgtgaaatctagtgctactgatcatattcaacaaatggaaaatgctgaccgaatccttgatgatttgcttgagaaagaagagttgtattggcaccagcgctcacgtgttgattggcttcaaagtggtgattctaatacgaaattttttcactcccgtgctaaaacaaggaatgctgtcaacaagatcaaaaggattcaatcttctactgggggttttatgcatacagaggaggaaattagtgc

SEQ ID NO: 85890 - DNA, 680 bp, Cannabis sativa
ggttaatgattctattagcaaaattttacctcttatgttttgcatttttatgtaaaaaactgtgccatgtgtgcaaccataaattgaattaagtagctaaaaggaattagtcaattggagaaatgaattttgtaattctatttgacaaaatatgatggtttagatttattataattgatattttgtaattattatttataaaaggggcactgcagtttttatgataagagccagaaagggaaaatttgaaattagatagagttatgtaaaatagaatctgataaagtttgattttgtgatttggggagctcccttagagattgctaaacatgggttttaaccaaataaataatgtaacccactctactatattgcagccaatatgaagtttaactttaggaaatgttttggattcatactgtttggcattggcattttgttgtctcaacagttgttctaacgaaacctgcccatgcctttgattttatataatgataaaatatatagtatatacactactgtctaatgattagtctccaaaccaaatatgaatggtttgtttgttttctggttagcctttgattcctcaggtataactcacactcaataatctgattctaattttttcagctcattagtttgaaaataattttgttgttattcattgtactggtttgatt

SEQ ID NO: 85891 - DNA, 560 bp, Cannabis sativa
attttctaaaaagttaaattattttaataaatataatgtatattttttttaacatatccttcaccggagaaagttttaaattgtgttggcacattttatgaatcaaccacaatagttgacatattttgatatagtagagtttttagttttttgctgaaagaaattatgttgaatattattgacaactttatgtgaaaatttattaatgaactaccattatagtgatattattttggctattaaacatgtaattgtaattatagtttttttttttttttttttttttatgattttgaagctcatttttattaaaataatttatttgtgctttaaaattagaaattaatttgaaaagtacaaaaaatgacaattttctacagacccgtttaggggccatttgataaatatgggtcaaccatttcataaaaaatgggctggctcgtttaggcccagcacgggtccagcctaatataaataataggggcatttacatggtatactaacttttgctattttttttacaaaaatactgtcatgcagtatttttgacgtttttactg

SEQ ID NO: 85892 - DNA, 520 bp, Cannabis sativa
aaatctaaaatcctctcttgtgcgaattggatgttgattgatatgtaaaagtaatcgatctaatctaattctcacatatttaaaatatatatacaattaatattttaatgtaaacaataagaatttaaaatttaacacatgatacaaatgtattttaaaatttaattgatcaaatgtatattccattctaatataaggaaattatcacctaaaataaaattaaacatttatttatacatacaattttttcttcttcttcctttgaatttattattttttgttttattcattttaatttgttgttggagctaggatcatccctagtgtcaacctaggcattaaaacaaaatttgtcatttaaatgtcaacctaggtgcaggaccagccccaatgttaatctaggtgctaggtaggtttttttggcccctaaatgctctcattttctcccccaaaacacttgtcactttgttattgaagaaaacaaagaaaattcttgggataattcttgggaaaagtcctt

SEQ ID NO: 85893 - DNA, 504 bp, Cannabis sativa
gtgtaattagggtgaatttatttattgattaaataagcgtaatttattaattacagagattattttagaatatgtgggtgttatggataccattttggaaataaaaaattttcgggcccggcgaccgtggaagctcggcagagtggttagagatgtcacgaaaataaagcaatggactattttagaaatgttctggactagtttagaaatttaggttgtccatttggtggattaattagaattaccaaattacccctagatgtgatttaagtttaggattacttaaggggggtaaacgagtcatttttggaggattagtgtttgactttctatttttgtcttcggctgactattttggttgtcgtgataggaccaggattgcccagcttcttttccacttaagtcggtctgcatgcttaatctctagactgaggtaagaaaagtattatgcactatttatggttaacaattatagttgtgatagtcttgattatgattgagatc

SEQ ID NO: 85894 - DNA, 1272 bp, Cannabis sativa
ccgcgaccgcagtgtaactaattgggcaacatcacaggcccaaaatgacgattcacattttacaagaaatcaatctgatgtattccttgcactgctcatttatgtcgatgacataattgtagcaacaaacaacaccactgctcttcattcctttatctccactctcgactccaggttcaaacttaaagaccttggccccctccattttttccttggccttggaattgtccattgctcaaagggaatttatgtatcccaaaggccattcacattacaactcctcaaagacactagatgcctcgattctaaactagctctaactcccatggaaccctatattaaaatcagtaatacttcaggggaactccttccaaacccaactcaatatagaagtcttattgggaaacttttatacctcactatcactcggccaaatataagctttgccgttaataaactcagccaataccttcaatctcctagacaacctcacatggtggctgccaccagaatacttcaatacctaaaagattcaccatgccaaggcctcggtttctatgcttccccacctctcaaactttagcttcaagctttcgctgatgctgactggggagcttgtgttgataccaaagaatctatctctagatattgtgttttcctgggacaaacactcatttcatggaaatcaaagaagcagccaacagtttctcgatcattagctgaggcagaatatcgtgcaatctctaatgctacatgtgaattcacatggctcacatcccttcttcaagaacaactcaacatcaaaattagcctgctgccttctgttcttttctacgacaatgctgcaatctacatatcagaaaaccccatcttccatgaatgcacaaaacacgttgagatcgattgccacattgttagagagaagatcattaatggatcactgaagctgagtcacgtctcctccaaagccaaacgtgcagacatcctaacgaagcctctgtttcctacctcgttcaataacattttgtccaagatgggtataaaaaatatctacactccatcttgaggggggctgttaagttagttgtttccattaattctgttaacagttagttaagattagtcatagtggctttgtactatatatagactcaactcttttgtaccaattcagattatttttggttatacaccttattttgcttatgacgattcaaattaaaatcgaatgagaatcaaatcaacttaaagtagaatcaaattctaatgcaa

SEQ ID NO: 85895 - DNA, 588 bp, Cannabis sativa
ctcatctcaaactcactatgcatacacttagaaaattcttcacaaagagcatcattagtagcaccaaaaataatatcatcaacataaatttgtactataatagtgtcttttgattttctttttttataaaaaatgcattcttcgctttacccattgaaaaaccatttgaaataagaaaagtacttaacctttcataccaagctctaggagtttgctttaaaccatacaaatcctttttcaatttataaacatggttagggtatttgtgattttgaaagctagatggttgagagacatatacctcttccataatgtacccatttaagaatgcacttcttacatccatttggtacaagataaaattcttgtggcatgcaaaagctaacaacattcttatggactcaagtcttgctaccggggcaaaggtttcctcataatcaattccttcctcttgtttgtaaccttaggccactaatctatccttgttatgcataatgatcacacgctcatctacattgtttctatagacccgttttgttccaatcaccaattgatgtgacgagcttggaattatctcccaaatgttat

SEQ ID NO: 85896 - DNA, 771 bp, Cannabis sativa
ctataattccttttaacacttaccataaatgtacttctatatagaaatcattatagtaaataccgatgctataaatttgatgtttgtaacaaatgtatgtgacattaactaaaaccttttattatattggacttctttctatgttgatactactgaggattgctgagagtttccacttttcaagtagaagaaacatggttgaagcattagtggaactattgctttataccttaatattttaatgtcctctgattatattatgtacttattgctttggtgtcaaatgactcttccgatatttctactgtatacttaaaatgttgattcatcctttttctctgcatatgtgtttcgatgcataacctaatgtgttcttttggttaactttgttttttgtatgtaattgatggaatgtattgaatcaagtattgacaataaagcttgaatgaagaggaagttgttaactgcattgaagtgggttaggtttgagattttcagattggcctctgataataatcaaaggaaatgggattagtcccttttttgaaatgattcatttgtattggtcataatattcactagtgactgttatgtagagttcgtttttgccttaaaattccaatctttagtcattgactttcaccctttttggtcttgtttcaaaacataaaataaaatagcatgattgtttgtagcagaacttgttttacaaacaaaagctaggaactttaatttaaagtctatatatataggttgatgcatatgcgtttt

SEQ ID NO: 85897 - DNA, 515 bp, Cannabis sativa
aatactttaacttttgatgggacaaagcttttctatagagtctttgtccaagccaagtcctcagtcgagggatttgatgtcaaccaagagaaggctgacttacaagaaaatactcctgatgggtccggtttccaaattcgactatcatccgaaatacttaacactcttacatgttccaccttttgcattaaagatataaggcttggcacctctctatccattaagctccttctaaattggaaattccaattctccacccatccacctggtggcccttcatccgctatcatttcttttataggagcattccttccttttgatattactgctaaatcagggaattcactcagcaagggagagttgttaagccaaatgtcttcccaaaatcgatcctatcccctcttccaattttgaaatgtaccaaacccaagtactcatcgtacaaatctgagatatccctccacgggcctttgggagacaaacgacttccattcttggaatcccagaaattatca

SEQ ID NO: 85898 - DNA, 663 bp, Cannabis sativa
actcttcaccgtgtatgaacccgaaacctcgtgactccaatataataacaatcattcatatatatagcttttttgctcaaaagggatattcaatataagaaaactatccctaccaaaaaaaaaataataagaaataagaaatctattgtttgggagaaaaatcagcaagcccaaattattataaaaaaaaaaaagatcaaaagtcataaaaggtccattctaaaagaagtactatatattttattaaatatgtatcctagatactagatagatgacacatctcaaatggaatgagatagctcaaaagagatgacttatctcaaatgagatacatatctcggattggctgatgtatctcggtcagtcggttagctgacgtatcttggtcagttgaccggttaggtgacgtatctcgatcggccggtcaactgacgtatctcgatcggtcgatcggatgacgtatctcggtcggtcggttggctgacgtatctcggtcagttgatgtatctcaatcaattggtcgagtcacgtatctcgctcgatcggtcggttaacgtatctcggtctgacataaacataaacaaaacaaatgacttacatccaattgtttatattttcggtggtggtgggttctatcacgagtttgaagagagagagagagag

SEQ ID NO: 85899 - DNA, 580 bp, Cannabis sativa
tatttataaaagtaaaataagtgagaattaaattgcatcaataataatattatacttcaaaaagatgtcagacataggtaacctttaacatttctcataattatagagtttttcatttatacattttaaaatattttttttatttatatgaaaatatacagaacaaattaaattatagcccaaatttatatcagaatccacaaagtaattactgaagcaacccaaactataaaaacaaataaaacaagttaaaaaatagtatacggagattattttgaaatgtatataaataaaaaatccttaaagagaaattaccacatccgctaccacttttctttttttatttatttatacagtttagattgctttcttgattgttccgtaattgctgcctaagttgcaatatcaatttgaattgctccatgtatttacatataaatgcaaaaaaaaaatctactttaaatatataaatgaaaagatacaataactaaatacaacaagttattttgggtatacatttatagtgggttaaaagattttttacatttattttatctataccttttttatttatttattt

SEQ ID NO: 85900 - DNA, 730 bp, Cannabis sativa
tggaagtgcttttttccaagataattggaaattggtaggggatgagatagtagaggcagtattatcttttttaaaatctggaaaaattttaaaagagcttaatactaccactattaccttaattccaaaatcaaagtgcccaaagagtgtggtggatttcaggccaatctcatgttgtaatgttatatacaaaacagccactaaagttctatgcaatagattgagggggattcttcctgatctcattgctacgaaccaaggaggcttcacacatgggagattcatagcgcataatgtacttgtatgccaggatctggtacgactatatggaaggaaaaattgcaaaccgagttgcatgatcaagattgatctaaggaaggcgtacgacactattgaatggggattcataaaagagatgatgatggcacttggcttccctagtaagttcatttctcttatcctggaatgtatttgcacccctaaattctctttactcttgaatggctctatgtgtggctttttcaacactaaaaggggattaagacagggtgatcccatgtccccactactttttgtattgggaatggagtatatctcaaggatctttacaaaagtaggcgagtggcctggatttaaatttcatgatagatgtggacaaatcaaattgaatcacttgtgttttgcggatgacttgcttgttttttgtaatggtgatttcatatccataatg

SEQ ID NO: 85901 - DNA, 518 bp, Cannabis sativa
atagatcgatattgttattattatagcttcctcacactcttatatatgcattgttatatgttggtaggtaggctgtccaactacgaagcagcgttttatgagaattgattctttttttttcttttaaattaaaataggtaagacttgatattcaatgcatgtaagtactgttattgagccggcaatcttcaggataaatgaacggtgtcttttaaatttaaattaagtatagattaaaatatggtaataagactcactataaaaataaaattgtatcaaaaatatgatgtgctaattcatgtactgggacacctagggcctacatatgggcaaattaaatattctttgaattgtaaaagaacggttaaacgaagtgcattattattttttgttagtctatgtatgtactatagaatcgtgggaatgaagtcttccttctttacagatatataattgcttaattaatataatctgactttataatttataagcaacataaaaacgtgtccttccgaata

SEQ ID NO: 85902 - DNA, 1566 bp, Cannabis sativa
atgcccagtcgaggatgttatgcgccatgtaattgcagcttcttgtaattcaagaatttaaaaaataaaataaaataaaaaacccaatatatcaatttaagaaaatatcaatatatgtagtcttttataaatttattgcctactattttaaatatattcttacagttctttccattttataattatatagtgagttttatttaattttatcaattattttttgtagatctctattttgatttagtcttttattaccctatattatttgacaataactttctttttctttctcttttagatcacaaattatatgatgagtttttatttatagatttgtcaattttttttttcgagatctctattttcggtgagactttttttaatttctaatatttactaatctctattttgattttggtctagtcttttattatcctatatcgtttgacaatatctcttatttttttagaccacaaattatatgatgagttttttttttcacagatttgtcaattttttttttttttcgaaatattttttcttgatgaggattttttcatttttaatccttttttatctctatttcggttttggtttagtcttttactaccctatttttttttatatatctaatactctttctctttttttgtaggtcacaaattatatgatgaggcaagtaagaaatttataataaaatcatcacttatgtataaaaaaaattagtagttaattaactcaagtatatgatttattttaagctactaaggctagcttagtggtgaggggcgatgggaaaaagggagaggtcattggttcgaacctaggacccttaagctattaagctaatatatgattgtataataccattacgctacactcaaaaaaaaaagtatatgatttattttatgtacaaagcaaacttattttgatcaatagtgataactacaaataagatacgataataatagcgactttgaatgtagtgacaactacaagtgagattcggtgatgacattggctttgaatgacaacagatttaaaatcatatgatgagttttcttttataaatttataaattattttttttagatttctattttgtgtaaggattttccaacttctattttttatttttattttactataacgtttgaaaatatctttttgttgcttttttttttttagataaaaaaattgtatgataaatttttttacaaattataacatatttctataacttaattattaataaacaaaatataaccgtaagtaaagcgcggtttgtttcttagttttgttataagatagaagttctaaaagtataagttcatctaatatctaaaataattaaattcttactataattaagatattttaattatatttaaaaatattttgacttactgatcctaattgcaattttctttccttttttttaaagaaaaaaaaaatctaaaatgtaatttttaaagggaaatttgattttttatgcttacatttggttaaatattttcccctaaacacataataactaatatttgtaggatatgacaacttttatga

SEQ ID NO: 85903 - DNA, 1142 bp, Cannabis sativa
ctccttttgaatcccactctctttcattacacctctcacttttgcaaccccttcccaatttccagctgcagcatatatatttgaaagaagaatatatgtccctgagtttgcaagatcatgtcttacaagatactctgcaatctcctctcctaaagtagcattgttgtggagtctacatgcaccaagtaaagttccccacaagaccggatcaggatcgattttcatgttcttgatgagttcataagcttcctctagatgccctgcacggctaagaagatttaccatacatccataatgctcaatcttcggttcaattccatactcaagtttcattgagctgaaaaactccttgccctcatcgaccaaaccagcataagcacaggcactcaagacaccgatgaagcttatgtcgctagggaagtatccaatttcaagcatttcattgaacaattctagtgcatcttggctaaaaccatgcattgcatacccaacaatcattgaattccaagccacaacatccttgtcttgaatgctatcgaaaaccagacgagcattctccacactaccacatttgcagtacatatcaatcaaagcagtgcccacatgaacatttattcgaatcccattactctccatgtaagtatgaagccacttaccagactccaaagctccaagctgaccacaagaagatagcaaagaaagcacagtgacttcattaggctttattctctctctcaacatcttcctaaataacaacaaagcctgattaggcatcccatgttgagtatacccatcaatcatcacattccaacacaccaaatccctctccctcatttcatcaaacaacatccgagcttcatcaagcttcccatgcttagcataacaagtcatcatcgcagtcaaagaaaccaaactcctcttaggcattgtaacaaacagttgttgtgcagaacaaacatcaccagctctagcataaacatcaatgagtccagtcctaacatacaaatcaaaatcaaacccaaatttaatcgcttgaccatgaagcaattttccatgcccaagtgggcaatctttcaaaagagctgagaacgtaaagcaattcggttcaacaccttgtttcaacatctgggtatagtacagta

SEQ ID NO: 85904 - DNA, 589 bp, Cannabis sativa
aggcggttttaaccgaaggcgattcttttggttttcggttttttcggtgtcggttttttcggtgttcggacggtcggtttactcggtttggtcggtttcttggattttttgctcacccctatcgggagctgtccattgctccataggcaatgtcgtcgcccagtttaagcttgcatctgtgacattaactttttgagcattaaaccattcaacataatttaactttgccattgtcactatctcactcgcatcagggtgcttggagttccaaactaactcgttccgatgagtccaaactgaccaacagaccataccagccttaagagcctcgatcgagttccacgatacaaaacccgcttcgaaccaactcgagaacatcattgcatcaggcgccacaacagaaataggaaccttgctccagcaactttgagcaaaagagcaccgcaccagcacatgcagaatcgtctcaagagcagcaaggcagaacggacatgttgcagcaattggaacatgttttgtggaaagattaaaccgagttgggagactgttggtagaagctctccacaaaaaattaagaacctttggaggg

SEQ ID NO: 85905 - DNA, 587 bp, Cannabis sativa
tatatgttcaggatttaatagaacttatatattaaacctataatcatgtacgaaacatatgaacaaagcatatgacaaaattaagatatgattcgtgatccttattgaaagtaaataagattacaatgaaattaagttttatttatggaataaattctcaacaaactcccacttgcactaatataaaaccaaaagtgaatttcaatttaatttatatacttgatgtccttatcaagtgtagtatttggcataaactatgtaatatgatctaataagctgtattcagtatcaatccactccgtcagcatattttccttggtcacaaaaaattcataattttgtgaatttcccatccgtatattttactcctcttgaggtacaagactatttactatttggcaattgcatttgtgttatcacaaagtcacagtagcaattatttcatgtttggaattatgccaaagtttttattcaactttcccgagtttgaataattccttaattgcctttagggcaaccttattattcagccatactggaagagttagtgatcttgaattggtttttacacttctctgaaattcact

SEQ ID NO: 85906 - DNA, 533 bp, Cannabis sativa
aaaaagagagaaaagaaaaaaaaattattaattcttattttttaaaatattttttacttcttttttaaataaattttataatatttaaataattaaaattttgtgaactaataaaaacatgatatatgtaaaattgtataatataaaatatctatcttagcacttaacatatataatttaaccgaatagtaaaaagcaaaacaaaactaagtttggagagtttcactctaaaatgttagttgctgggattaagtgttactatttatataattccaataatattatcactaataatatccccatataatattattgtaaacttacttttgtagttgtaagctatattccatatctttctacaagcaattttttaatttaaaacaacccttcacctatcatttcaaagaaatttaaatcaatgaatttgatgaattagtctgtgatcaactctacaatataaataatatataaagtaacaactaatatcacaagattcatttcttttttatgagtaaaaagattaaataccatca

SEQ ID NO: 85907 - DNA, 553 bp, Cannabis sativa
ctttctcctcttcttaatcaaaacaaccccatctcactacaactccaactcacttattcatctctcctctcaaactagacgaacgggcttccaatgattgctcaaagcctcgcctggatgacggcagttctgccactattgcctccttagtgacgcccactgggggtccctcaattggtgttggcattgttcggttgtcgggttcctatgcggtggagtgtagtggagtttcacttctcctcctccagcctccggtggtctctgttgctggtggtaagtaactaaatagataatataacttgaagtggccgcctatggataacatgtatgtttggctgaggtctggtatttaattattgaattgcctaggcacttgctttagtttcttgcctgtttcctaaacatctgggtatatttttagggcacggttacgaactaaagtttgcaaaagtatgttttggtgatttcggtgataagaaagaaagaaacccataagcaaccatattatgttcttgttttctaagtagtttcatgttgtaattcaatcactcta

SEQ ID NO: 85908 - DNA, 559 bp, Cannabis sativa
tgttctgcaagttgctttctctcattgatatatgctattgttttaggtggacaatctgaaatctcaatgtccactaaaactctagcatatttaatcatagttctacttagcgtgaccttgtcaaccataatcggtttgccaatggtactaacaagcgcactaagattgtttctaccccagtattgcaaaccaagtccattcaatcgcacacaaacagggactgacttaacaattctctcagcatccatatctgccgtccagggtcttagaataacaggttttttatcaaagtgaatcacccctgtttctagtaaaaggtcccttgtcaccgcatctctgaaactaacaagagtgaaacccgaattcattcgcgcaatcctctcaacccccagattaccccagattcctttaataaacccctcaaaaaccctgaaaggggggttagcccgaacactaaacaaacaatcgaatttttccacagagcagtctcactttcaacctcatccaaatctaatttagcaatcgattgatcccctactttcataggttcagtaaattc

SEQ ID NO: 85909 - DNA, 635 bp, Cannabis sativa
atttgcaagtttggaattccaatcgaaatagtatctgacaacaaaactcagtttgatggtgaattgttcactgaattctgtgaaaggaataaaattattaaaagcttctcatcagtatcgagacctcaagcaaacagacaagtagaagctgttaataaaaccttaagagatactattaagaagaagtttgatgctactaaagaaagataggtagatgaactaccacaggtgctttgggcccatagaacgacagagaaaacagtgacgggacacactccattttcattggcattcggcttagaagcaatgttaccagtagaagttaatattgcgacccacagatgcaaattttataattaagaggaaaactaagaacttttgaatttatccttagatctacttgaggaaagacacaatgagttgcagataaccgatgtatcctatcaacacccaataacaagatattttaataaaagagtccgaaaaaggctttttaaagttagagatttggtgttaagacgtgtatttgcaagtatgcgagatcctgctgcaggagtgtttaatccaaattgggaaggtccgtatgttattgaagctatcgtaggaactgaggtttacaaattagcttggcttaa

SEQ ID NO: 85910 - DNA, 713 bp, Cannabis sativa
atttcttacaagaagcgtatgtagtgactaccaatatattcttggtgggttttcactaagtgttccctaatttttgcatcatttatctctaatttagatttaattctgggtttgtatgggatggcaagttcagtaggacgacactcactctatttttaaataaatattttctgtggacgataaacttctgaaccagattgagacatttctgcagagagaaagtaatcccaattcctggatgaaatttatcaaaccaaaagttggtaaattggagaaactcgaaaaccaacgttctgcctaaaccctaacatttacccaaatacaattcagctctaaaattgctagaactaaatgatgtaacaaaggtgctaactaggaaattagtaattaaacccagaaacacaaaattaaaagcatgtaagaaactaaagagaaaagtcactgtttggagttggttttggggacgatgagtggttttgcaattgacaaaacaatggacttgaagtcgaaaattaaatcggacgatattcgcaggaaaaatgttaatgacaaagatggcatgcaaggttttgggctaatctcggtatggttttttcatcagaaaagcttgacaaattttcagggtttttgaaatggcaaaggtagtgtgaaggtggttctttttttttttttttgttttatactatagggtcaatctccgtcagatcagggag

SEQ ID NO: 85911 - DNA, 717 bp, Cannabis sativa
tgtacaatcttcatccgctcgctctcacggctgctcagccttagccttgcccttacctacacatgcaaacaataactatgagacgacaaattcactaagaaaagcataatcataatcataatcataaatataaccagaattacaattaggtgcccatacacccaattataatcttacctctgcacccaaggtggtactgagtctagaatatacctacacagtactattgacaataatatcaacctatactcggtactctagtcatactatagtcgtaccgatgtgatagtgtcaaatagtacttgagccaaacatacatttatcggtatccaatacaattctacgtatattgatcctgctatcaatgtaacctaacaagcttaacaaacatgcacactaaacatgtaaacacatatgcatatcattatactaatcctacctcgtttccgaattcagatgtaccggtcaacctgagtggaacaactgcttaacactaaactgtgactaaaatggtttatctaacccaaatctttacagtaaacatctaacattagttcaacaaggttcggttcatcctttcagtaacaccatttttctctagcgtcttcactacgcttctatgcctagtgattccgaacccttgacacattttgtcaaactcagagttaacaaactccaaaccattatttgtcctaaggttcttataacctttgacat

SEQ ID NO: 85912 - DNA, 1115 bp, Cannabis sativa
gtcatacactgttattctcatggttctttggccagtgtataacgcaagacaaaaatggctcattattcactacctcttctagacaattcatgtattaacaatttttccatgaatcctgttagattgatatgacacacgtcatgtccatatttaatgcttaaaatatgagaataacacacaattataatgttgtcaccaaagtgaaaaataatcataattatattcttcaaactatttagtcctataatttatcaatgcaatggatttatactaacatgataatccataatgtggtttacttatacttggctaagttaaatgttttttctaaggtatatattaacaaagtaaacttatatcggatgtataagggttacattggactgggccgatattgatagtagaaaatatatcataaacttaccgtatatcttttctaagttgttatcgcttaattgatcattgagcttaatcctgagatgattaagctttaacctagttgtaatattagagttctttgacttgttcattactagcttactcattggcctagcccatacttacatcttgggaattcgatagatcaatgacgtgggagcgttaatcatagatatgaatattctataacttctacaatcatttaaaagtaaaacgatagtttcctttgagcttggctaaatgagttaaatgttgagtactcattttaagtaattacattagtttactgaaatatcaattacgagtaactaagtgtttaaaggataaaatcattgaagggtaaaatagtaattttgtacctactcaatgtacactgtctgtaaaggatcattaattagtttgattgaaacaaaagataattcataacgtatctatatttgatatatagtatgttctgtgtaattaagagtgcaattctggatctatggtggagtcatgcagaattaataagtgatgaagtttactcggtaaatttcatatcaacttcttgagaacttaattttataggcttacggtacccacattacttgggataaatattttcttgatgactcaattaattgatttatttaatcaattaaaattaaaaattaactatgtctaatttgagaattttc

SEQ ID NO: 85913 - DNA, 736 bp, Cannabis sativa
  modified_base (27)..(39): a, c, t, g, unknown or other
  modified_base (711)..(711): a, c, t, g, unknown or other
taggatgttaatcaaacatacttggtnnnnnnnnnnnnncctggtaaaataatttcaacagattcgagggtcgttactttggttgaaccgatcgtggaggttattccacatagcaagagccgaatctttaaacataatacttgctgcaatttcacgtgagacagattgcaatatccaagccataaccatactattgcattgatcccaagcagatcgatatggatgattaacaggaggacgaggaagagtacctccgataaattgagttttgttcttggcagccagattgatcgtggcagcgcgcttccatgactggaaattatcttggccagtcaattggaaggggacaatgagaaaattgcggttgtctccagttccaaggtgatacggattgtgttcatcaatggaaggtcgatcaagattcacccgaggagtgtcatagaaaccaaaaccaggtggaaaagaggaagagttcgtcggagccacaggaggcggagctgaaaaaactgagggaaccgaggagataggtgcaaatcccgttggaagagccgtcgagaagatcgacaaagaagaaggaggtccagggggacgcgaagttggcagcggaatgttcggggtagcattctcgatcacaatctcaggtggcggagataaatcggggaagaagaggcgccgacgaggtgttcgaaatattttacaaggatctagatntactaccatgtatgttttattaaca

SEQ ID NO: 85914 - DNA, 1298 bp, Cannabis sativa
agcaagcagttccatgggaaccaaggcagaggtggacgtcagggttatttttaccttgagtgcccacgttgtaagaaacatcatccatgagagtgcaaccggaagacatgcttttagagcggcataatggggcatttcaagaaagattgccctcagacaaagaaaggagagctgaagtcataggcaaaacctgtacctgctcgggtgtttgccatcacccaatctgatgctgcagccagtccttcagtggtgacaagtcagcttcttgtcaacaactccttgtatactgtgttttttgattcgggagctacatgctcatatgtggctacacgggtaattgatcttttgggtaggccttgtgatattcttgaaagagggtttggaaccctaatgcttagtggggagttggttatctctaataggcgcattaggtctatgccagttggatcgaggatagggagttgagtgctgaccttgtagaattggaattaataaaatttgacatcatacttgggatggatttcctatccatgtatttggccagtattgactgtaagcggaaaatggtgacttttcagccagaaggtgaagatctatttggttaaaaaatatgggtgacttaaacatctatgatatatatttttttaaaatacaatttactaaaatagtaggttactggatgaccatttattatttttaaaaataaatttaaaagttactcaaatatattaatataatctaaatattaattaattattaaagtgcatacatataagttttaaagataaacaaattatatatcaaattatatattataaaagtgatattttttttatgaaaagttatttattggtttattattaacatcataagtaattaaaatgttacttttgaaatgcaaaaaaattaaaaagaaaagaatgtcaagattagttttatttcaggcatattattttagaattaaggtatttttaatgacatgacaagacattattgtaattgaaatttgtaagttatttttgtaattattatatattttacgtatattttttattaattccctaatatatattttcacattaatctacatattatattattaaataatatcgaaaaactccactaaattaaaatatatgacacacttgtaatatatatttgtttaatcaatcaaaatattataccatataatatatatatactaggtgaatgtacgtgccgagccacgtattgctagtttcatttaagattttggtctttttaagattttgaatgtattttatttttaaagattacaa

SEQ ID NO: 85915 - DNA, 618 bp, Cannabis sativa
gaatttgaatttaaaataggaatataagatgaagaattacatggaatattgaagagcaattgtctaggactggtaattggctaggcatagggatgataatatgatctctaaatctttcagcgacattcttccttgaataaacacaggttcaaggttgttacaatctttaatcaaccgtagcatttcttcatgtaacaaaccgatttcaaatttaacaattataggattaatctccttaatatcagtgtcaaaagtcttaggtaaaggttcaaccgtctcccaaaaatttgattccactaaattctccccttgaataaaattttgtgaaaaataagggatatttttcacaaacaacacatccatagttatataattacgtttagtaataggattaaatcatttatatccttttttattagaggataccccaaaaaaatatatatttttcaactctaggatctaacttagacctagaccttttaggaatgtggacataagcagtacaaccaaatttttttaaaggtaaatcagagtgaatcctagaatttgaaaagaattttttgaaactttgcaatggagtaatatatttcaaaattttcgtaggcatcctatttatca

SEQ ID NO: 85916 - DNA, 1936 bp, Cannabis sativa
ggtgacttggggaccatggacctatatttcaaagctccaataaacacttgattattattgaactctttaatagaataactcggttcgttaattttattattactccactataaatatggaattgtactctttgacaatatagaattgtactccgctacaaaattcttacttgtagtccattgatataagtaatgtaagtagtttgccctccaattaatagttcataattagagttggtcaaaattaccgtttaatcattctaattatctattgattccttatgtaccattaattcaatgtgaacagctaatccataatcttattatagatttggatccaattgttagcactctcagaattcacactataagggaactaatattcgatcctttcagaaagcttggattacattattgtataaacatgttcctaaccactcaagctattaagctcccaacacagaagttataagaatcatcttctctgaaaaaatttaaagagtgaatcaaagaactcaatgaacacaaataggagttcatgtatacttaaaattcaaactaatctattaataatcattattatgatatgaataactcttttatggtaaacgacatgttaatgaaagatattattacatatcggtccagtcatgtataatcaaattatacacaacacctctactatatgtctatgcacatatgtgatccgaatcaaaattacacacacacatacactagactatagtgtatagtaaatcccacttggtaattccatattaaagatctcttactttaatatactaccaatttattttattcatattgtataatcttaattctcttctacgatcttatgtgattgtaccatctctatatgaataagaaattttcagatatttattaactataatacttctataattaatgtattcatttatcttataattacatttcatatattctataatatattatccattaaatacttacttttagggcaaaaatcctagtctattctttgtttccatcaaaaattaagattcaattatttttagggagcaaatggaactttctaaaggcctgaaattgaacctaatgcccatgttgacacctgacactaggcacagtgcctaggttgatatattgtcaacttggactttccaaattagtttttaaaaaaagtattctgggtatttttttcatcatcagaaataacaaagatacaagtaaactcaggaagaaaaggacaacgggcatcaaactgagcccaacacccaagttgacatagtgctaggcccaacacccaggttgacaatcaacttggtgcgcacgtttcaatcactttattgaaaactctggtctgggaattctctttgaaatggtcaaaaatagggtaggagacctcaccctcgatttcaagaaccttaaaagtattaaaacaaaaacttggatgctctaaaaagagcacccagtgcccaggctgacatatggcctggtgcgctggcttctgctaatctgattctgattctgtctcaatcattcgtctagattttcatagtgactgagagctatgaagttaaaagagtcaaattcataattttatgttttcacttttctgacaaagtgacttattcggaaatcgggtggttttgagtctcttgattttgcaaaatagtaacatctccgagaactggtgactatctccaccgaaacacagaaactgactaagtgatgtcaaaatatcactcaagcttcaaaaagtacatcctagacactattttccctaggcccagcatcctgtgcctttttcgaggggttgtcgtaaatgattgaaatgtgttgttcacggtacataaaagattcagcaagagatgctcctgtgtaaggagagtggtattgtaaagtgcccagaaaatctgccgtttcagctaccacaa

SEQ ID NO: 85917 - DNA, 602 bp, Cannabis sativa
  modified_base (145)..(148): a, c, t, g, unknown or other
tcaattttactaatttagtgattgactagtactaaatcatgctccctatactttgatatttaacaaatcatgtctttcaaactttgacatgtgtcaaatcatgtcatctgaattttcattaatgttagacttttcttactaaaannnnacaaaaatccttaaattcaacaatcttaatagtttacaggggatttttaacagccttaaaagttcaagggcatgatttgacacatattaaagttcggggaaaaaattataattaacatttttctaagtaaaaagttcaggctgtaatattgtaaataaaacataaaagaatgatatttctgaaaatttcctaaaatttaattaaaaataaacgtggacaaattatacactaacacgtgtcattataataaacacagtcagcatttaacggaatagtattaacaaaaatggatgaaaattaacatgtggtatttaatccgtcgaaaataatagtatttaagtgtataatataaaaatataagatatttatgccgcaaatttccttatatgttataaagatgaaccaacgaaatgctattttttcaaattttgagtacaatttttttttttttttt

SEQ ID NO: 85918 - DNA, 549 bp, Cannabis sativa
ttttttatttattatttttgagaaatcaaaacaacaataagtgcccatttataattaaatatttcagtctaacgaaatagaatttatgtgatataagagtgttcacatgttagtttggatgattttttatattttttgaattaagtatagctgttttttttaatgttagaaattaaaccaaatcaataaattgctcaaaccaaaatgaattagtttagttcgaaaccacgatttagagtttatattttttttttgaaaaaataataataaaaaaagaatattatttattatttaaccttaatcttccccatgcgatgtgagattgcatacctcccagtctttcctcttctggctcacgagactctgactgtcataatcacccccctttgagggtttaacgtcctcgtcgaccacacttccaaataggtcaaggctctaatactatgttgtaactccctaactcctagggatgctacatgcgtgcttttataaattagtttataataataaatcaacgatttgacgaaaattgtgttttaattaaattta

SEQ ID NO: 85919 - DNA, 955 bp, Cannabis sativa
atgctaaaaacattctgtatttcgaattctacagggtcttcttgcggccttgtcttttttccttttgaaaccagttggaaacagtcttcatcctgtgtgttctttctgttttctactctattatctgccttcgcaacccattctttcttggcctgagttttctttttacattcagcagtcacatgacccattccataacaatgttggcacacacttcgcttccattcatactggattgttactgtggtgttgctgccatattcattttcaaattcaatcattcctggtaagtcttgctcaatgctaacctcaatcaatacccttggaaacataagcctttctctttttcttgtaatcgcatctaccatgacaggctttcccaattgcccaacaattttaaacaaaggcttctctccccaatacttgagctctaagtcctctaattgtatccaaataggcactaatttcacatcttctttcttaacacttgaattcgggtcccatggcttcataataaccggtttcctatagaaaaaaatatagcccccattcaacacttcatctctttgctcaatagaatgaaatctgattaagaacacctcatacgctaatagctttacttgtccactttctcagtccatttttcgttttgcaaaaccttcaaggatgtgtaatggtggattagatccaagcacataacacaccaaagaaggcttccaatagttaatctcatcctctatgtcctctaaatctatcttcagcttcctatcttgttgagaactcttaaatgaattctctaaattcctcactacagttgcagatctcaaaataggggaagtagggttcataccttttgatatactatcgttacattgctctgttgccttgagaaagctcacaaagtcacgctgaacatcctcttgcctttgaatttcccgtagagagcttcgaggag

SEQ ID NO: 85920 - DNA, 1118 bp, Cannabis sativa
atatgaaaaattctattgcttttgagttttagtcttagaaacttctgggaaatagttgtgttgctatagaaatgctagtaaaatttctctgtgcccaatatccttatggttctgggtaatttaacaatttcttcctcattcttcctcttgacgttcctaatttcctttctagaagaaaagacctctgaaggttttcgttctttgatagtgaattcagtgggggacctctccaagcaatttatgggggaggattcccctgctccctctatatattaggtagtttgggtagctatctgctttgtttttctttctttctaaagaaatcatgtctaagaaggtccaggaagaagatgtcaaactagaagaggaggtcttggagcagaagaatgctccaagattgatgttgaacgacagtccatgggagatggactagtatgttcataagtttaagatttatggtaatcttaggaaatacaagaccttgcatgggcttgagagtgttctagggctacacagggataggctttctattcacagagagaaaccaagctaatatgcagatagaagctttggcatctagagctcggcccatgtggagatgggtgaacaccttccgctaaggtgttacttcgccaacttttgtgcagttcatcctgcaagtgtatcctcttttatctggatggtacattctttgttccaagcacaagaaagaagcaccaacacctgataagatcttgtatttctacaatattaaatgttaccccatgataggtcacagggagaagattggcttttacatgctggaaaggtactccaagaaagtggcctgtcaaatctatttcgtgaagtatacacacgacttctaggactattggttctatacttatggcttcccattaaggagagtttaaacactcagcatgaacttcaacatagccactaattattcagtctttgtccttgtttcatttcttgtcttttccaatcgtcatatcctgatgtctattttattctttctagattgcattccccaatcacatctacctctgaagttggaggaaaaaaatactttttacaattctttgtcacccaaggagttacaggtggctcaacttgta

SEQ ID NO: 85921 - DNA, 961 bp, Cannabis sativa
tgtcgggacggttaggcctggagcgtacgatctttgggacattagggcttattttgtatagtcgctaggcgatagaattttgtatatcaacagtgaaacgtttgtaaatgcttttgtaaacgggatcccaaatttttatatatatggtattttatgttttaattaatcacgatttttaataaactcgttgattagcaaggtgctgcgcagttaagtttaaaatcacgttaacatgcctaaaatagtaaggttttacttcattaatgacccaagtttgagttttcaaactcaaacttgatcattcaccaaatcaaacaccataattagccacaagaactcaattctaataaaaaatgaaccaagacactgaaccacaaatcaatctaaccctaacagccaccacatctcaaaattacatgacaaaaccaactaaaatataaagaattcataaagtaacagtttctagggtatacctcaacttgaatcaccttgaattcctactgaattctagaaaattaaaggctgcttgggttaatttctatggttgtgtgggagccgagcaagagagagagagagagagaaaaatggatgaatttttctagctttttcttgagttttcttaatttggatctaattgataatttccaaaaatataattaatctaagctgaaacttagtgtggccatctgtccaaagaaaaactagccacctaatccccttagtaaaattaccaaaatatccttctaacttatacttaagccattttaagcttacgggtaaaattttccaaaaccataaccccgcttaaactcgatgttctatttatctctaatattaaatccgctaagaaaaaggttctagagttacgcatgtgacttaaacgaccatccatcgcatttttcgtggtcgccgagcaaaaatcataaaaattacataattcatatttaacgtaaataatact

SEQ ID NO: 85922 - DNA, 723 bp, Cannabis sativa
aacgagctgcacagagctgcacaattaagtacaattaagttaaaattaaaaattacgttaaaaattacgttaacacgcctaaactagtagggtgttacaaagcgtcatcttgttccttttaaagtatttcacctagggtttaggatttaaattaaatggattgaaaaagataaaacaatggctaaaattttatttagtggccagccatacatagtgggcctcccaagttataattttgccattttatttcatagttcattttttctttcactaatgtcatattttcgaattcaaaccttcaccacaaacccttatttgttatttcttctactattaccaccactccgctaatcataaatctgaacaaaactcaaactccaaatcaaaatcaaactaatcctccatacaaattattaattaaatcaaacgaaaaaatagttttatttttctaattagagatgattataaatcttttttgccagaaaaaaaagagctccatgttacctatcttaagattactccgggtcaaatgcgttaattttagagttcttaagtgatgaactatcaaaggaaaacatcttactggacataggtagtacccatcaatcaatttaagtacttttcaattgtgtagtcctatacttacacaacattgaaatcatcatatttgatttttctttaagtgatgtaggattgtatatcttaccctgtcatttctcttag

SEQ ID NO: 85923 - DNA, 950 bp, Cannabis sativa
ttttatagcttcttataatgataaagcagctgaatttttagataaaggtccacgaaatgcatcatatacatcaccaacaatgcaaaaacaaattttgcacgttttggcatataaagtgaggaacgcaattcgtgaagaaattggcgatgcaaaattttgtataatagttgatgaggcacaagatgaatctaaaaaggagtaaatgtcaattgttttgagttttgtttacaatgatgttatgtgcaagagcattttttttggactttttcatgtcaaagatactactactttaacattgaaacaaggtatactttctatcctcactaatcatactcttgatgttcaatctatcagagaacaaggttatgatggtgcaagtaatatgcgtggacaatggaatggtttacaagctttaatttcaagcgaatgtcctaatgcttattatattcattgttttgcataccgtttgcaactagcattagttgctgcatctatggaagttattcttgtccataaatttttaacaagttgaacttcattgttaatattattggtgcatcatgtaagcgtaatggccaattaaaagctgctcaagtagcaaatattgcccatttacttgagattaatgagcttgagtgcggaacatgactcaatcaaattagtgctttgcaaagggcaggtgacactcgttggagctctcacttgaaatatatttctagcttgataaaaatatttactgcaacatgtgaagttttattgaatattattgaagatgacactacacattcttaacgaggagatgccgatgcagcttatgaggccgtaacttcttatgaatttgttttcattatgcatcttatgaaaaaaattctatagatttctaatatgctttgtcaagctttgcaacttcaatctcaagatattttaaatgcaatggatcttgtttcatc

SEQ ID NO: 85924 - DNA, 710 bp, Cannabis sativa
atctaatggatgcccgttggatgcatcaattggtttttattggattagattgaatccatccaattttttaagtcaacattttgactgaatttcatttaaaaaataaatatatatatataatataattcaaaatttaattctcataataataaaacacaaatatataaaattaataaatatattttaaaaacatataaataaattaatatataaaattaataaatatctatttatttactaggcggcaactacgtgcaagacacgttgtatcatctatttagtataatttttattataattttgactaaatctttcgttgtatatttttattttttgagctcttttgttacatccaaaatatgatatatagtaaaatgattgtgataaatttgtcataacaatctttctttgtatctagaattttgtaatctaaattagattatacataatagttataaataatttttagataaaattaatttacgtaaagtaataaaattgaatttacggatttgaaaaaaatttaaaatacaaatatttacatatgttggttataatattgtcattaaatattgaaaatttccgatctttacaattttttttaactctaactaatgaagaaaatgtaaatggatatgtacaactttttgtaattatattttttttaatttattcttatgtgttcagagaaatattaaaataatatattg

SEQ ID NO: 85925 - DNA, 835 bp, Cannabis sativa
agtcagattcatttattgttttgaagatatatcttgtatggtatattatagagtttcatactaggcttagagtttagagttataattcaggccattaagaaaattttgtgacaaatttagctacagtttctatggctaagaactataagagtactagtcgaagctagaatatcgacataaaatatttagccataaagaagtgtgataagtggtcatgaagcatgcaatactaaattaggtgatcacaatatccttgactaaaggcatgccacaacacaaattcaagagttgtaaagtaaatataggattcagttacccctatccaatttttggttgtacaactaaaattattcaatgaaattctaattttgatatttttcatatttatgtgcaccttaatttcatctgagaaaattattgtacgaggtctagaataaacataaggtttagggtttgttagcttaagtacattgctacattaagtacgatgttatctaataaatatatcgtaatacatggaagataatactcaacttataatgaggacatatcgctatgattcatatgtttattatgtaatgagaaatgttggatttaagagataaatctaaatgctgaccaagtgagagaatattacaatattttctattttaagaataaaatcaatgaattaattttaaggtaaatgaatattttataatcattgaatttgatcacaattaatcggttgatattctatatatggtcacattacaatttactaaatatttaatttttggatttaatttatagaattaattatcaaaatattctaaaaactaattgtagcaaagac

SEQ ID NO: 85926 - DNA, 737 bp, Cannabis sativa
  modified_base (53)..(56): a, c, t, g, unknown or other
ctcccaatacaactaacaattaatgtatacacaagtgagacaataaaatatgnnnnattaatttgataaataatattataaatcatttaataataatattaaaaattgcattcactattatataatattatttaggttaaatgagataataaaagtaaattaccatagaagaaaaattaccaatcttaagatttacatctttctatttccaaaaattaaaagaaagaaaaagaataataaatttataactttctaattttatttatttggttaatgtaaataaatttatactaacatttattcatagtataataatataataattaagtttcaaaataaattatttttcttccaatatgaatggttcaagtatggagaatcttttttcttcatatatgcttctgtcaatctctataagccttacgcatcttatttaacttttggtgatccaatatttctagatttttttattccaacctacatcaatatataaaattgtcaataacaatttaatcaagtatataaaaaaaaatagaatgagtcaagtgtacaaaataaaaaaaaatataaaataattttatcaatataccatctaaaaatacttggtctatatttcaatgttagtataaactatgaaccctacatcaacataaaaatacttacatcaacattctattaatcacaacattgataagtgttgattcttgagtactgtcatgacgaaaaaaaaaaaaaaa

SEQ ID NO: 85927 - DNA, 1244 bp, Cannabis sativa
attataattacaccaaaccaaacacaacataaattcgttattgaaatgttaaaatgtatttttgtgaaatgtaatatcagtattgatacaatttaatattgagtcttaaatattttattttattgaagggagttatctaatagtggttttagacactttagtatcttatagcaatgatgttattgaattcttacggtgttgttggaacaatggaaggtacttgtaataggtaaatttcccactataaattcaataattgcacttctgacttgacaatgaaaattttaccctattggactggccaatgtactgctctgctgcttgtacattatgtactattatcacctatcggcattcaaagttgggccatcacttagtttttctgagttttcacaattatttgtgaaaatgccaattttgtgtaccagactttgtcatctcttaaaccctctttagttattttcaagagtgattgtctactttttttactattaaaaagtaagaaaaattaatgtttgaaaagtgaaactcaactcagtgccaaaaacttatagtgaaaatagtggggccacactggaagaatcaagaaagaagccaaaccacttggggcacttttgggcttttggggaagagcatgaaattaaaagactcatttgaatgaaaaaattgaatgaaaaattgtgatgattgaaatgtgtgaatcagctttcaattttaatgcaccatgtgtctaattctgtccaaggataaataatttagaggtattatatctggtactaatattaaacatgcctatttagtacgatgaattcaaagtaatttgattatttagaatagtaaaataaaaaatatttagttaaattattgttaattgaattatattatttaattgaacacgataaattattgtgaaaatttttataagttattaaatatattaaatccattgtattaagacaaaaagtaatgtttagaaccataattgtaaatacgtgcgtattgggtcaatctggcccatattttaaaatagagtgcaataatatgggttgtgtcgtgcagactcataaaagaaatatagtttgtgtcgtgccaactttttaaagggtgggcatggcatgacttgtgtttcataaatagatcagtttttttttctatacgggtttgaatttagactctactttttgagatgagttaagaaatatttttttttttttgtatctattaatcaaaaatatctttatatt

SEQ ID NO: 85928 - DNA, 713 bp, Cannabis sativa
ggtagaggaacttttggtttgtgtttccttcaacctggaatcgagttccctcttgccccaactcttgtgtaatggcgtcatcagtgaggatctccttatttagttcgattcttctttcatcttgatcctctctcagtgtaggaaggctaaatgagttgtttatagcttccacagtgactgacacattcactccccgaacatagactgtgttgttgtcccctctgtatgggtaatttgcaacaaaatcacacactatattctgattagcatcccccacatgctctgcaacacataatctctgccattgcctttatgcaatctctcctctgatgagttcatacccctggtcccgctcaaaaggtgcatcttgaaattcaaaacccctatctcgaattacactccagtttatcaatttctcatatcgtttcgcagcttggtgattcacaaacctagtgaattgttgagaatgatcttcttgaagattaggagtatgtgatgatgaaacttgcatgttgcggttggctcgggttttggttcttttagttgccataccaatcaactagcaaaaaatctaatttttggtgtaaaaaaaattcggcagcacctcccctatattttcctctttccccaaactaattttcacagcagaaacttactcccaataatttctaccaatagaaataacaaatatcctgtaacaccctaactagcat

SEQ ID NO: 85929 - DNA, 988 bp, Cannabis sativa
  modified_base (328)..(330): a, c, t, g, unknown or other
acaaatagtgaccatataagaataaactcatcattaaacacttgactaagtatagttaaattttcaatagaaatacagtaatggatttctcagctcaattgagaccgaggtaaacttttcattaaatagcaaattccaatacattaggagtcaatataatggtgccaaatggcatacataaaaaaaaggcaaacccgaaaggagagagaatattctctcaacaatgattgcacaataacaactttgccaactgtaggtgtagactctactgctctaaggtgcactagaaaaagagtgtttactcatcacacacacacacacacacacnnncacacacacacacacacattcactcatagtttctaacaccacccctcaaacgaaggggtgatttgtttatcttgggtttgtcaatgagaaaccaaaaatgagtgtgtgagaatttttgttaagtagtctataacttggtctgaagagggtatgtaatggatgttaagttctttcttcattactttgtcacgaacaaagtgaatgtcaatctcgatgtgcttggttatggcgtgatagacaagattggaagctagtgcactagcactctgtttatcataccaagtgacaggaacacttagtaacttgaatttcaactctgtaagtagtgattgaacccaagttatctcagcagaatcatgtgtcaaagctctatattctgattccgtacttgacctagagacaattgcttgctttttagatgaccaagcaatcaaggtgtctccagggtacacacaataaccaacaacatatcttctgtcatcaaggcaacatgcccaatatgcatcaaaatacccttcaagtgatagtctttcattgtgtccaatgtgtagccactacaagaaatgtcacttttgccagcacaaagttggtattgcgctggtaaaatataatttatttgtgatgtgttggcaaaagggggttggcaaatcaatgttgg

SEQ ID NO: 85930 - DNA, 1006 bp, Cannabis sativa
  modified_base (830)..(839): a, c, t, g, unknown or other
attaccggcggtctagttacttattaccggcggatgcttccgccggtaataatgaaatttgttgtagtgacaatcaaaactcaaagttcagagggtaaaattcaaattagcctttattttttatatattaaaaatgtttatttttaaatgggttcataataataaactcatccctcccgaattggttgaattggtggtaacttgggtttatgatttcttggttgcgtgtcaaaggaaagtcgttgttgtttctaatgagtaggagtcgagtgccattgtgtcccagcttccttctatatcatctcagttggactccaccctcgtttggtttcgtaaaaaccaatgcttatgcccttttggatttgtctaatgggtgttgtgggttgggcatgattgtcaagaataatcaaggagaggtgttggctttagcttcttggttcttggatggagatttctcacctgaaaccattgaagctttggctcttagaagtgcgggtgctcaatgttgtttatttggttataatggtgttatttttgagtttgattgtcttaatttggtatccaaatttaacaatcatatgttgttgaagtcttctttaggacttgttttgaataaattttagtttgtccttttataattttagtgtagcgagtctagtcactacaagaaatgtcactttttccagaatatttttgtgctggtaaaagttggtattgcgctggtaaaatagaatttacttgtgatgtgttggtaaaagggggttggcaaatcaatgttggtattagaactggtaaaagtacttgggtaaaatgaaaagcgctggcaaaannnnnnnnnnccagcgcgtaaatgtactggtaaaagttagattttagccactacaaatgtacgctagtaaaactttgacctctttgccagccggtctcctctttccttaatcttcctattcgtacagaataaagaattttctaatagtcaactaatctatcaaattttccacaaatt

SEQ ID NO: 85931 - DNA, 718 bp, Cannabis sativa
ccgggtgagatgagtgaataaatccatcgatttcagcagggagccagggatcatttaggatgctaactgaagagccagtccctataaaatatctgcagccagcacgaaggaggttttttgtttcaaataagctacgccagatgaaactcgggtttcctcctagttcagagttaaagaatgaggttgttgggaaatatctagctttgaagatacgcccaacaaggctgttatgattaaccaggagacgccaaccttgtttgcctagaagagcaagattaaagtcacgcaaatctctaaatcccatgccacctttagatttggttttgctgagatttttccaactttttcaatggattccttttgagttttcacttttagattgccaccagaaacggttcataagtgattccatttgtttgcacgtatctttggagaggaggaaaacattcatggcatagctagggagggattgaaccacggatttgatcatgacttctttgccggcacgagataagaactttccatcccaactttgaatccttttttgcattttgtctttgagaaagccaagaacagcgtttttatttctgccaagagtactagggagacccaaatacttgctgtcttcagttgcttcacagattcccatagagctacaaataaggtttttagatgattgagtggtgttgctgctgaaaaatgcagaagatttgttgaa

SEQ ID NO: 85932 - DNA, 643 bp, Cannabis sativa
taatacaccacgcaacacacggtataaacagtttattattataaacacttttttcttaattaagcttgtgatcttatcaggatcattttaaaaaatacaaaataataggtctacgtcaaaaaaaataataataaatccaataaataattttcacaaaatacaaagtttaaagaagtattaaccctccattatttacaaaacataaacctagagacaattatctaataaaaataattgtgtcaagaaaatcataatcttttataaatttgtcttcattttaaaactataacacaatctaaatctaaatctaagtcttagaaaaaatatttgcttgaaggtacacttagtttaagatttatgaattgtgtttaaatgcaccacatgcaaatttgactaactcactaatgttgcatgaatgatgaacataaactaatagaatgttttgttttggaaaatgagacaaaatacaagagttttcggtattcaaaagcataacccttaacatacataaatactcttttaaggctaatttttgttacattacaatttaaataaatggaaatctgattttttatacttaaaaaaccttaatatttttattcttaaaccaatacatttcaaactaaaaaatatatgacacttt

SEQ ID NO: 85933 - DNA, 2647 bp, Cannabis sativa
cctaaatatataatattttagtataaattaaactttaacatagtattatataaaactatgtatataatccaatttaatataatacaatacaatacgatctaatacaagtttccaaacaagccctaaaatattttgcctgttaatatcatttttttatgtatgttggcaaattatataagtagctcaatcaatttgaaatcatgtaaagatatgacaagtacaaaaattgtaaaattcaacttagtaaaaatgaggcttgcattttatagactaattagaacattttagaatattacaaaaaatacagagaaaataattgtacacaaaatcatagagaatggaatatcctaacaaacttctgacatcatcaatttgttaggatttcgaaccacaacctaacggtacaaagtgacaacaaggcaattgtataggaaattgtattagtgcaaataatcagtaattagaacattatcacatttcctaatactcctcaaactaagaggagttttgtaacaccttaacaattaggcacgctaaactatctgatattgaaaccctaaacctgctaatccaggattactagaaagattagtgcgggaaatttaaaaaccttatttacatcagaatgaaaatacaacttgtaataattttttactttacaaataaaccaaaagttacatattttgagatcccataaatatttttacaaaatattacaagtttaagtcacgtgccgacctaagcggcaaaatcagagattacaaaatacatcactggtagaccctaacccgattattcttgtgatgcctgaacatgtataagcaccgccaagctctcgcactcatggctaatcacagactgatttaccatttcctacgcagtagagcacccatgagccaaacccagcaagacaatacagatatcaataatcacaaataacatatcacatatataataaagccattccacttattgtctatttgatatagacctgcgtgttacgctcacacgcctatttatatctatgtggcattgacccacatgttacgcccacatatctaaaaataatacggccttagaacagttcatctcgattctaattaccgagtctaactaaattatgcctcgaacacataattatttaagtcgatatataaagcatgacctaacatttaaacatcaataattactagggtaataaccctaaaccatgtagccgctcactttaggataataaccctagtcccggttcttgataattcacaactataatattcaatatgagcgtcaccacgctttactctacgtgcaactactgtcttacctgttggcccaagtacatgaagattccaaatcctcgggtgctcccgaccaagtcccgataatcctagtcacaatttttgggattcacaaatagggttaatccctaaatctattttcacaaaattataaaattggcattcaaatctagataaacatatagagcttggaatgagctttccaactatactcggaacacccaaatcggagtctggatcacaaagttatgaataatcaaataacgcgttcaaaattgccaagaaacgaggggcaggctacggcactcccaatatggggccgcgacacctaggttgaaaacctaggatttaacagaggcggggcgcagttcctcgtgagtggggtcacgacgcctgagttccaaaccccgaaaaccccaaaaacagccacacgaattcatgtcaattcatagcaaaaacaccctaaacatgcatacacatcaaaaccaacttccataaattaaagctacaacatcagaggataaaaacactaattaaagctttaattctcaaccaaaattgcatctcaagatcataacaccaataatcaatataagctccaaacattgagctaaaaatcaacataatctcacactcaaaagcttgcacaacaaagtcatttttacaacccaatattcagcacttaaagaccataattttcaacctagtaaacactcaaaataaacaatatgcaacacccataacttccaagcttaatcatcaaaggtatcatctaaacatctcaattcatacaaacatgcaacaactcaaataacaatatcaaaaatgcacaaattccatatctaattcagcaacaaaactcttaaaaaaatggtaggaaaactacctcaagttcttcaaaataagcaacacaatcctttaaactccaagctatcaccaaaaatccaatttgaagagaaaatgcaaagtaaagaaaaattgagaaagagagagggaaagaggttcggatagggctgagcaaagaaatcagaaaattctattttttaattttgccaaaaatctcttttgttgataattatctaatgggtcaaagaccaaaatacccctagggtctatatatataacatatgcatgacacaagggtaaaattatcatattataacattatacacttaaacaaaattttaggttattcaatcaataataaaatgctaaaataaaatcccaaaaatgtatttaggccccgaactcagttcggcccaaaatacccgattgtgactataacgcgccgacttgtcagaaaatacctaaagaaggacaaaacaagtataatatataataatatagtc

SEQ ID NO: 85934 - DNA, 914 bp, Cannabis sativa
aaaaaaaaaatgaaccaattataaattatgcattttgtatttggtagtaagtttgcatgtattgtcaatgactcttttaagtattactccaaagaattttcttaaaagattctattgtactattaagaggtcttttgtctaattcatgttaattttgtcaatgtactaatatgttaccaaactatgagagaaatttatcaaactaaccatttgaaatattaaaatttataaaataacttcacttaatttactctatgagattatgatggtcgcactttgtaaattcatggtcattttgcaacataatagtcgtttatagtcgcacaatgtaactcacggttgattttgcaatcattaatgattattttgcaaataaaagtttttataaagttattttattaataatttttttttatataaaaatgtattaaattgtgctttctaaactttgaaatactaaaatactaaaatttgctaaatagtttcacttaattaaccatcatgatgatcacacagtataaatttatgcttgttttgcaattataataattatttatggtggcacaacacaatttaacaattataaaaaattattttgctaataaattcttttataaaaactatttttacaaaccactcctcaacttttattgtttttttttatttttttttattttagcgtttatatattacaaccatattttaagtgggactcgaatccaaaacctccaatacatactcacttatagccacttgagctagcctcaagtggttaacttttattgtcaaaattctattaataaaactagacaacttagtttgtgtatttattttatatgtaataaagttcaaaactaaaggtcattttgtatataatattcagaaaaatataaattatttataaatttataata

SEQ ID NO: 85935 - DNA, 1737 bp, Cannabis sativa
caagatagaccttctttgtttgtttttcatctccctggtctcatcaatcagtagttattattcatagctcgtccttatctttaaaagggtgagtttgaatatttctaataagtgtactttttgaggtgagctgtttgaacatatttattgctttgtaactcagtttaatttatttttcagctttacacgtgtcaataccatattgttacttgaaatatgggtataacaattgtgttcactttttaatatagtagtttacttagtttttcattgttgttttgatgtcttgtgagcaaagtagttttcttagtgtgctcattgtgctcgatgattaatcataataagaaaaataaaataaaataatgcattcatataatttcattccttccttgcctcatgctgtgtaattgagtaataatttttagagtgttactggagtgacaaaattgtgatgtacatatctttttgaatcccgtgtgtataattggaccaacataatatatattatgttttttttaattataacctgtttctgagtaattgtgttttgtatatttttattcattttattgtggaaccgattttatctaatttatgtctcagtattgttggattttttttttttttttacttataatcgatttctaacttattgtatgttaattttttagttaatttgttgtaaaaccgattctattttaatttatgtcccaacaagttttttatttagtcatttcaaaaatggttcttgaattatttatttcaaaaatcagtttttgatttagtaaattcaaggaatcagtttttaatttagttatttgggaactgatatttgatttatttaatttaaggaaccaatttgtgatttatttattttatgtaactagtttttacatgtgtaaatttttatcttggttgttttatggaaaatctcatattttaaactagttgataaatataatcggcctctttatcttatattttgagttattgtacgttatttaattttacttaatttgttatggaatcggttctatttagatttatgcctcggtatttgcagaattgattcccataattttttttaattataataaggtttcgaggtattatgtgttattcattcctattcattttgttgttgaactagttctctttttaatttatgtttcaatattttaggagctgattttttctttgttaatttattataaccgatttttgagttactgtgtattattttttttactcattttgttgtggaattggttctattttagttataatcggtttgagttatttcgtggtatttttttttcattataacacaattatagaaccgattctattttaattataacttatttgagttattttgtgttatttatttttattattatgttatagaactggtggtattttaattataatcggtttgagttattctgtatcatttgtttttatttattatgttatataatcggttctattttaatttttatctgaaacatctaactctagtaatttttctcatgatgataaaaacttcaatgactttttcagcgccaattactttttcagtgctgatgactttttcggaatcaatgacttcttcggagtgaatgactcttccgacattgatgtctacttcaacgactttttcggtgatagttattattatgagttttaccaacattatttatggtcttttacttaatttctcatattttaattatt

SEQ ID NO: 85936 - DNA, 606 bp, Cannabis sativa
tagtatattagtatcatttatataattccttaagttatgttttgtataataattagtattttgaataataaataatgtgtaatattttaatttgttgctctacttaaaataaattaatagaattcttttgtaaagtattagaatcaatattaatgatgtatttgttaattcttataaaagaataggttaaagaaagtatacttaattctacgaaaatttaaacagcataacgactataattgaacgttttcaaaaaatttaaagctattaataacaacaaaacataattcaaaactatataataaccagtgctcctcacgcattcatgatttatccataacgaaaattaacaaaaaatcctaatagccaaatttaagagaaacttgtatcaaataattttatcatataactactgaaatttcggcaacataaaggatataattgaacattttcaaaaaattgaaagttattagtaacaacaaaaattaatctaaaacaagataaaacaagtgatgatgacttagataatttctaattatcattgcatttcccattaatattttaattcgagttttatgagttaagtgttgtctaggataatagaat

SEQ ID NO: 85937 - DNA, 792 bp, Cannabis sativa
cgctcttccgatctgtgagtagatctaagatcctggtaaaataatttcaaacactttgagccggccttaatcggtactgaaattcacatggaagcattggtggaggcggagacaagcaagcatgggagggtgaataccctgggggctgaggggtcgattcttggagttcccacggtggccgagggggttaccggcgaggaaaagtcgatagctccagctcaggggcaaattagtcctcatggaaaaaatctatacgtgcatgcaagggaaggacaaaaggacgtggtggtgggcgaatgcgttgtccctaatagtaaggacggtggtccctccaatttttcaaattctgggaaaaaagggaaggcaattgctgacgtggatgagagtaaggtgtcccatttagccatggtttttaatgctgtgctggatcctggagccaagtcggcccacaaagcttcaaggcccaatcgcaagggaagtggtatttttattaaatccactgaagatgggagtaaaaaggccttcggtgttggagcatctgggcctggcaagaaaaggaaattagaaggccctcctgacccaaaattggagctattaacagagccaatttgtgttcgagaaactaatgggggcgttaagaaactctgcgctgaatctactgataatctaaactctatcaacattgatgtctctagctgtgacccccttaaggaattaccttcaattactgctacaagccctgggaagagtaccaagttgggagatgaggatttttctatggccgaggaggcg

SEQ ID NO: 85938 - DNA, 784 bp, Cannabis sativa
aaattatttcgtcacattaagtatctatatatatatatctataaaggagaagtatgaggcggtgacatggcactctcaaatcactctaaatagttttttataatttctccttaactctctcattttataattttaaattgtattttattattttttctaatattttattaaaaaaatttaaactaaacgtattttattttcattaataagaaaatctattttcaaatttcttttaaatctacacatatatatatagcttattaatttttaaattctcatattagtctcatattataataattcaacttattattacttaaaaatcacatattattttcttttcaactcaagtgcatataactcaaatactatattattattttaggatttcgaatattaacccataagccatagaggcgatatgcatgaaaaggctttttcttgacacactgagagctagccatggatatatttatcatttatattcatttagtattcataatttaggatacattaaatatatactatggcatttttttattatgtgtttcaggtttgattattttagagttatatttctcattattttcttatactatgacattttttctattatatgtcttttagctttgactgctttggatatatatttctgtatatatattttttttatattgtttagtgttgtgtgttatgtatattttttctgtggggtgctcctgcaagaattcacatggccatcgtattgtttagagttgtctgttatgtatacatatttaatatc

SEQ ID NO: 85939 - DNA, 1153 bp, Cannabis sativa
taattacacagtgtaattacattctacacagtgtaattacattcaattatcatgggaggccatgagaattggaaagtgtaattgaaaccccacaacacagttacagtgtaattatatggtcaaacaaacatgacaaattatgtaattacctcaaattacacacaagtcttgaattaattttccaaacgcaacctaagttttgtttgaaaactatttcaatttgagagcaaaaattgagtaagacattgtaattttatttattttcaatctcaaaccctaacaaagtaacaatcgtcgatcggagctaacagtctttaactaagacgtcgacaatgccggcgaacgacgacgtttgcttcaccactactccttctatcaaggttcctttaccttcacggccacctcctttcgaccttttccttctcttaaccagaaccagaaactccttctctcaacttgtagactcggttaaaactcacccgggactccaacgactcacccctaagctcctcccttcatcctcgatactatcgccattgcttgatagtcgaaccactgagtcgactaaggggagtggttagctgagttggtggtcgaggccaggtatcgatggacatttgatcagaaaattgcttcctttatgttcagcgtcgttgtcgcttagtcgctctgaacctggaactcggaagggaaaagatggtcattcgattgggaagttgctgcttctctgttcggcctcgttatcaattgctcgtccggacgaagtgtcgcaatccggggcagagggaaaggaaatacaacagcagtagaagcagcactctccgagtcgacacgacgaagagagggtgctgataagtgaagtattggtgaggaataaggatggctacgagcttgagaggaaagaccttgaaatggaggccttggcagattgcaaggcagtaggtggagttaggacaattaaatgattttggaaatgccatggttccaactataggattttctttagatcaccaaggcaaccaaaagtgattaaaaagagactagaaaggtggtctgtaatggtgacgggaaattggcctttccaaataccactcattttgattcgaaaagttttccgattaatgtcacaagaagagataactctagcatagag

SEQ ID NO: 85940 - DNA, 508 bp, Cannabis sativa
attattaagtgattaaaaaggaaaaagaaaaaccttttctagccaaactggttatatctaataagatttatctaataagatttatctgtccacactcacccgatcaaaaaataaggtagtgattaacacaaatacacccagaaaaaagaaaaaatcttccattagaacatctcatcgtgctaattcttttatttacactccaaagaaaagaaattgcttataaccaagcacagtagagtgagtataagtggcagtgggagagtgagagaggggagttcaccgaagacgaagtagccgacagagattatcagttgcaccggcatcaattcctgcagcttcgacattgcagctgagtgggcttaagtgaaaacctcggtagaggaaggctgctcggcggtggagctaggcgaaacacagaaccagaaaacgtgtctagatcttccacaagattaacaacagaacaaacactactactactactactgctactctttttagtggtttatta

SEQ ID NO: 85941 - DNA, 927 bp, Cannabis sativa
  modified_base (543)..(546): a, c, t, g, unknown or other
  modified_base (691)..(696): a, c, t, g, unknown or other
  modified_base (881)..(881): a, c, t, g, unknown or other
ggcggaatccgccggtattaattaatgccggcggtctcctctattattaccggcgggtggctccgccggtaataccaatatttgttgtagtgtttatcggaatgtttttatacattgatcattttaaattttttgtacttttattatttttactataaaatttaattatgctcaccctaaaattaaattatgggttcgctgaataagacaaagacaatattaaatttcatctaaattttataattagagatagatcaatagatatagatagataagaccatgagtcttatatttgataagaccacggtggaaattttataacaaatatatagcttaaaaaatagtttaatgttatatttgattcaagttttaaaattttgcttcaggcacaatatgcaaattaactttcaaagctaacataattattaaatttttattggaattatatgttgaaaaatactttaaatgaataaataaaatgttaaaaaaattttaattaataaaaattaggagaattactctatatattatttttttaatttnnnnttttttttcaaatttactgtttgggtttctaaagtggtttcttaggtggttttctatgtataattttttgttgcgatttagattacagcgctagttgcaataggattttctatataaaactctgtaaaaatacaaaaaaaaaaannnnnnattattttaaaatgtaaaaataagaaagcctcaaaaattattaattagtcgcaaatcaataaataataaatgtacatctaaaaaaaaaaaataataaatgtaacatttattatagtgcaattttaacctatattatattttaggctaattaggatttttgtccctgaactttgacatgtactaantcatgccccctgaacttttaatgctattgaaaatgccccctgaact

SEQ ID NO: 85942 - DNA, 531 bp, Cannabis sativa
atacgtacattttgggaacatggaatgacataattattatggtgtttatttatgcggatgacataattgtcacagggaatgattcgaagatattacaggaattcaccactcaactaaacaacatattctccctcaaagaccttggaccactaactattttcttggcatagaggtacacagagacaaaacagacctttatcttagtcaagccaagtaattaaacatttgttcataagaataaaaatgttacatctcaaaccatgttctacacccatagttgttggcaaagccatcgccaaaacggatggtgacttactgtagcaacctacagtctatcaaagtgctatcaggggctgcaatatttagttcacacttgaccagatctttcattcgttgttaacaaactcagtcaatacttgcatgcccccacaacaacacattagtcagtagcaaagcggatactaagctacataaaggggacaattcactatgggttccatatcaagtactccaatgaacttaatattaccg

SEQ ID NO: 85943 - DNA, 577 bp, Cannabis sativa
cgtagctgtagttgtaaaaaaaaattcaattacaagatttatatataattttttataaataataaaaattcaaaattttaaaatatttttcattttaaaaaattaaatttatttttttaacttaaaattaaagttttaaatgtataattttacataattatattcttattaattattttttattttatttaattttaaaaaaaaaatcgtatcaaacgtgtcaagctcgtgttaagtgactcgtatcgtgtttgacctgtttttatttcgtatcaagtcatgttgatctattttcaactcgcgtctaattttttcgagtctctcataaaatttgtgttgtgttcgtgtgatgtgttgaaacatgttttgtcattacccctatatctaatccaattcaattaaatcaaatcaatctaatttaatttaattacaaaaaattatatatttaattacaattaaattggattggatgttaaaagttattttaattattttaaattaattattggatattattctcaaaacttaactaaaaattaatataatctaattatatttacatattaaaaaattattt

SEQ ID NO: 85944 - DNA, 512 bp, Cannabis sativa
tcatttaacaaaacagagggtctaattggtaacttttgtaaaacacagggtataaaatggtatttacccaaattttaaaataaatcaataaataactgttaagggtaagttatcttatattattttgagatttttacaaaaatactgaattttgggtaaaagtttacaagtttaccacacagagttttttacaaaaatactgtcttttataaagtaatcgtaaaacaacaaaatagaacaattaatataacagtggaataactaaaaacaaccgtggaacaacagtgaaaatttaacacagtacccaatataaaatttactcattatttttgaaaagaaattcaccccactgtaaataagtaaaaaaattaaaaaaattcagtatttgatgtaagaactcctattattttttcctatttttttttttttataacttccactatttgtaaaaaaaaatttacacaatacataatttttttattttcattttacgagttctgtttttttttttt

SEQ ID NO: 85945 - DNA, 538 bp, Cannabis sativa
ttattattattatttttcatgagcataactagttattttgttttttttttaatctgagaaggaagaaatctgttgtgttgctgtaaggaaattaaaatattaaatgaagttactttgtttgaggccacgtgtcatccaattaggggatttgaattaattattattattattacctataatatcataataaatatggagagcaggggttggtacacctcgaacttctttttatagaattaattaattttgtagtgaaattctcattgtgattaattaataatttttttcttccttacggtctaaagtgggattatattgggtttctctttgaaaatcacctatgtttgccaaagaatattcttaactcttttgaagagtcaaattattttaatatgatttattttgtgtcacatatgaatgaaatatattaaaattgtgactttaatttaacaaaacagattcacggaggaacattgaaagcttctgatgatttcccactagacggatatttgattgatttgtcatcatcatcatcatc

SEQ ID NO: 85946 - DNA, 769 bp, Cannabis sativa
  modified_base (265)..(269): a, c, t, g, unknown or other
  modified_base (689)..(709): a, c, t, g, unknown or other
tttttcatattttttgaattattttattcacatttaataggacctccttcacctgtaaaatgagagcttctgtagtttattttttacattcaaaaaagtagctataagatcagagtgtcttctctctaatttctctttctagaaattagagcatctagacttagccatttttcaataatccatctcgtgagaataaaaactagaagtagacgtagctccattactgtcacgatacagggagtgaactattataaattattgtgtnnnnntatttatacttaacatatatctcattctcgttaatccagggaattggtgtagcttagaagtctctgtccaaatttttgagtcaatatacataataaacaaagattgacatgataatgaataaattaaacatatatctattaaaaataccattaaacttgcccaataaacaaagattgacatgataatgaataaattaaacatatatctattaaaaataccattaaacttacccaatacaaccaaataactacactaacaaaaatgaaaacaatcaataataaaaactagttacatatgaataaaaaattataagtcaaaaagttacatattaatctgaaaccagttactaaactatatagaaaccaattacgaatccacaatccaaacttagaataaatttaagtaaaataataataatnnnnnnnnnnnnnnnnnnnnnaataataataataattaaaaacataaaaaaaattcacaatacactcatcttaaaatatac

SEQ ID NO: 85947 - DNA, 1424 bp, Cannabis sativa
caacgaacatctgaaattaaatctgaaaaactaaataaatctgcagatgtggttgagagagcgattgagactcttagagcatcagttacaacattagtaattggaatttggagttggttagcccagttgatgctgtggaaaagagctttcgcttctaaaacacccctatatcggtttagaaaaggcagtgatgacttgtcccaaataattttttatattattattatgtgatatttaaagtgcttaatattatactaatgtagtactcatttctaaattatttattaaattaaaatttatgagagttgatattgaaatgcatcattaataacggtatgctactttatggtgcttgacaccttaatgcgacccttaatattttcgttattaatatgtacatatctttattaacttcgtttagaattttaaattttttccttaaggtgctcaatagtatatcgatgtggtacttaataattaattaataattttccaaatcatttatcaaatttaaatttgtgggaactgatattaaaatacacaaataacagcatgctaccttttgcggtgattgacatcttaatgtgccccttaacatttttgttattaatatgtacttttttttattaacttcgattaaaatttaaattttttttaaggtactcaatactatatcgatgtggtacccaatagttgattagaaattttttaaattatttattaaattaaaatttatgagacctgatattaaaatgcaccaataaaagtatgttactttttgtggtacttaacatcttaatatgtcccttaacattttcgttattaatatgtacatatctttattaacttcaaatatattttttttaattatacataagtttataagaacatctccaatgaaatatgtaaaaattatactatatttggtaaaaaaaaagacttcgttatatatttgcatcaattttttaatattatgctccaatgcacaattacaaaacttgatgcaaaatttaatatttttattacaattataaaaataataacttgatgcaaaattgaatatatttaatcttttcaatgaattttatttactttttttttttcttcttatttatttatttattagtaaatatataataatgtaaaagactatacaagcatgtgtatatatgatattaatcttttttgtattgttaatcttctttttttcataaatttttgttagttattattttattttatttctaaactttatttattagtagataatagcagagaaattagtttagcttacatttagtaaggtataaaaaaaaaagaaaaaaaattcaaaaccaataatttgagaagggttttgaacttacgtataatttgaaacttggttgtgttgattgggaaaagaccagaggtccaaaagaagtcat

SEQ ID NO: 85948 - DNA, 1056 bp, Cannabis sativa
ctccttccttataaaaggactgcttttctagttcatttatcacattcttgtaagcccctataaggtcagagcatctctttctactttttctctctagaagtctgagctcttttcttagtcaattctcttataattctcgtgagaaataaaaaaaaactcgaagtagacgtatttttattaccatcgcgacatggggagtgaacgactataaattctctgtgtctctgtttaatatttagctaactcgttttttatttcatcaatctagcaagctagtgttggccatttttaagcatcaacaaacttaaatccaacccaatccaatttgcaaaagtgtggatgggtcggttattttagatttcgtaccttttaatattgaattatttaatatttattaaaaaaatatattatcttctcacttaactaacaacaaaataaaacaaactattgttgtttaatgtctccaacaacagattaaaataaataaaataaaaataatatattcgaaggaagatgaaaaaaagttatatgtataaaagaaatgtttatttttgttttagattatattttctatataaataagaatgaaatatacatttgagctactatgttttgaaatttatttgtatcatatgtatacatacatataaatatgtgtggatttaattagattgattatatttatatgtcaaattaatatccagtttgtacaagtttaaattttaaattttttaatccaatccgtacaagtgcagatattcgcactttgagaatttgattgaatattttatgaactgcttagtatagtacgtattttattatgtaaaagaaatgaaaatataagtgtcattctataaatacaattgttaacataatacttattgtaattaaagaacctacaaataaatcacgataatttatattagaaacattagaaacagtataaaataatcagtcgttattttattttatcttggcaatcatattagtcgtctatttttaaagagtaatttgcggcataatctccataagtgcttagtttattgcaactaactc

SEQ ID NO: 85949 - DNA, 967 bp, Cannabis sativa
ttaaattgtttttgaaagctcagccactcaaaaattgatctcataactacttggacagagaagtaacaatcaaaaaataagtgagaatgactcatcatttcccatgccacaaaccgtattgggatatagaaccgaagaatcaaatctctaggtgagaattaacagcctgccacatcataaacttatgcttcggaatgcttaccctaataccaaattgcctacttgtatttcacttgaacttgttgctgataccaaattaattgtatcaaaaaatactcttcaagtcaataccaaactctaataagagtactcttagttgatctatttgtatactagtagtacatatttataatagttacacaatactaacatttttctgttaagctcctatacttttttatgtaatagttgctgcgcaaactgttataccataaattgttaatgatcgatgaaattgaatttaagttcatgttcaaacaagttgcacctcaaagtgagctggagattctcagtttgggattctattttggtttctatttctagcttgctcaaaatatttaatgtaactatacatattatgatttttagtacaattacaaaaaggagttttatattatcaatatttgaattaacataaatattgttgttctttttgttgagataattattgttattgttatgattgtttataaattattttaatttatagttgcataacaatataaatctttaccgtgtcaataaattcttattcatcgtgacagtaccagtatattttgtgagtgttcaaaataaaatgttttatataagatgaatagtttaattttttcattgccaattaatattgagagattttttttttctttgataaatttgagagataatttttaaaagatttcaattaattaattagtttttctaataatttttatttattattttattttaaaaaataatttaattattt

SEQ ID NO: 85950 - DNA, 686 bp, Cannabis sativa
atatttctcatagtgggactttaaaagatttaaaattctgtattgcatgtcaaaaagggaaaagtcataaactttcttaccctctatctactagccatgcttcccaacctcttgcattaattcataccgatttgtgggggccgtcccatgttgaatctaaagaaggttttaaatactatattcattttatcgatgatcacactagatatacttggatatatcctttaactctcaaatctcaagcatttgatatttttataaaattcaaaagcatggtcgaaaaacaatttaatttgcccattaaaagtgttcaatccgattggggaggggagtataggccttttgctcgatttcttagtgatcaagggattcatttccaacatccttgtccacatgatcatgaacaaaatggaagggctgaacgaaaacatcgccacataactgaaactggtttggttcttcttgctcaagctggtttgcccttgtcctattggtggtatgcctttcaatgtgctgtttttacaatcaatcggcttcctacagttgttcttgggtttaaaactccttatgaaagcttgtttgggactcaaccggattacaagattctaaagccttttggttgtgcgtgttttcctcacttgaggccttacaacaaccataaaatggaatatagatctgatcaatgc

SEQ ID NO: 85951 - DNA, 1819 bp, Cannabis sativa
tatactagttcaagtctgatagattgatgtgatttataactctactctagttctggaacaccaccaaatcttttttattaattgagcaagaatatgtacaatacatctgagattgattctctgatgagttctccaaaagtgtttcaactttcacactcttacctatgaatatctaatcaatagaagattcttcttacaaaactcaaactcaatctttctcatttctctagtacatctctctctatctctcaatcttttctctctctaactctcaactcaatttgatcgttctatgaaaatgataagtgttggtggtatttataggcttaggattaaaatcttgaagtcagtggctacaagaagctaggttgttaagtttgttaggcaataactaacttaaccagctctcctttgaaagaggtctccacgtcaacctaattaagagtgcatctgggagtgagtatgagggctttcagagtcacggtccaaggcactcactgaaggaccttcccggataagaaatagccagctagagtcgactatttgagagtgccttccaggaggaatagctagccatctgaaactccttccggaggaggattagctttcctaaagacccttcccataagtaaaagaaagccttcaaggacctggattcgcgagtcaactactttccaagaaactcttggagaccttttcatttggaggaacgataccacaaattccacctagttacttcaaattaaaagtgtgacgaggataaagaaagaatgcagccatcatgcttggtgttctaggaatctcagcatactaacttccagattggtcaagcaatgcttgaacttgtttactgttgagactttaatcccaacatcatcaggattatcttctattctgaccttctctaaattaaccaaccacttttctatcttctctcttttccaaaagagtgttatatctatatgttttgcttttttcatgataaactgggttcttacaaagatagatggatgactggctattcgaatacacagtcactcctcctttgatttgtttcaattcataaagaattccacaaagccataaggcttccttgaatgcttttgtagttgccatgaattctgcttccgtgatggaaaaagcaagcacagactgtaattgggccttccaacttatacagttctagtttgtcaagaaaatgtaggaagtgtttgattttttggtatctctgttcgaggcatagtcaacatccacaaacccttttagctccaattctcctttttctttcttttaggtcagaccataatcccaaatgcccttcaagtatattaataaccatatgagagccttctaatgttcaatacccagaccggacatgaactgacttaggatgcttaaagcgtgagcaatatctggtctagtgtttaccatcacatacatcaaacatcctatgaccatagcataggatacatccttcatttcctctttctcatttgaactgttagggcattgttccttcaaacaaaatgaactgtccccctaacggaacggatgtactctttgcatcttccacgttgaatttctgaataactttctctatgcacctggaatgcttcaatcttatggttccctccttattattccttgaaacctccataccaagtatcttttgaattggtccaagctcttttatctcaaattctcttttaagcttggctttgatagtttttatcacatatttatccttgctcaggatgagaatatcatccacatagagaaataagaacatggatgtagatttcttgaaatacaagcagtg

SEQ ID NO: 85952 - DNA, 655 bp, Cannabis sativa
tcacaaccatttctatcttacaaaaaactgaaaaaccatcatctaagtaaaatatttcaatgaagaaaaacaagcttatttatcacactgtcgtgtatttatgatcaatgaattatctacacaaacttattaccaattgtactctgtacatatatatattataaggttgtcctagttaaactttgtagtaaaccaaattgtgacattaaaacttaaagaaagaaagaaagcataatacaccagtacatgaaaagttgtctctgcaacacatttcgttaaagaagaaaataaagtcgagaaaatagttaaagaagaaattcactaaccagccatcgagttgtagtcattgttgcaagccgattgtagtggcggaagaggaagaagaatttcagaatcattcacgtcatttaaccctaacgtaagccaccacattgacccaatcttggaacggtatcctctcccccttccatgtcgtaccgtatctcaacacccagatttggtttgtcgatctcttcacccacaaatcgcagagaagtaagaagaattaattacaataaaagaggatcaataatggtagagaatggtatttgaattcatgtctttgatttcattcagggattgaaaatagtttatatatgtcaattcatgaatcaag

SEQ ID NO: 85953 - DNA, 666 bp, Cannabis sativa
caggcacttcaaaccctggaggttgtaacatgtacacctcctcttgtagatctccattaaggaaagcattattgacatccaattgtcgaatatgccaaccatttgacaaggctaaagtcaggacaacacgaattgtaaccggtttaactactggactaaaggtctcagtaaagtcaaacccatattcttgatgaaagcccttagccacaagccttgccttgtattttagaacagacccatctggattctccttctttttgtacacccacttacaaccaatagctttccttcctggtgggagtctaacaagagtatatgtcttgtttctaaccagtgcaagaacttcatcactcattgccttgttccacactaactgattaagagcttcctgaagtgatgtaggttctctagtcaccaaaagtgcctttggtttatgaatgccagatttagatcgtgtcctcatgttatgaacattttgaggacctggtgtttgatggcagccactgagaggaggagcagcagtagctatgtcactgctacaaccagatgcagcaacaacagtagtgtccacatcagcagggagaggcacaccagtaggacaatctgatgaaggaggttgttgttcattaggagtgacaacccgtggacaatcagacaaaacaacac

SEQ ID NO: 85954 - DNA, 618 bp, Cannabis sativa
cacacacctctcaagtattggtctgaatgcattatgacagctgcttaccttgtcaatcgtgttccttcttttaacttgaacaataaaacaccttatgaattattgttttaaaaagagccagattacactcatcttaaaacatttgggtgtctagcctttgctactacccttactgcaaacagaactaagtttgctccaagagctaaggcttgtgtttttcttggctatccacaaggtgaaaagggatatagattaaatgatataaacattaaacagatttttctgtctagaaacgtggtgtttcatgaacatattttcccattttcaaaactaaatgaggacactagtaatattgatcccttcattactactatcttacctactgctgatgtttccaatactccagtaaatgattatcctcctactaacactgttgttcctagtgttaatattcctttacaggaagaaaattatggtgcaccagacatagaagtggaacctgctgatatgaccaacacaccagaaattccaaacaacgcaccaacagtggcacctagaagaactagcagaactaccaaaccccctacctatctcagggactttgaatgttactcaata

SEQ ID NO: 85955 - DNA, 521 bp, Cannabis sativa
tcagctatatatacaagttcattttttttagagaaatttatagtgttattgcttcattttgcccaaaagatgattgagtgcctaccaattatgtattgcaagtagttttaggtgatggatattgcattgtcaatgcagtaatggaagttaagttcatatatttaccaaacaaaggaataaaatagagaaaattgaagctatattctttgcataagacacttgaaattaaacagaaaaaacttacataatatgatacaaactcctctttctcaagtaagtctgaccttgcagtttgacagcaagggaagaaagagaattctcaaacctcatatgttattatatctagtcgagaggcatgcaacttgttcattgattattttttcagtcttaggcaagggtttccaagaacattcttttaaatcattacaaataagaaacacgaaagagtataagtaaaatttggccattattaagtcataataatttttccaaatgaaatgaattttattcaactttgtaaa

SEQ ID NO: 85956 - DNA, 835 bp, Cannabis sativa
ggatcccgaacccaaactcggaccaagacttgaaccccgactaggtcctggactcagatcgagacctaggactcgtacttggatggggaacttggacccgggaatggggatgagaactaagagtgagacccacgacctgaccccagacccggaccctgacctaggacccagactgagacctgggacctgaagttgaactagatagggacccgagactgtgacccaaatttggactcggggcttggacctaacccgtagttagtgtttggatttgggacccctaccaaaactcaaacccaaacccggactcgaaccaagaccctgacccagacctaaaccgtaccgcagacctgggtccgagtcctagtctaggtttgagtcaaggaaccggaatcagactaggacccagacccagatctggaccaagacgcggacccgaataaaaactcagatctcgactctggacacaaacctgaactcagacacggacttgggcctagtcccaaaccgaagactcggaccgagattgctaactaagacctacccaggagcccgacaaagattgtcggcccaaactcaaaattagaaccagaatcaagacccaactgggactgtggaatcaatccaagacttgaccaccccggtctcagtcctagacccagactcggacacgaacatagaccatgacctaggatttgaatcgaaatgagatcgggaccaagattgggatatagatcatgactcacgaccaaggcctggaccaaacccgtagtcggtgtctagatcttagaatcgtaccaagacccaaacctagagcaatttctagactaggacc

SEQ ID NO: 85957 - DNA, 596 bp, Cannabis sativa
gttaagacttttatgccttttttaattctaaactactaactactgctaaaactactaactctaatattaaactacttgtatatcctcaactattctaaacatgataaataccttctataattgttatcttttttttctggaatcttttggaaaaaatactaaatcatattttttttaacacgcaactctgataatcacaattcagtagtaaaaataaagacaaacagaaaaataaagtagaaatacataataactactaattagctttactcaaatgggacaaatttaacacattgttgttggccttaaccttattgaagacacaagttcaattatgaattttggattttgaagaacatcctaaagatcaatatctaagttactgacagtacacaacatcacaagaccaatattatccaattctagagatgcaattttatgcttcattgatagaaaataaatcaaagctaacaaattctaaaagtttcaaatcatataagctaatgctctcaaagtccaaaaccaaaaaccgctcttatcttgtgaaatatgagatccctccatcctctttctgtattctccaccacagtcgcatt

SEQ ID NO: 85958 - DNA, 746 bp, Cannabis sativa
aattgtttaatgggaattgcctcaatggttgaattttgattttcatatctgtatttgtttttcaatctcatttcctactgctgttatttgttttgcttttaaactttgatcatttatgagtttttgttcttgatcttggttactgtgatcgggttggatcacatcatttattaaaataatttgcgtagaagctgatattagattgcacgaataatagtacatatatctcttgttgttaccccttaatatgtctgttagcatttctcatataatatatatctctgatgatgggtaagtgaaacaaattacgtacacgaatgtaaaattttaagtaaaaattaaacaaaaaatatggcattcacatgcctaattgttagaaagtataatattgttcatgtgtggaaatataatagaatatataagatgaatgggctactccttccattgccaattgattttaagatagaactccattcatcttatccgagattctaatatggtatcagagcaaaaaaaaaaaaaaaaaatcctctaacgactatccgacttaaaaaaaataataaaaaaaactgattgaagtagagagtcaaaaaaaaaaaaaaaaaaataactacccaacattaaaaaaaattgatccaagaactaaaatcaaaaaagccaacttgtgatttaggatagtgagaaaaaaaaagagccaccaaaaattcaaaaataccgatctcaaaaagtaaagcaaaaaaagttac

SEQ ID NO: 85959 - DNA, 1217 bp, Cannabis sativa
  modified_base (27)..(31): a, c, t, g, unknown or other
taattttgtgttaaaagttttaatctnnnnnaattagtttaaatttccaattcactcccctcttggaaacatatcttgggctaacaccctattccatcgaacttctccaattttaatctcaccattgacaacgttgattttttcttcaagaataatgactgcggaaagaatcttgattctgtgttcttgatcgattaccaagttctaatttgtggaaaaatttcaacagaagtgcagaatcaaatcaactaaaacttaatcaataaataattagctatgacaagattaaaaatccacaaacaataaatagagataaaaataaggatgaacagagtattaaaaccagaaacaattaaagcagcaagacaatgaaaaataacaccaagatatatattggttcaagtcctatagatcgatgtgatctatggctctactccagttctagaacaccaccgaaacttcttcattgattgagcaagaatagggtacaactacagtcgagcttgattctctgttggattctctcacagtgtttatctctcacactcttgcccaagaatcttcttcatctacagaagattatttatacaaaacacaaacccaatttctctcttttctatgtacctctctctctaccctcaatctttctctcttaggatcacctctcgaaactcgactgatctcgttcataccaaaatgataagtgttggtggtatttacaggtccatgatatagatcctaaagtcggtgactgcaagagttaagttgttaagttagttatgacttaacaaactcctcataatagtttctccacatcagcataagataaagtgctttcgaatgagacatatgcttcctggaagaaagatcaaagtgtacgatgaaaggacttcccgaataggaaaggcaacaactgaagttgactatctgaaactcccttccaagaggaacaactagccattcaaaaccggtctttttcagaggaagactagctttcctaaagactccatccaagtggacacgatagacattcggggatgccctttcgaatgacatctatcataccacgagacttcttccgaatagtcaagttagatttctgaaaacacccttccagaagacatctaacttttaaacttttgaaaatctttttatttaaatgaagtataccatatatatgtttaacaaaagacttttgttttcattattgctattca

SEQ ID NO: 85960 - DNA, 963 bp, Cannabis sativa
aataaggcctcatcacatgaatttaaatattattacatatatgcaaatataaactttttacaagatttgtaatttacattaattatttattgcatgagtactacagaaagtgagaaggtggaactaagatctgatggtgggaatgacattaatcatggtgtggataaagctaagatattggacatgatggcatacccataccctctctccaaaataataatggaagataacgaattgggagttcagttctgtggattatgcctaaagcctggggtcacatgtgagaagggatgtctttgtacatggaaattaggttggcttattcctatttgcaagggcctgtgctgctaaatctacaacatatataacataacatcatcgttggttctttttatattgaataatgcaaacccttcatataaataaatatataagaagcataaggcttaagtagtcatgaatgcattcatgttcttaactgctgcttcctgttttttattgtaaaacaaatatggtatgcgtttgtcgtatttgtaatggttaataaaacattcactctatttatatcctaatgctcttcggccgctgagatggattacggataagaacacacacgacaattattatgtaccattcttggcacttgaaatagccaatctcggtgtaaagtactagcatttagattggtcattgtatgcatgtacttatagtgctacaccaccgtattagctgttatttatttgttaatattattaaataatctactgcagactaagaaaactactaagtgcacttaaggtgccaagcaattattatttgtgtaatttattagtatatcacatatcacacattttaacataataaataatataaaaaaaaaatgctaagagtatgttcaatagagtactaaaaaagtggtgtattgctatagtttagcgaatcagaaaaaatactactctaaag

SEQ ID NO: 85961 - DNA, 1222 bp, Cannabis sativa
agaggatgttgtttagaggggaaactgttggatcgaacgtgataagctgccatttttcttttcctgtaaaaagatggagaagagattgagagctgttgaatgttgatctaaaatttgattgatttttcattggcatctaccctctatttatacaggcaaaaaagtcataagggagacagaaggaatctcattctcttcatacacaataagaataacacgcttgtgatttgaaattaaacatactataataattatgttgatgatatgtctcccctccaccatgttcggatcttgatagtgaagggcacttgcactgtcataaaatgagttaaaacctgcaattataatgaccatttcatccggatcagcatggcttcaaatgagacaatagatgtggatagctcataatagagctggttatgttttcaaatactttgaaattggtgagcaaccgtgctgatgattccattggtctcctatcaacatggcagcagtgtatgtaagtttcgctgcattaagcatgtgagattgtcaagtctaataatagttttcatcaacaatgagaatctttacagacatgactttcaaatttaaattatttaatacacttctagtctcattttttatgcatgtacatataaaggattatatataggcaaggcatgtttgtatttctttcagttggacatgcctcatcccaatggtcaattgaatttgcaaacaagaggcagtgaccatcaatttagtgaagtaaatgcatgatttcttaaacataattacattatatgattgtgttgatggataagccttgttactcttgtttttgtctttcattaatagtttcattgaacgatagaaatgttactttcactgaagtaataaaatggatgaaacttaagcttcagcatagtgagaccaactttgtttgtctcatgatgtacgaggtagtatagtgcagcatcaacttatgcaaattcaattttcaacttcttcatagcagccaactcttttgctttgcataaacgtggaaactagagaccaaacaccaagttcagaatgtgtctttggtccagaaaaaataaggccaacaaagactcaaacgtagcaagagtgactgcttccacctctctcgtaatactaactgaatttgggatttcactatctgagctttttgattccacacccttcaaactcatccatgctttttggattgtctttttca

SEQ ID NO: 85962 - DNA, 713 bp, Cannabis sativa
gacgagttgtcgccagaagaagccattgacaaaggtcagtggctctgataccatgaaaactaagaagcagaggaaaagcagggacaaagaaacaagagatacacaaggaatgctttgaactcttacctcagaattgaggcttagcactttatttatagtagcagacttgtacaactttacataacagaattctattatataacagaaagaaagcaagaaacaaaaactaactaactgttacattgaacacagccaaccaatttaactaatcttggttatcacttccataccaacttagctgcctggcgcagcagaaccaaccaatgggggcagcgggcatttcgagagcatggaagtgcgttgtgagcaccagtgtgtttgtgtaggcaagtaagttcaaagaccgtttgcggcacgtttgattgcagtgcgccatacaccaagcttgttttagagcggatgtcaagagtggaaaggaagagttctaccgaggacttagtcaagcagttacggtagcagtcctctttggtttcttacatgacagctttcgaagcaagctagccaagcaaggataacgggaatgagaaagatacatctagaaggactgtattaggatgggccctagcggttaggcatgcaggtggaaacaacgttaaatactatactgccttcgatccattcggtcaacttcgcccctcatcgtttgttcgaga

SEQ ID NO: 85963 - DNA, 1152 bp, Cannabis sativa
tcatagacttaagtatgagtttaaatttcatttacaaacaatgtgggacttttatacaattactcataaaagagttaaaatctaacaaatttctaccttatcgatttcgtcaacaaattcctttaaattttaaatcaacgacgttatatccaaatcaaactagcaatattaatcaagttcaaacaatatttgaacttacgtttatcataaccttagttatcatattaatcaaggacagttgtagttaaatttagaatatttcttatgagtcaaatggttagttcattaattattaaatatatattaatttttaagattttttatttttagacaatgtgggattattttattatatatgttgtattacatataattttttttgtaatttttatttttttaaaaaataatgaaatatcattaaatgtgtttgtctaattcaaagaaccaataagttatgatcataggtatattttagtagtttcacacttcttttcataaaaaagatatcctaaattcgaattctcctctctcgatgtaaaaaaattaaaaagaactaacatgttcaaatacaactagagtgccatgctaccgcagaatatcaaacttgattatatatttaattataataattattttattaaattataaatataatattattaatactaaatatttattcatataatttacgttttttttatcaaactatatatttaattcttatttttttttaatttcaattaataattaggaagattttatagtagggtatcaaaaaagatcctatggccattattggtgtttttggcccaatctgacaatgtcacattgtgcaatagaatgttatatgttaagcaccatttattttaggaaaaattacataaaaaatttacatttttactttcaaatttttttttttttttacatttttatggtattctataaagacacaaaaaaaactaaatgaagtaataagaaaaatatattaaaacaatataaaaaataatatataaataataaaaaaatcaataacataaaaaaaatatatcaaaagaccgtattttatgtaaataaaatcataaaaactctataaaattatatttttgtaattttttttcaattatttttgtgttttttttctaaataattatt

SEQ ID NO: 85964 - DNA, 1445 bp, Cannabis sativa
  modified_base (714)..(718): a, c, t, g, unknown or other
acataataacacacttgatccatttcacaacatcaaaatcacacaatctcgatacttcataaagtacccttaccactcgttaaccatgagctacgtatatcactatcatttcccgatacagcgaacgataagtaagaaacctatccgcggtttcaggagtaattactcataatggtaataatcgtatcttttactcgatcataatcgagtcacaacgatgataatcatttcctatcatttttctcgatcataatcgagtcacaacgataataatcatttcctattatttccctcgatcataatcaagtcacaacaataataattgtttcctattatttccctcgatcataatcgagtcacaacaataataatcatttcctattatttccctcgatcataatcgagtcacaacaataataatcgtgtcctattatttccctcgatcattatcgagtcaaaacaataataatcgtttcctattatttccctcgatcataatcgaggttgtaacaatcataacattaccatatacggtacttaatacttttcttacctcaattccaaagtcaagtatgtgggccgacttgagtggaacaatgctcgaccatttcgggtcctatgtcatgacaaaggtaaatcaataagggtctattccaaaacactgtctaaaacccacataaaataacttagggtttttaaccgaaacttatggtnnnnncaccctaaattaaaatacatattttgtctctaaactatgtctcataatgtagagctcttcataaccttcaaaacggtatatagaatgtctaaaacggacacctgagtgaaaatttatggctaaaatacaaaaaacagtgattcgtgaaaattgaccatctggaattccggttgctgcagccctgtaccatccggaattccggttcactacagcaaaaattcgaaaatttcagatctttaaagtcccaaaacttgctccaaacctaaccaattgttcccaaacttcacaaaacagtataataaccataatacaacatatcccaagcttcaaaacacaacaattcaatcattgaatcaaaatcatatgttcaagtgaatgaaactcaacttttagcttcaactagcacaaatcaaaccaaacagccatagaaacctctcaaaacaaactccaacatactcaaatacctatcctaaacacaccccaatcttagcttagttcctacagccacataaaagcaaaaccctaccttaaaaccaactcaaaacctagaattttcaatccaaaagtaaggagcttacctcaaaacacttttaggttacttaggagttagaattctgcttgaaaataggaactttgctgaagaaaatcctcaagggtgggctggttcaagcttgcacgagagagagaaagagaggaagttgtggtttttgatgtttacttgactctt

SEQ ID NO: 85965 - DNA, 576 bp, Cannabis sativa
aagataacttttaatgcaaattaatttcctttctctgaaagaactaataatttatgatcaaattcataaagacaaaatcaaacccaatattcaaaacgataatcaccacaaaattataaaattattttgtaagcaagtgtaccatattcaatatttaataatgtacaccagtcaaatttgtacctgtgttaaataaatgtgtacataggtttttaattttgccaaaaagttaattaataattcctatctttaaccatatattataatattgcaataaatttcattctcaaaattcactattattttctctataataaaattaaaaaaattatctaatatactattttttaatttttctttttttaaaatttatgttttaggaatgatttctttaataatttctatgttttgagttattatacaaattttagttaccatttagattactcaattaattattatataaatttttatttaaaattttgtaaaaatataaaaaaattatttttgaagtgtaaaattaatgttattgatgacaagctatatacctagataggtatacgtgtaagtctccaa

SEQ ID NO: 85966 - DNA, 663 bp, Cannabis sativa
aaccatggaaaggacttttctgctatcaatgaaactctcatagtactaatccccaagaaatccaatgcctcctctttgagggactttcgtcccatcagcctttgctcaacaatttacaaggtcatatctaagatgctttccaatcgtcttaagagtgttctgggcagccttatctctcctttccaaagtgccttcttatctgagcggataatctttgataatattttcattgctcaggaaatcattcatgccattaaccatcgaaaaattggtaagttgggttgggtaggcctcaaacttgatatggaaaaggcgtttgatagagttgagtgggacttcattttggctatcttaaataaattcaaattccctctaaaattcattaacttaatccatcaatgcatatccactgctaaaattcgcttcagtataaatggccacattacaaatcccatccatccctctcgtggtattcgacaaggggaccccttatcgccatatctcttcctcctctgttctgaaggcctcactgctgcccttcgactccaggaattaaacggatcctttaaaggcatctctgtagctcgcaatgctcctcctatctctcatctgttgtttgcagatgacactcttttatttacggttgcatctccctcatcttgt

SEQ ID NO: 85967 - DNA, 672 bp, Cannabis sativa
gacatacaaggtggaaatattctcttagaggaaacaacaaggcatgccagatgaagaaaattggatctatgttgtttgttatgcatgctgtcatcaagggaactatcaagaatgtcaggtatgtcctgaacttaagataatattttgtctattggtgaattagttactaatggatattccattaagatagaggaatctcttagggtaactaagagttcactagtttttatgagaggggatatcaaaaatggtatctatgttcttaatgtaaaggcagttatgggaacatctaatgcaactttgaatgacaagagcgataactagactagaatgtggaatttcagattagaccattttaatgtagactagaatgtggaatttcagattagaccattttaatgaaaggggcttgatagaattagagaaacaagggatgttaagagaaaaattgaatggtaaattagaaatttgaagaatgtgtactaggaaagagttgcacagtgaaattccctactaatatacatattactaaggaaccactcaactatgcccactcaggtttatgaggtccttcaaggacaaactcttgggggttttaactacttcatgagcatcatagatgatttcagtagaaaggtttgggtttttattttgaaaaacaagaatcaagct

SEQ ID NO: 85968 - DNA, 962 bp, Cannabis sativa
gatgttaattcaacatacatgttaataaatctagatcctggtaaaatattcccaacaaataattggactactgagaaacttatcttggtgtgttaaagcccaaaaacctaaagcattcataatatccaccttaacttgcagatccacattcttagagaaaataacaactaatttccccacattaattacttgaccatctacaataattatcaagatgattttgaacctcttgaccttctcccatgccagcttaaaagataaaagtatcacatgcatatatcaaatatcaaatgggagatggaagggcttcgaggattaaccttaaaaccatgtatatatgattcaactcttcatgttttagaagcattctgaagagacaacttatagtttgtcacccttctaatcaatccaccccattatgtgagataacttctataaaatttctcttgcgctttataatagataaaaaacataggaaacaagaaacagaggaatatatggaaagaatgaagattgttaattttcttaattgattgatacaataacgtatattatggtacatatataatacaaaaggaataaaaatatctgtaacagaaaagattctcttgcaatatgattgactccctaaagattagaaattacagaattctagataattgtagaatgtaggaggacagctgtaattgtgggaaataattaagtgtgcactgctccactatttttgacaggatccctcaagcttggcgtggctggagagattacaacaagcttgtttttcaaatagttgaattggctgattgaggtggccttagtgaatacatctgctctctgttcagatgttggaataaagtgtacttcgatcagccctcgattgatcatgtctcttatgtaatgaacatcaacttctatgtgttttgtcttgctgcgaaagaccagatttgaggatagttgttttgctc

SEQ ID NO: 85969 - DNA, 654 bp, Cannabis sativa
  modified_base (341)..(366): a, c, t, g, unknown or other
gtagtagtacctcatcaaaggagaagtgaccactaattgaattttcttggaaagtccgctcttttcaatatggtttcgcaaattttcaacctataacaacacatattaatttccatttcatacaataaaccagctttattacaaacacaattatgattatataagccttattagtggcaaagaatataatcacgaaatacaatacagataaaaaatgagttaaaagttaaaagattttactacaaacaagccaaaaataaagaaaaatgttaaagagtaccagtggtgcttagcaccctcttatgtgtcaatattgttattagtccaactaagtatcgggnnnnnnnnnnnnnnnnnnnnnnnnnnttagggagtatcgctaactaattgtaacgcgacatgtcgataaggtgctaggtaccactagtgcctaatagcgatgctcagaaataaaatacctgcttccaaccaagaggggtaagttgtgcatcaaaatattgcttaggatcttttcttcttattgcctcattatgaaccccttcagcatgcctcaccttcataacaccccaccacataaatattacatcaataaaatcatatataatttggtaagtaataattactaaaatttatatatatatttaggtatatata

SEQ ID NO: 85970 - DNA, 946 bp, Cannabis sativa
atatggttaatttgtagaaaagtagttctgatattctgatcatacatatttacttggttaatgaatttatatagtacatattgagaaagagcatgtagtgtgggacttagaattacgagcagtcctaaatattaagagccttacttagtctatataataacattaacataccccaattttatgcaaagcacactaaaataaacaatcccaacccccaagcacactataaaagttaactttttgttcaatcttaagaattataaaggtgtccattatcaaaaaaagaaaaaagaactataaaggtgtatggagcttcataaaaccacaggttggcatctttacattgtagagtgacaactaataaaaacacttggtaagaagtcactcttatacgcttcatttgtgcagatcaatgtcaaaactcaaataacagttaagaaatgttattatttataagtggggttatgtttggtgaaattttgctgaataaagataatacaaattagaagaaacacaaactatttcaatgaatcatcaactcaattaggagatcctaacatactcttctactgaaacaagccactgattgttatgaatgagataactgaaagacacattttctatcatcttgtgtagaaagatagattgagatggaatacagctaaaagaaaaatagagattttcttagtaaaaattcttaatatgtaatgaaaatagtgtaatgcttatgtcaaaatgtgtattttattttcaacacttcaaacctgaagcaataaaattaatagagacctttgataacataaaaatacatattgttagtacacttaccatatagtaaaggaggaagatctcctatactaatgctaatagtgttaaactcaatcaattcaatcaggtccttcccattgtactcttcaatatcggttatgttcttataataccaagg

SEQ ID NO: 85971 - DNA, 1611 bp, Cannabis sativa
  modified_base (28)..(28): a, c, t, g, unknown or other
  modified_base (667)..(684): a, c, t, g, unknown or other
  modified_base (789)..(790): a, c, t, g, unknown or other
aataactcaaaccagttataattgaaanataaccggttctgtaacataatgaataaaaacaaataatacaatataactcaaactagttatatataattaaaatagaaccggttctataacagtattataatgaataaaaataaataacacgaataaatcaaactggctataattaaaatagaaccagctatataacataatgaatacaaacaagtaacacgtaattactcaaaccgattacgattaaaaaacaaagagaaaatcaattcctaaaatacttaaacataaattaaaaataaaactagttctacaatgaaatacctcataaaaccgattataatttttttttaaaaaaaaaaaaatagggatcaattctataaaatattgaggcataaatatgaaaagaatcagttccataataaaataaacaaacacaaagaacaacacacaataactcaaatataatataaagaaacttgttatatttatcaactagttaaaaatttgagacaaaaaaaattgattccatatatcaactaagataaaactcacacacaaaaactaattaaataaaataactcaaacaaaaacattcattcaacatgctccaacccactaaaaaattacacacataccatatttaccccaaaaatactcattcattatnnnnnnnnnnnnnnnnnnttttagttataactggtttgagttattttttgttatttgtttttattcattatagcattgttatagaaccgattatatttcaattataactggtttgagttattnngtgttatttatttttattcattgttatagaaccagctttatttttgtttatatatgagacatctaattctggtgacttttttagtgactttttcagtgattttttttttcggcgacgatgaatttttcagcgacggtgactttttcgtcgacactaactttttcagtgttggtgactttcctgatgctgatagctttttcagcgaaacttattattattttacaaatgggatttctatctttttcttacaacaatatagtataaaaaatttcatataaatgtaaagaaaataaattaaaaaaaaaaactcataactccataatatttttatttattccataaaaaagtaaatccttataatttttcaattttccacaatttactatcatggaactcatgacttagcccattgacatttatttgctttaggtttgggccatttcgttttcgaaacataattgtatttttctactgtatgttatcttttgtgttttatcaatctataatttcttttatctttataaacaaaataaaaataaaaatttattgctatataattacgagaaagaaaattaatatacgagatgtccaaaaaaatttcacactagtacaagaaaaaatattatttatatttggcccctcctagaaataaaggttggtttgccactgtcctaatcatttacaaagcaccacctttaggtggctctaaatactttataataatgctagcaaaaagtaaatcacttcctataactaatactccaaattgaaactacaataataataataacaattagtagaagtatttttgccttttaaac

SEQ ID NO: 85972 - DNA, 1029 bp, Cannabis sativa
accaaaagaaaaagagagatccactctgagaaagtcaagccactcataaacattcccaaccagagccacacccaaggccaataatagctgacgagccctggtcggtagaaataaaaaggagccttcagagggttataggaaaaaccctaatagagcacactaaaaaaaatgtttcagttttgtttaacaactagaaatatttgcatactcttcttggtgagaaattcatccatttatttctcataaaacaaatcatccttcaatctattatttatttaattaataaaatatgcatccttccaaccaagttaaaattttcttttggtttaaaacccaccattttatgtatgtgcaattatatatgcatataggttaaaagaaaaaaaattagaatttctcgttcttaaatttatagctattgaaagttatcttttttctctggccaggtcaactggcctttcatggggttaagtgcgccttggtcaaggttgtgttttgctaatgtcatttgctactgcgattaactttgtctctgtgatatcttttttaatattttagtcttgtctctacgacatagttttcaatattttaatcttgtttatgtgacatattttaaatattttagtcttgtctatgtgattgagtttgtttcgttgttgatctttctttaatcttcaatgacttgctattaaatcgctgttagtggttgggtataacaagatttttacaattaaaggggttaatagtaatgcagttacgtaccttacacaatagttgagtgctcaagctacgtggttaaacttcctgcaacagtttccactgttgtatattctgagggtggatgaaatagaatatatgtattcttatagttaactgtgatactgtaatttttttcatatgattttatttgatttttttgtcaaacaatctagaaattaggcaataatccgactaattatttagttcgtttttctaattctaatcctagtcatgtctccaacaaatgagatgttcgattagattgcacgc

SEQ ID NO: 85973 - DNA, 685 bp, Cannabis sativa
atccaaaaaaagggtttgtaaattgagaaatttacaaaagttcactaaaataataatttatttacatttttatagtgtcaggcgttttttttcttttttccttctttcttattttgttttttacttttatacggtttaagctacttaaggaataaagagtgacgcgcgtggacctcattttctgttagtgggaggaaggcacgccaagtggtgtatttataagctttcttcttttttattaattaaacttgttaaaactttttttttttgtagtgagatttcaaaatatttgaaaagtcaaagtaatattaatttaattagtttttcttaatttacatataattaaattagctatttaagaagaaagaaagagatataatgtatagtataatagtagtgataatttataaaaaaataaaaaaaaataaataaatatattgacattaattttaacaatataaaatgttgaattaattgttcaaattgttgactaaatgtatattaaagtacacgtatctagtatatttcttattgttatttaattttttaatataaaaactaaaaaaattaatttttttatataattctatttaaaataataataataaataatattatactatttaaaagtacttttctttttaaataaaaatcattatattatttatttaaatattttttgact

SEQ ID NO: 85974 - DNA, 758 bp, Cannabis sativa
tcagaacattagaaacccagctaagaaaatcaagatacgatgtccttaaaaccgaagcatcaaatcattgatagcaaagtgaagcaaataaacattcaaccataatatgaataataaactcagctcctccacgacacacttgacatatcaatggaacatgtccacatattttctctgaagttgcgtggagtggacaagatacccgagccagctctccataacacatgatgaactcttggtgggattttaagatttcaaagattctgccaaaaaccagaactagtttgctcatcctacctcccatttaaatgttgaagacacttataggccctctttacactatacatacccaaactctctttacaccaatgccattagtcctctcctaacccatcattgataacaacactttgaataagcaatttgtcctgctcattaaaagatcaaacaacaagtcaacatcctaagcccgagaacctaggaccataagctgagcctccttagcgttctccaaattaggatgagtcaaagtaacaaaaggattctcctcactcggtaaccaaggttgatttaaaacatcaaccgaagcaccattgacaatactccaacaacatccttcctttaacaagctttgagattctatgatagaacgccaaataaaacttagattatgacccaatttagcagaaaagaaagaaccacgaggataatatcgagcttaaaaaatttgactgagaagagaattactatgaactaac

SEQ ID NO: 85975 - DNA, 2310 bp, Cannabis sativa
atatatttgtattatatgtgttaacttttaaaatgactattttttgttacataaaatattagttatatatatatataattttttaaaaatttatataaatatttgtaaatttgattagatcggttatttttacatgtcaatcaacatccaatctgcacaagtgagaattttagattttccaatccaatctaatctgcagaagtgcggatatccgtacttaacaaattatattggattaaatcgtgcaaatcaaattagattgattattttatgacacccgtaaagctgattaacagtggcatgttaatggtccctttgagagatgaggcggattagctgccccaggtcacactagccttctttcttcgtagccttacggtgaatgtaaattacaatagagcacagcagtgcaaactcatcaaaagcaatattagagcaagccctgttattttctttaatcaatagcttagatctttaattaatagatgttttcaatacattagtcgccacaatgtacaatcaagttcacttaaaaacgtagatattttttttttttcttttggcacaacacctagaacagtcccaagtaccaatagaagatgcaaaatacaacattcattatttttctttcagagaaatacattctcctttctaccctattttatctcccttacatttctgatttttccttttctctttcctttataccccccaaaaaaatccctattcatgttctttattgaaattagtccttaaaaccaaatcaccaagaaactaattctataatcaatgatatctacaagtataactctcgagtaatcctaagcacaccatgttataatgtcatattggcctcaaatgatggtaattttcaagcaggtcatcttctgatagcatatctttcacgtcttgtggagtccagagtacctccactgcctataaaagtagcaacatatgtcacaggaacggatcaaaaactacaaatggaaggcgacatacagatcatacattttagaaacttaccatcatgtcagcgagagagacaaatctcagagattccagggatgattccaagttcttagaggttttaatggaaggaaggttcttcacacctcgaatggaaagaagaactgtaacctacaaatgatttgatagattcaaaggaatgagaagtgaaaatggagtataatgtttgaaagttttacactcttaaggccaaacaaatgaaaaaatatcatgctggtgaccaactacatttgcaccatacatgagtctgggactggagctcagtgagctccaccatatgtgatgttggtcaccacgcgccagaagtcattggcagtgttcagcgataaaaatggtatgtgtacaaaaaagggttatccataaatgttaataagcttgacttaagcacagaaataatgtagatggagattccaagaaagaagatcataccactatgtagttcttttcaagtttgttccccttcagtgtggaggttcttttttgctcgccgttgaaattgacaagtgactctattccaaccttctttcgctcttccaaggaatgttcgttaaagctcttttcgctttccgtaacactcttatttttatctacctgcaaaatatattgaagttagaatcaaaactacaaacaaatttgaaagttaaaatcctgctattatatctccaacaaaagacattcagtcagtaaatatgtttttttcttttgttgtcaacacatcaataattcaaagtccattttgtctaaatagaaaagagtaggatatatagactaacatatgtaaaaccagatatccagtaatcacggtgttggagcagaactgacacggtttctgcacccatgaaaacaacatgtaaccatgaaattgtcaaaaaaatgtctagtgattaggtattaggcagcaattctatcagatgccacgaaaatattccagatatagaccttgcagaacttggtgaaaacctttaacatccgatgtatcagcagtttctgcaattcgattaagatctccaagaagcactgtagcttttccagataacccaacctgtaacaaagaaacatgatatattcaagtaagtaaatgtctttaaactctctttgatccttccaagtgaactatagagtgtaaatataagggattaaaatcttcccttttaaaaataaaaacccaaaatcactatagctcgttcactaaaagaacacactagaatctaccattattcttgcacataatggaacccagattcaaatataaaattttccaatcaaatgtagcctagcgaaata

SEQ ID NO: 85976 - DNA, 656 bp, Cannabis sativa
tgaatcaactcactgaattccgaggtagggttatgctcccaattcaaaacatgaggaatcttgttaccaattcttttacaaaatcaaggtgacaaagatggaatgatctcgtacagccatattaagaacgcaataggatattctttaagcttatgacccttctcaatctttcttctcttagcaagttgttcaaaaataccattaccatccttcaatgcaatcttgaggtgatataatgtcttctcccacaataactttccccatccaaacctattcaacactttaatataatcatccccataaaccatagcaaaaataaaattgttaatcttcttgccttgggaataactatataaataaccaaaaaagaagtatacaagagatatcttcaccatatcttcatcatctttcaatacaccgctaaagaaaatactggcaacatccctcacgattaccttttcagtagttccatgcatagaaaagatctcctccttgaaaccaagtaacttcttcgatttgaaaagatcaggatcataagatttcttacaatccaaaccagttattaatgaaaactattcaataccaaatctaatagccttgtttcctaatgtaaaccacacctcaacatcattcctttcagtgtgaatttgacgcaa

SEQ ID NO: 85977 - DNA, 1056 bp, Cannabis sativa
ttggagcaatttttcttttcttacttccaacaaaaatttaactaaattttttttaaaaaaattacaaaaatatatcaattttttttatttataaaaatatatcttcagtaaaaataataaactattttttaattattttataatttatttataattgttatgatatttttttattattttatagttgatttataattatcgtaagattgattgtacgttattatttttacttttttgtcgtatatttttgtaattttaaaattttataagaatatttttataattaaaaattttaagccgtaaaattataaataaaacataaaaaaaaatattcttaaaaattctcaaatttccaccttgttaagaaaaataaaataaaactccttcaaaaataaataaataaataaaataagatttgcaaggaccactcactttcaaatattcattttagatttgtccagcttcttcaaagacactattaagatttaagaatctcataaattttttaattatacatggagttttatatatttaatttaataattatcataaaaaattgttaatcattctcaaagcactaatttatagtgctcttaaattttacaacaacaacatactaaaaagcgatcctaaatgtataataaaaaatatgatagatcatactcatgtcatcctcattataaaagtcaaaactttaacatgattctatgtcaaattattactaatgaaaattgattagttgatcttcaaaataataataagacagcctggaaagattaaaattacattttacctaacctaaataataaataacacttttcttattggactaattaaatagtagtgtttatagttggaataattacataaggcactatttttaaaaaaaaaattatatttttacgtttaaagaattttattttacatttttacggttttctatggaaacaacacaaaaaaaaaaaacaaaaaaaactatataaaagtaacatctaaataatatcaaaacaacaataaaaaataacatacaattgacaaaaaatcaacaacaaatta

SEQ ID NO: 85978 - DNA, 2788 bp, Cannabis sativa
caatggtttgggtgtttaaaaaaataatgaaatatatgtgtaaaatatacatgtacatatatatatagtaatgtatcacttgttttttaagtgtatactcttttaaataaaaataacataattttgaattaatttctataatttccaattccacataacataagttgaacatacctaatgcagcggtgattaagaccaagttggttgccacaaccacaatatgtgctacataactacaaattaataaaagttaaaaaaaatgtgtgcaataaaagcatatatataatctataaactatatatattatataagattaattatatgtcacgcgaagaatatcaaaataaaagagtgcatacgaaatctgaatagctcgttcaatggattggccattcttgtcaacaaaatattggacaattctcgactcacttcctaatcgatgagttgtggtgttcaaagttgaagccatagttggatcgtaagccaccaaaagatattgcatatgtgtcattgctttcattacatgttttaggctccttctaacctctcctcctacactcaatatggttccctttaaattttccattttcttcattgagctttggtttgctaacagcaccaaacttgatgcccctcttcaaaaacaaaaaaatcaattatatttatatatagatattacgtacattatatgatgagaataattgatatgggacttacatagcaagaatggtaaagaaaaggatcatacagaaggttacaagatagtaattatccaataagtctttaattggccaattgttcatggtcttatgcttcacactcatgaaaattcctattccaatcccacatactaaccatactcctgcaattgcatacccatgaactcctgtaaatgccgtagactgaaaaaaatgagaaaaattaaataataagataaaccaattattatcaatttttttctgttattctatctatatatatgaaatgtcatgtgaaatatatgtatatttgaacaaatttaaaaaaaaaaatgaaaaagaaataaatagaaacgcacagcccagtaatgcttgtttctaacatcgtaaattccattgtagtacttgaaacgacgcaatggatcatgtcgtttgatggtttgttcttgggatggagacgctaaaacttgccaattttgtgaaaccaaagatgatgaaaacaaaaatagaagaagagaaagtgcaactccattggtactagcactagtattagacatttaatgcttctaatatcacttcccactttagcttattatgagtgttatttttctttaaaaatatatatttgaaatggggttttattctctctatgcaatcttaattttactattgctttttttttttttttgcttagaaagagtatttgggggtattaaaattcttggtgttagtgttgaaggtaagtatagcttgtggttatggtttttgtgggatttgttattttgttctcttcaagaatttaagaaagacaaaaaaaaaaattaatgcattagtaagggaggtaacgaatcaagaggcgacatttctggttgcccatgttcatgaaaattgaaaattgaccacattttcaaacttttgatccatgtctttctagctaagtctcttttcaatttcaatctcaataagatttgtccacttttttttcttctttcaaagggggataagggggagacttggacaagaaaaagtgtgacaagtaatataacatctcttactatggattgccatgaaataatcttgtataatggctactttgtaggaaatagaataggatcatgattaattaatttcttatatcttacatatttatatatatcgcctttgaatcgtggagaagtatgtcctacggcaggaaccaatgagaattattctcataggaatgattctatgtgttccctagctcttgtatgtaatcatcactctctttataagaatatatttttaaacgttcactttcttataaatttggttgtttaatttgatacaagagacaagtttattttgaatcccttgctgaagattattgatactcatcatattattataatatagaatatgtctttaattcaactttactttgcaaataaattacataatgctcagctcatatatggatacaagttgatcagtaacatgctcttaattgcttctgtaatatgtgtctttaacataacaatattgttaagtttatggcattaattgtgttttaaaatttatgaaaggtataaagaatactcatataggtcaatgaaagatggctttagtgtcatatatttcacttgtaaagaataaaaaaaaaatcaaagtttatctaaattgaggacttaaggatgtaagtaaatatcttcacaatttagttatgtgctctcaaatttatggttggttcgatatgagaagttttgttgtgtgtttgcaaatgttcttctccaaaattattttgtttatttgtaatgaaatcaattacgcatatctttgtttttctacaatatttttggattgatttatctaagtcataagtgaaaaaagatttacttagtttccctctggttgcgtaacattcagggattcaaagagattcatttctctgtttttttttttcagaaattggtgttacactactacaaaaatggttttttcccgtcatttttattttaaaacagtcgtttaaagtattatcgtcgatcactacaacaaacaccattaataggggcggaacagtccgctggtaataatgctgaaatccgccggta

SEQ ID NO: 85979 - DNA, 744 bp, Cannabis sativa
tatctaactatttttgttggtttaaccgaatatatttaaaaaataaaagaatattctcttaaatttaacggatgctgttaaaactgtttgttttgtaaatattaatattattttattttattttattttttttaatagaattaatattattttatttaagtcttttttaaatttgtttttacaatatgaattatataaaactaatattttaattcgattttattatacataaccgaatagatatagtttggagtttttataccttgctctttaataaatttcttatttaattttaattaattcaaataatattattttttaaatgagatgatattattaaaacaaatttaattaaaagatagagattttttaccattaaaaggtggattggtttgtgccaaaataataaaagtataaagtgacgttagtatattttatcatatatagtagccataatatacttttacatgtgaattgtgctacaacattttattttaacttatgtacatttgtaacattatttaattattgtaacttaatacaaaaataaaaatttgtgccttgcacgaaatattatttagtaaatttaaagtttaagaatattgaaattgatttgttcaatattaaaaataacaataaaaatatttttcaaaaaaaaaataacaataaaaattaataataaataatattttttttaacatttatatatgtttaaaatatttttttttttttgaaagtatatat

SEQ ID NO: 85980 - DNA, 1254 bp, Cannabis sativa
  modified_base (868)..(869): a, c, t, g, unknown or other
ccaactccaaccatcattagcggccgaatcactaagttgaatggacaaaataaggtcctgatcacgaccaacaaaatggtccctcacaacatcctcatcccacgtgcgaggactgacttgaaataaattataaattaataaattttgataatattaaattgaatgtgtcacattttaaagtaccactcatagtttatttttaatttaattatttgatttattattttttaaaaatattctataaaatatttataaaattttaaaagataatactttctacaattgacacacaccattaaaaagtattttagtcatcaaaatttaattttgttgtatatgccctgtcaatattggtcaccccaactatttaactatggttccgcctctagatgaactcctaattatttcgatatctaagaaaatattttagcctatttttttttttaacgtgtacgttattttaagaaattaaaacagagttcaaatagtctgttaaattaaaacaaaaaattttcctaaatgactaaatggataaaagtgtattggtatactcatttttagtgtgtgctacctgctagtatattgagataattacataagacaatattttttgtaaaaaaaaattatatctttacgtttaattttttttttttttttacatttttatatttttacggttttttatagaaataacacgaaaataacaagaaaacaacaagaaaactacataaaagtaatataaaaataatatctaaataacatcaaaacatcaacaaaaataacatacaaataacaaaaaatcaataacaaattaacaagagtacaacataaaaactgtattttggtaaataaaattaaaaaaatcgtnnaaatatttaaaatttcgtaaaattgtatttttgtaattttttatttattatttttgtggatttgtaaaataatccctagtatattcatgccaattactccaatttgaactacaacctagtatttaacagaacatagtatctcaagtaattcgtaattttttttttcttaaaaactgaagtaattcgtaattcagttataacaaatgttattttattaaagttcttttcttaaaaaattattgaaattccttcaaaaaaaaaaaattattgaaatgcaagaatgtataaattcaaacagaaaatggagaaccacttgagagggtagtatgttctcatctcaaattatccattgtaatatgtaaatgcttactttaaaaaaaaaaaa

SEQ ID NO: 85981 - DNA, 675 bp, Cannabis sativa
  modified_base (38)..(63): a, c, t, g, unknown or other
ttttagaaagttcatgtttagggtgttaatcaacatannnnnnnnnnnnnnnnnnnnnnnnnnaaaataatttccaacaataaactataaaatttctgatatggaaaaaaaatactaacccttgaaatacaagaacaacgcaaaacatattctagagggtagtagtaattcaggacggtaaacacaaagactaatttaacaaaatataaaatcaaattaaaatattaacatatatacatactatacatatacatatattcacacacatatacacttacataacatatacatgtatatacatatattcacacacttatatatatttacatatatacataataaatatatatatacacatacatatttttatacatacacgtatatacatagatatacatttataaatattcacacacatatatttatatatatatatatacacatatttacacatatataaatagatttaaaataaaaaatgataaaaattagagttagatatatatatatacatatttatatacatatatacccaaaattacacctacatttaaataaaaatacataaaaataattaaaaaattaaaaataccttttaaaatgggggtgtagtgggactgcggtggtgtcgacgggagagacaatatttttagagagatagaaagaaaagaaagg

SEQ ID NO: 85982 - DNA, 2063 bp, Cannabis sativa
  modified_base (1310)..(1311): a, c, t, g, unknown or other
tcctctatggcttatagttatatctatattcatttatttttctaacattaaaacttttcaacttcactctcaacaaatatatggctaagtattagtgatgaaaaaacctaccaatataacttattcaatatgtctgttatagtgcaagtttttcaagctaaagttagttgaaaagctttgagaaaattaaagaagggagaaccaaacatacaccattcaatgtctttattgagttaacaaaaaagtagaaatgttttcaaactaattaatggaggcattatatgagctcttttaagtgccccccatgtgagaaatgaggttctaattagacttagatcaaatctcatttaaaacacattattggcaataaaatgaagagtttcttcaatcattttttagttcaatcaccaaagtaaagtttaagtagtgttttcttgcacactatccttctttcttataatgaaaaaaaaaagtcatacgggccaaaagaatattttgctttgatatgtttttttttttcttttttcaaatctagttctcaaggccattaaagagtgaattattgaagccccatatatagagagagcaaaatgaatcttttggtggccacacacatagagataagctagttaatatcttgaaaattcaagggccaaagtgatcaaataagtggttgattggctatggtacctgcaaagtttaattagatgattgcatcatttgaattggaactctcaacactccattccaatccaatccaaagatgaaagaaaaatacccaattctccctccataatagctagatagtgccttcatttcatatcacactatatatgtccaatcaaagtgatttgaaccttttttttttttttttggtagtggcttatacatttagatattaataataattaatgcaatatgaagacatagccatgcattttcattcattacaaaaccaatcagttaggaaaaaggttcaaatctttgtggataactagtcaaatagtattcattatatttctaaagtacttacaaattttatactatagagtaattctacgatacacgtctaaaatagttatattggtatattcttattttttttggtatgtaggaaaattttttagtctatttttttaataattgtatatgtattaattaattagaactacttgtaatatttttttaaaaaatatgaatagtttataatgctattcaaatatttgttacactatttttttatatgtatggtatgtcctaagcatctgtttaaatttttattttaacactgtaaattatttgaaattttnnaaaaatttataaataatcttaaaatattataatgtgtgcgatcataaaaaatagactaaaaaattattttacatgtaaaaaatggatagaaaatataccaatgctttaatgatgtactttatatatatttttcaataatatataaattaaacttaggggtccacatttgattacatgcttgaagttcagtgtttcctatatatacaatgaattacaagtcaaaattctactttgatgatataattagactctttttgtgtgataggttgagcaattattaaaatcttattataaaattgaataaaatatcagacaaatttagaaaagagggtcttatgtattgtccattacaaaaaaaaaattgaggaatttacatgcccttttggaaaatttaaaataattgtataaactatttaactttgtgtcataagtgagtcaatttcatgcttccttacttcatttagaacatcattttagttttttttttttaatactaaatcatactaaacatagtatttcttcaatgacaagtgctaaggacactctatattgtattttctgagagataattacaccacatattacaattttcaacttttttacttttataccctagatcagaattctttttaaaaatactgtattttttcttaaagatattttttaaaaaaaatactgtgtaaattttataccgtgtactgtgttaagttttcactgttattttacgattattttttagttgttctgttttg

SEQ ID NO: 85983 - DNA, 769 bp, Cannabis sativa
acaccaaatatacttatgcgtgtgtctgtggagaagagagagattaaagcactcaaaatcaattgcaggtaaagtaaaaagatatatgcaataaaaatggcaacaaatgcagcatcaaaacacctgcatatgcattgagttatataagagcaacctgcaacgcaaaaatatgtgcagaagtccttaccatttctgtcttaatctggtcaaaaggttgcttgtctaacttgtcaatgcttgaacaaatagttctaaacttctcagggggaactccacaaatttctaacattccatctagtaacttccgatgattcaattttatctgtgatcattaagaaagcaataacaagcattctaagtaaaaatgtaaaaatgtaattaaaaattccatgtaacaagtcagagaattttttttaacagaaatgcacaagtatagcagttaaaattgatactttaccaagataaggagattattaatggattgggactaatattccattttacattacaccagaattattaaatatgtagaaatgaaattaattcattactgtcatgactaaagataggtaatgatattccatcactaacaacatattatggtaacatctactataaaacctaccttgacatgtttgggtattataagattttttttatgttgaatatagaaaaagcacttttggaagtgttttggtgaaaaataaaaagacctttttgataaactatgccaaacagaaccattatttatggttcaaaccctgggaca

SEQ ID NO: 85984 - DNA, 585 bp, Cannabis sativa
aataaacattacagtggatatatagtacttcttctcaaaggaaattaactaatgatctttcttgatctcatctaactcactttcccaaatcccaaatacacccaaccaatcttccacacacattattattaagagtttctctcaatttcatttcaagatttttccctattatatatgttaatgtcacaactgaaatggattagttttgttgttgcatattacaacatgacaagaatgaatattaaaactctaggagaattaacttaattattttacaatatagattgtgtaacaaagtaagtaatatctttgaaaattatggcgaatgataattccttttggagcttgttgaacatatatgatagtgatctagatgtttctacttccatgggtgctacaacactagctagacatggtttagtctatagtctatggaatattaacatagatctcactcttttttaccatttatattcatgggaccatttttcctaataatgtcattaaggcctcatagaaataatgtgttagcatgtttattataattgttaattgagattaatatatataaacatgttagaagtt

SEQ ID NO: 85985 - DNA, 1150 bp, Cannabis sativa
  modified_base (53)..(56): a, c, t, g, unknown or other
ccaggactgggactgtgacccaagccccgaccccggtctcggtcccaaacctnnnnccggacacggactgggacccaagatccgaatcggaacgagaccgcgacctaagatgggatacggatcttgacccacgacacagggcttggacccaacccctagtgggcgtctagatcttggaatcgtaccaagacccgaacttggaaccacttccaaactaggacaaaaacccaaacttagatccgagaatcgacataagaataagaactggaataaggatcgtggaaccggaattagacctggacccaaaccagatcaagatgcagaaccgaacaatgagccggacccaagctgggatcaatacccagacccagacccgaacccaaacccagacttgcgccagaacctgcgacccagatcctgtaacccaagacccgtgacccaggactgggtctagaatcgagacctgtaccagaacccaaacgtagacccaaacctagacccagactaagacccggacccagacacggactcaaacttggacccaaacccagactcggactcgtacaagaacttggactcgaacccgggacggggacctagaccgatatcaagtatgggacataaacccgaactaggaccaagacctgaaccaggactaggactagaagccgaattgggaatgggattgagactcgggacctgggaccaagatcgagacctgagatcgagaccgagaccgggatcgggacatgggactgggactgtgacccgggacccgatactcgaacctaggaccttagaactgaaccatgacccaaacctagaccaagccaagacccaagacaaggaccagtactgaacacggacccggacctaagatcctgccctaaatttgggacctggatccatgacttaggacccatgacccaaacctagacgcaaacatccacttgacacctgaaccatgacccaagacatgagctagaactagacaaggatctgcatttcgacctgggacccaggacccgaggcttagacccaacccgtaatcggtgtctaaatcagggaatcggacctggaccaagacccagacccggaccagaaccagaatccatacaagaagtcgaactagactaaacatgaggttgga

SEQ ID NO: 85986 - DNA, 994 bp, Cannabis sativa
aaaaaaaccgaccgttcaatggcagttttgaccgtaagtggttatttcagttttcggtttcggttccaacggtgttcggtaagtcggtttgaacaattttctcagttttctgaattttatgctcactcctaataaaaggtataaatgttgtccacaccttatagaggtatttttgtaaataaagtgtcaatttatattttctatgtaataattccatatatttactatacattctcttatttctgtatatatctttattttgtattggtcaatatttattacatatttttagcaattagttagctaatttatagcacaacattactcttgtatattgtatttataaccatgattgataatgagaaaagacacggaattgattttcttcatggtattagagcaaaaagttttacaagccttattacattcaataaatttattactacgaagagaattgataatattatcaccaggatgacttacacgattgtgccatatatcatgagacatggtagtaaaacctgaatgtgtgggtgttgtggcttgagaatttgagaagagaggatataagtccccactgtcacatctcattagtctggtccccgtttgtaaataattgattgaaaaaccaaaagggtcaaaagaaatagaaaccatattgtcagtggtaaatttacgaacaaagatgagatttttaatgagtttgggagcatgtaacacactttgaagaacgaaaggaggataaggttgggataaattagtgctaccgtgaccaacaactggaattaaatgaccactaccaacaacaatgttatgatttttattgcttgaattgaaataagacgagagaatacctacatccgccatcatgtgagatgtggcacagtgccattgcgtgttctggattcacgtgcggaacaatgaaaaacatagacaaccaaaaatacgtaaatccaagtaagaatggtccctttgataaaggatttgtatgggt

SEQ ID NO: 85987 - DNA, 975 bp, Cannabis sativa
gtaggccctgaggtgggtccaaggtccaggtttgggtcttgggttaggtcccaaatctcgatcgaagttctgaggcccaagttttggtcccggtttgtgggcccaattcccgagtctgggtcccctatctatgtttaagtcctaggtcccaatcaggggcaaactacgtgtttcagttcgggttcaagtctcaagtccaggtatgagtctagatcctagtttgggttcgggtccgagtttgggtcccactgccagtgttggtccgagtctggttgttaggtcctaggtgcgaccctagtttttgggtttgggtcagggtctgggtctgggtccgggtctgggtctgggtccaggtcccggtcttggtttaggtcccaagtcaaaggtcctagaccgagtccaagtctcggtatgggttctggtctgagtttgggtttaggtttgggttctgctactgtcccaggtttgggttctagtcccatacctggtccaattccaattctgggttcgggatcgtgtctagatcccagtctggatccaggtcgtgctctgggtcctagattcaaacacagactacgggtcaggtcgaagcccgaggtccagatttagatctcggtcttgttccaattctggtcctgggtcttgggccaagtcctttgtttgggtttgggtctgggttcgaggctgtgtctcggtatttaggtcctgagttccattccaaggttgggtcccatgtctcaagtttgtggtcaagtttttggtctcggtccggttttggggcccagttttaggatcagttttagggcccaggtccaccatataggcttggatcctaggtcccgatctagctccatgttcaggtctggatccgagaactcgagtctaggtcccagtacgtattcaggtttgagtctaggtctgggtccccgtctaagtccaggtcccggttcaggtccgagtcgggtaaccgatccg

SEQ ID NO: 85988 - DNA, 701 bp, Cannabis sativa
cgatccttcggtggtctgcctcttctcttcggggtagggaattccagggatgtggccggtggctttcttgtgctcctttgagttcggccagtcgaaccattttcagtcttgatccccggtgagaattgggtcggaacagaggggtcattgagcatttctcgctccacctgggacgaagaggcctccatatcagctggtagaatattctcattgaaagcattatctcttgagttgggtattttcgagttcgtatgtgaagtagcagagttttttggaggtgtaaagatcaaaccatcagatgcttttcttttccgtgggccttggaggtgttcttgaactctgaattcttcaatatcaagtattgggctaaggagattgggctctctaaaatatttgtccacagttagtgatcccattaaaagctctctagctttaggatcagcccaacacttagaagtgggccaatccactagttgggcttgggtaccaaggagtgggttatagtaaggcttagttgggcttttaggtggggccccgttggtgctggtgttgaaagcctcctctccttcattttggtgtgtttcatttgaattcaacttccttgtccctaaatggctagattccaagccatgaatttcttcatccccatctgccccctccaaaatgggattttcagtttctgtcacaatcggcctctcttc

SEQ ID NO: 85989 - DNA, 514 bp, Cannabis sativa
gttatgtttttgcaactttcccaggtacgcattaagtgtcaagtcaatagttatgtggtagttcttgattggtttaggtcattaaatttttattttttattttaaaattaatttaaatataccaattagaaaatgcacatggattatgaccatggtcaagtacttacaaaagatctaaaaatataacttaaatattattgctgttaaaaattaaatttaaatatttatctacaactaaaaattaaacttatgtatttacactctaatataaattgaaaaggtaccaaaactgccttttgtaatataaattgtccattgatttttatttaggctttaatttttagcattgttattgggcattataaattattgaacatcatactgatgtgaagtgttaggaatagttaatatttttttatattatttattaaattaaaatatgtatatccaatataaaaagagagaaaaatactaaaagatattaataatctaattaagtattagattttatata

SEQ ID NO: 85990 - DNA, 751 bp, Cannabis sativa
gcaaacttggtctgcatattctttatcaaactcttttggaatctccatgtagactttctcctcaagttctccatgcaagaaatcagttccaacatccatttggtcaacttctaggctgaatttagcggctttggccatcatggccctaattgagacttgtttgaccactagtgagaatatctcattcaaatttacaccttctttctgtgtaaaaccctttgcaactaaccttgctttgaatctgatgggttcagcgccaagaattccttcgttgtgcttgaaaatccacttgcatcctattaattttcacccctctagttttttttgaccattatcaaggtcttgttcttcactagagagaccttttcctcatctatagcctgtaaccaagttgttccatctttcccattaactgcttcttgatagctggttggttcagagatatttatttcctttgctacagtcaatgcataagcaataaaatcagcataactaagcctgtttggtggctagctctctcttctttctttgtcccttgctattcggtagctgcttagatcaccttgaccattctcattctcaattatgtcttctaactgtgaagagttgtcatgtgattggtccacctcaatcttcattccttcatgcagtgttgtttgaataatttcaggaaagaccttgcaaagtctcttaattaacaaataaaccctaaatcctattttcttctcaaataagccattgcttagtgaaa

SEQ ID NO: 85991 - DNA, 820 bp, Cannabis sativa
actttgtttcagggccggccctgcgtacatgaatatgaaaaaaaattagactaaaaagttttctggattttaaggtacatcagtacatctcttttaaggggtgtattgtagaatcacccaaatatataggtgagtgtattataggcattatagaattttcctcaaataaatttccaatgaacataaataaataaataaataaataaaatagaagagtaagaaaaaaatagaggagagagggaaagtggaatttgagacgatcttccgcacacagaaaacagactctgcgtaacgtaacggctcctttcatccatccatggggttttggggtaatctctctcccactatatcatctggattatttgaagtttgatggccgagaaaacaagagaaatttcaacaacaataattagagtttacgactcttacactttctcgctgttttggccttcaaaaaacctactaccagagacatttctagccctttttttttggtggagacatgtttgggcttgttactgtcaaataagttcactcgtaaaatacttgcattgtttcattttgataaaatgtggaagtgctatttttatattgcaagttcttatactgatcttctcgattttagttctgacttggtttttattatttttgtgggcttaattcatgttatccttcagtatcatttgttattggatctgaattttgtccaaaactgttaaatttaagatttttgtatttggtgaataagagtggtttgttaagttacagtgcagagagtgtttttactaaattcattcaaattggaacttttggggggggg

SEQ ID NO: 85992 - DNA, 828 bp, Cannabis sativa
  modified_base (48)..(54): a, c, t, g, unknown or other
  modified_base (516)..(531): a, c, t, g, unknown or other
tctaccataatcccatctttcccgacaatatgtcctagaaaagatacnnnnnnnagccaaaactcacactttttgaattttgcatagagtttatgatctatgagcagttgcagaaccatacaaagatgctgctcatgttctgcttcttaccgagagtacacaaggatatcataaataaatacaattacaaagttattgaggaaatccttgaataacctattcatgagatccataaaggctgtcggagcatttgtcaatccgaacgacataacctagaactcataatggccatacctagttcgaaaagttgtcttagaaatatcttcttcccagattctcaattgatgatagccagatatcatatcaatcttggagaatactgtcttaacctttagttgatcaaacagatcgtcaattctaggcaaagggtacttgattttaattgttagattgttcagctcccagtagtcaatacacatagaaagagtcccatccttcttctttacgaacaaaacnnnnnnnnnnnnnnnngacacactaggtcgggtgaaccctagatccagcatcccttggagttgtatcttcaattctttcaattctgcatgagccatacggtagggtgcctttgaaataggttcttccccaggtatctaatcaataatgaaatttatctcccattgtggtggtagtcctggaaattcctcaagaaacatatctaggaattccttaaccactttgacctcctcaggtccaagtaacacaggctttccagaatcaattacaaccgctaaaaatcctacacatccactgtgtagtaaatccttagcc

SEQ ID NO: 85993 - DNA, 804 bp, Cannabis sativa
ttataaaatacgggcgttacagtgcagaagccattcgtagtgcagaggtgtttgtttcttctttcggttcagtggtgcaagattgcaagaagatccttgagagtttgtttaatgtttcgcttttgtttgttaagcgttctgcgaattgtgctgcgcactttgttgcccggcactctatttctttagctgaacgtatgttttctattaatagtgttcctacggaattgatgtctattcttacgagcgattgctcgatttaataaagaacactttttcaaaaaaaaaaaaaaaatacccttatagtaaccaaaagagtaagtaattaccataaaagaataaccagataacttatgctgtttttttttccatatcttttaacttctttctaaaaatttcctataaaatagcaatggaattaatatttaaaaagattataatatttcattattagaaataatatatatgatggatgatgagttgatcagacctttgcattgcttttgtaagaagctcaagctcatcaatagtaccatatgcatcataaatatcatcagtgattgaggctaatgcaatgactttggttagaagttttcttgctcgagagtatttgggttcataatatacacccaatatccaaaaatactgttccaccatcctatctcttgcaaaaggaaatttctttgcaaactcatgctctttccaccacctaataattaattaacaacaatctaattaaattgataacaaaaagtacaaaagtaatgatatcctgaatcatttacaaattccacgcacaattatata

SEQ ID NO: 85994 - DNA, 1205 bp, Cannabis sativa
ctcttggaaacttttgtgtaaaagaaagacagtggcggtatggggtttcgctctttcatgcattttaataaagcaatgcttgcaaagcaagcttggagactccttaaacaaccagactccttacttgcaaaggtgctgaagagtagatactacccgaataacgatttccttcaagctaacgttggtcactccccctctttaacttggcaaggcatccattggggtagaagccttcttattgctggtttacgttggaaaattggagaaggatgtaggataaattgtgctgatgacccgtggattccaggacattccacttttcgaccataccacttctccagaccacctgatacgactgtctcaaacttaattacagaagaaaggcaatgggatttagcacttctaaaccaatggttttcctctcttgatgtagatcgtatcttaactattccgctgagttttttccgttatgaagatacccttgcttggaacccctgctcctctggaatatattcggtccaaacagcctatcacctagctgcttctcttgcagaaaccgatgacagctcaagttcttcagcatctgcttcatggtggaacttcttattgtcactatccttgccacaaaagattaagattttcatttggcgggccttcaacgatgctctccatgttgcaacagcccttgtaaggcgcatgattatcacagattcaacttgttccatctttcaacaagcttgggaaactactgggcacgcacttttcagttgtaagtatgctcgatcagtttggcgacatcttgatattactcatgattggaatactgctcggcttatgcacaaaggagattatttggtgcacttgtcttcactgtacactaaaattgagatggaaaaactttgttgtggactttgggcaatctggactgaacggaaccgtgtgattcatggtcacaaagccaaaccagcaaaagaccttgcattttttgcacaaaactactggtataactacactgctgcccaactgaagcgctcttctgctgcaccagatcccaacccgcttgttgcagctactgctgcttctttgccacaaatttctcctgctgcaccattgatgccgtggactcctcctccacttggaatgctgaagatgaatgtcgacgcggtagtagatagctcacaaaaaattactggtattggtgcttt

SEQ ID NO: 85995 - DNA, 905 bp, Cannabis sativa
atcaaggctgaagatcagagaccggagggtttgttgcagcccttaaccctacctgagtggaagtgggaagatattacgatggactttgtggttgggttacctagaatcgtgggtctatttgattcaatttgggttgcggtagatcgatttacgaagtctgctcattttctaccacttaagataaccttctcagtggatcaatatggggatttgtacgttaaagagattgtaagattgcatggtgtgccgaagtccatagtttcggatagagatccgaagtttacttcaaaattttggcagagtttacaacgggctatgggtaccaagctaaaatttagtacagctttccatcctcaaacaaatggatagtccgaaaggacgattcggagactggaagatatgttacgagcctgtgttatagattctgaaggctgctggagtaagtacctgccgttgatagaattttcgtacaataacagttatcagagtacgatagggatggctccatatgaactgttatataggaaaaagtgtagatctcccattcactgggatgagacaggggagaggaaatatctaggtccggaatttgtgcaacagactaatgaagcaattgagaagattaaagccagaatgcttggttcttagagcaggaaaaagagttatgtagatccgaaatgcagagatatagaatttcaagtaagggatcaggtgttgctacgggtgtctcctatgaaggggatcaaacgttttgggaacagaggcaagttatgccctagatttacatgaccttttaagattctcaagaaggttggacaagtggcatatcgattagctttgcctccatctctttcagcagttcacaatgtattccatgtcttgatgttgagaaaatatgtttcaga

SEQ ID NO: 85996 - DNA, 7216 bp, Cannabis sativa
taatagtttcacatttttcttcatataaaggaggttcaaattctaatccatttcttataagaaaaaaaaagaaaaaaagtgaaattgataaaaaaaaaataataaatttcaaaaaggaggtttcatgttccaatctcccctctcccttattacaaaaaattaataaataatataacttctattgaaaatctatttaaaataaaatgattattatttgttgtattaactgaattttgatagaatcatatataaatagataaattttttctctcatctataaaaaaaaaaatatcaataattttggtccttctatattgacttgcaaaaatattaaattattacttttgaagacaaacattataataatgtctttttcttaaattttacactttagataaatttgctacttcaaagaccttatacattatttattttataaaattaattaagtattttatgtattaattatttctctcttaaaaatatctaaagtatttatttcatccaaaatatttatttctatataatatatattttgtaaggactatttccatatttttcaataaaatacaatttatgtattttaaaaaaaaaaaaaaagatttttgatagtaataatataatctttattttagttgataaaaatataatgaaataactatccttaaagaaaatataattaataatagtcaaagtcacatatattagttacttgtatatatcattttgtttttttaaaatacttagtctacttataaatttttgacagacagattagaattttgttttagaaaatactaaaaaaaaatattgaagatcaaaacaagaatcaacatgttacaaatttttaaaaaaatatttaaattaagattcacgtgcgaagcacggagacctcaactagtaattatataaatattagagcaatggcctcattcattctcaaaggcttggcctcacattgagtcgagacgctagcttctgaccaagagacttgtccgcctacaaacaaacccatattttattcaaattaataaataatattagaatctttatcacccactataacatcatgttctattcaaattaatatatcttagataaagaaaagataaaaatttggactaacctgagaccagtatgagatccaaatgctgcgaatttcatgagtgacacgcgggtcagataatgcatcaatccatcgtgtgatgaatcgttcttttctgaaaacatcatggtgagaaaacaagtcaagatagtggctacaataatatgagaaacattaattatcctttgcaacgaatataggaggataagtacctatctggtgtaaaggatcggtatctttctccaggttgcttgaagttgttctccttttgaataatgcactaggctcgcaatataaataaacacattatggcaaaaaagaaggcaattacattccttaaagcaaatatgttaaaatttgtgctaaaataaatggacttttaaggatagttactttactatcaaatacaaaggggaaaaatacatgaataatttattacaaatatatactgaccctttctcgctttccagtgtagatggcagcaggggtagggtacctctcagcatgaccaatatgatcatatcttgaaggaaagtaattgacctgaaagtatcacaccaatggccattagatgtcaaagaagtgtgtaaggaaattgaacaagctatacatatatacacaacatagaggaagcaaatcaagtacctcctcgtctctgtgcataatattcatgaaaccctcatgatgattgttgtgatgagcacacttgggggcgttaacagggagttgaagatagtttggtccaagacgatgcctctgagtgtcagagtaggagaagatacgagtttgaagcaacttgtcatcggaatagtagacaccaggtacaacaatgcctgggcaaaaggcaagttgttcgttctccgcaaagaaattatcaatgtttttgtttaggaccatgcgcccaactggttgcaagggcacaatatcctcaggccaagtttttgttacatcaagtgggtcaaattcatatttgtcctcatgatcaggatcaattatttggatgaaaagtttccactcggggtagtttccagcaacaattgaatcatacagatcttgggtagcatgactatggttagaccctccaaccttaatagcttcatcttccaacaaagacttgactccacaggtgggtctccagtgaaatttcacatagtgagctttcccaaccttattgataagagtataggtgttaacaccggagccatccatatgcctataatcttgtggaatacctatatcatcaaatagaaaggtgaacatgtgcaaactttcaggatgatgagagaaaaagtcaaggaccctccaattctcctggatgtgagatttagggttgggtttcaaagcatgaaccatgtctgggaatttcattccatctcggataaaaaagacaggaaaattatttccaacgagatcaaaattaccctgtgtcaaataatggagtcatcacatgaacaaggaaatataaaaccttaatcaataggtaagaataagctatgtaaagacattatgtgagagctacacaagattaagctccttatatttaaagcacaagaaccaccttgagctaccataagaaacaaccttacacacattatgatgaggtctaattttaagacatgtttggctattcaatatgagagaaagaaaaaaatagtacaatcctcacctctctagtgtaaaacttcacagcaaaacctcgaggatcccttaaggtttcagggctaccgcgctcatggataacagtggagaaacgagcaattataggtgtctgcactccaggacctcgaagaaaatcggcacaggtaagttttgaaatatcatgggtggtttcaaagaaaccctttgcactagctccccttgcatggaccacacgttctgggatgcgctctctatcaaagtttgctagtttctccactagatggtagtcctcaaggagaattggacctgttgaaaaagatgcaatattaagaaacaattaaatacaaaatactcaaagctatagagacttttacaaaatattcaagtggtgatgtcctatgtttataacccataaacaaatatttggtttaaaaataatcaagaaaaaatatacaaccacaaaaaggacttttttttcggtcaacttcgttggttacacaattgacctttgtgaaattgacccgtggattgtaaacttacagaattgtacagtaaattgcaccattttttgcattgacgctaactagctcaatgatgcaatgatcttctagccaagcaaaggtcaactagctcataaccctggaagtggcctctgtgcatggtttggacaccatgccaaatagggcgtcgtactcccactccacccttacttccaaagggtggctaattagtacaagatctatctaacacagatcaactaaaaggggttaaaatatttatctacactgtaggtattgtatgcacaacaagggtaggggagccatctctccacgacatcaactggttttttaacctcaatcgaatccaacatacataatcaacatttttttttactaagtctttctatttctttgcagctatgtcagccaagatctcctctgcatgaagaagaggaaagaagagggtacatccgagcatgagtctcccgctaaagtcccatggcatgaggaaattactcctctatctaaaggatgcttgcccttagctcaacctcctgctccttcatcttagaggaggaggttgtggttctggacagtctggcttcctcttctcccatccgaacatcatctaagcagacatctagctctttcttgttggttgctccttcaatgtcagcccgataatcttctgatgcacctgtccctctctactctagagccaaaaaggctaaggaggtcctatgagtctaccaggacagagtcatgtaccacaacaatgagtaattgtaagaggctaacaaccaatcattcgatgtcttggtcagaggattgctgagggagtttaccaaggtaaaaatttcctaattctttgaattctaatcctcatataccaaatatttatcttcttacttaagccgtttattttttaggtgaacttgatacttggtcattgctactacagggctaagacctatgttgccaaggccaagaattcatccttcgagttggagaaaaccaaagaataggtcgagatgaaggaggccaaacttgcaaaggtgaacaagcaactctttgaggcaaaccaaaagatagatgacctagagaagaagattgttgacactccttttgttgcgaaattagaggctggcctagagaaggatgaaaaaagagtccaagagcttattgatgagagagaggatcttcggcgacttatcctcaatcattaggagaaaagtagagatttgactacttcttctcaagaattagccgatgctttggaggatgaaaagaaggctcgcatagatgataacgagaagtacacgtctatcaacattgaactcttctatgagttctagaaggccaatcacaaaggtgacttctctttcatactgaggaggaacatgccgacctactggagtactgtgaaaaggaaaaagccaaagaggaggcgaggaaggttggagtaaataccgatgaggctgctggtgaagtcgttggtgggaacattgagcaaactgaaataaacgacctaaacttttctatctacgagcaagataatgtctcactagtcgagtaccccaaatcatgtgactccattggacgtctgaagttgtctcaccttatctttttttgacatgatacaatttagccgaccaagtgactttaaaaattagttttatattttttatacaaacacatggctggtcagcaacttttaatcccaaaagttaaccttttattatctaataaaacctttaatttttgcacagtacataattcttagttttttacttaagtatattcccctgtcttctttcctatgttgtatgggtgtaggtgtcccccaagtgactgagtagatttaaactcttggtcacttacaaattacccagagtataccatagtagtttgttcagactttgttcctgggcagacctatttctacacatgttagacggtttcatgacttaaaataaatcactaaatttttccaagcaatcatataaatagtttacacaactgtaaggataaaaaatcattctttttaagtgataggtttgatcactgattttatcttaaatttcatatggaccttcccattttggtcctaagacccccacttctggctcctgagaggctggaaatagctttcttaagaccaaatcaccaatttcaaatctctgactcttgactttagagttgaagtttttggcaatcttgccttggtacatttggagtttgacttgtaacttctgtcaaagttcttcaatcagatttggggattcttgaagtaaagaatgattttgagtggggtcataagtttctcttctatgagaagggtacaatttttttgactgggattattatattgcatctattggtcgtacggagtgtgacctgtttaggtccttttagttattctgtatgcccaaagaaatcttggatgttcttcctaccaatgagtcgtgcaaacctaaagcttctttctcaaggttgttttcaagatcttactgacaacctccacttgtctatttttttgaggtctgtccatagttgaaaagcttctaatgattccatgcttgacacaaaattggttaatcgatcactgttgaattgctttccattatcagacactattttttgtggaagtttgtgtcgacacacgatgttttttaatacgaagtccaaagccttcctggaagttactacggtcatgggttcaatttccacccatttagggaaatagtcaacagctaaaatgacaaatttgactcctcattttgttgtttgatatgatcccacaaaacctattccctaaacagcaaagggccaaagactgttcataggggttatctcttttggtggagctcttgggaccttggaataacactggcagtgttcacatttgcggatgtattcagtgcaatccttcttcatagttggccaaaaattttcatggacagactgggtccaaatgtgtgatctttgcaggatccttctagttgtatcgtccatgattacatacctagtggcttgatactatatcttttgcaaagctgctatgtcttttggggagcatcctaaattccaaatatttcaagattgacgccatctaggaagtttagtgatcaataaccttcaccttagtatttttgtgcttagagcagatagatgggcgacagggacaagttcatatttctctatgtctagatctgttgccaatttagctagcatgtttgtgaatgcatttttatccctggggatttgcttgattgaatagtgcttaaaatattataatatctccctagacttttctacgtaactagccattcttcccctttcatctggtattctctagatacttggttaacgactaactgtgaatcactatacagttcaatttcttggtgccaacttctttagctaattgtaagccaatgatcatcacttaatgctcaacctcattattttaagcttcaaattcaaaccagagtgcactttggagttgaagttgttgaggagagattagaattattttggctccagaacctttctcatttgacgctctatttacataaatcttctaaatttatagctctggggtggatgtttcaggatcattgttcatccctgtgcattccacaatgaaatctattaaggattaacctttaattaagattcgtggctgatactaaatatcgaattcgcttagctccctttaattgaaatctattaaggattgacctttattagtatttttttattaatattaattatattcataatattacagttgatattttattatattaaaagatatagtttgtaaattttgaatgttgaatgcatgataagaagtttttcgtttatgtcatttatgtttttttttttttgagaaatttcaatgttattataactggtaatcatttacaataacagagaaaatagaatttgggatttcacccatccaaca

SEQ ID NO: 85997 - DNA, 594 bp, Cannabis sativa
attatttgggtctactctttggagtcccaccaagcgactcagtcctttcaagataaactttcattaataggttagtggataaatactgctagcaacattttgataccgagtatataattgctaaaagttttttctttgatttttttcttcttttttttttccttgaaagaaaatgtccatatcttatggctaataaatttattggttgctggatatcaataatctcaaaagtattatttctgctataggttattttcttttactaattacataacctcgatgcttacaaagagacaacaaatttaaccaaacatagatgaagaaggaagcctccaaaacacaaatgaacttttctttttcttctttaattcaataaaatagtatgccacccaactcccctaactttgcaaatcaagtattggctatgtagttagttttgctgctgaatattaacacggttgtggggttggggagtcagtagcttggcttataccgcgtgtacctaaatttggttggcatttaaactgagtttttcaatagtatatttcttgacataattcatacaaacagaaagaagggatggaaaatcaccaa

SEQ ID NO: 85998 - DNA, 677 bp, Cannabis sativa
cacatccatttggtggtccatttctagatcatacttaacaccaccttattagtcatcatcatcatgattcttatggatgtttgtctaaccactggagagaaggtgtcactgaaatcaacaccttctctttgattaaaccccttagccactaatctggctttgaatctaacttccgcacctggcaaaccttcctttacttttaaaatccatttgcagctaattaacttctctcctggtggccttgtgactgttttccatgttttattcttttacagggaactcattcttcatcaattgcagcaagccatttcttcttattctttgagttgacaacttcttgaaatgtgcttggtactgtgttatcaacttcctctgctaatgcaagagcaaaggctgtgcaatcagcaaagccaaatctttttggtggctttatttgtcttctttctctgtctctaacaagttggtaatcttgtgaatcagctggtgatgtttcatcttcatttgcttccatatctgtttctgattgagtgtgatcttgtgtatccacctaatctgtattgtcatcttcttccctattactttgaatttccgaacctgtcacatcatgatcattttgtttattattgattacagcgtttttcacagccatctcatgttccttgaacacaacatctcta

SEQ ID NO: 85999 - DNA, 750 bp, Cannabis sativa
tattattagtaactataatacatgtaaaaaaacttaataaattaatatatataagtataatggtcggtttcagttttctcggtcggtttattacctaaaaaaactaaccattcaataacagttttaaccattagcggctttttgagttttcagtttcgtcggtttcagttccaatggttttcggtaggtcgatttgaacaggtttttcaattttttagattttaagctcacccctagtaagtgttattagaaaaataataaataataaataaaaatatacatgtagtgacacacagatacatatagtgactcgtaatgagagagtataaaatattttagtgacctacgctgaagggtaactaattattacctttccggacactcacattagtgacctgcattgaagggtcactaaaaatttttagagtccttaaaagtgggtcactgaatcccatatttgtagtagtgcctatttccaagggctcagatttgtagttttctcctcgagtttgcttaaatcttcattatttctgataatagaaaaaatacccagagcactttttgagaacttgattggaaatagcccaagttgacaatatgccaacctgggagttaggctcagtgccaagtgtcaatctaggcgttgggtcccagttatggcccttccaaagtttcgtttggtccttaaaaatagttgaatcttactgctttctaaaaatggataggatgctcaaaagagttctcaaaaaa

SEQ ID NO: 86000 - DNA, 520 bp, Cannabis sativa
ttttgtgacaatagtagtactccacttcccaccaagagcgtgaatgggcgcgattgtttcttctgtcatcatatcttcctcgtgatgtactcatatcacgacttgattttgacctcgtcacaagtgcttgatcagtatgagacatactacatggttgcttgatactacctatctccaaaagagtagttgacatctcatctactgttaacgtagctttccaaccaaaaatatattcactagtgtctcatatgattttggtaaagaagccaacaaaataataactttatcttcttcatcaattttaacatctacacttaataattgagttatgcacttattaaatttatgtatatgatccctagcatcatcccttgtaatcattttcaacttatataattatttcttcaaatataatctatctgttagagattttgacttataaaatttttctaactttttcaataacttagacagacatgtttcattcaatacactatagtttaatttaggtgccgaattt

SEQ ID NO: 86001 - DNA, 573 bp, Cannabis sativa
gtaattaaaatcacataaaaaatataaatattgtccataccttataaaagatttttataaataaactgtcaatttatattttccatgaaataattctttaacaaaatgtaaaatttaaatttttatttaataaaacaaaatgttcaaccaataaattttgctcaacacaaactctaaaatggtatatatttatcctagatttaggtataaaaaaatgttaatggtgaatttctataaaaagtagtataaatcaagaaaaatattactacaagagatgacataccactattagaatattttaatactttgtctcatatattttaatttaataaaattataatggctaatcaattataaagtgttatatcagtaatcaaacaaaaaaaaaaactttgaaaaacctatttttgccattaatttttttttttacaagcgatgttttcttttttttttgaaggagaaaggtaaactttattagaatgaactttcaaccattacaatagataaaagatcagcaggagcattactctcactgaaaatacgatctgaatacaaacaaaagctacgagcaag

SEQ ID NO: 86002 - DNA, 1132 bp, Cannabis sativa
aaattctaaaatgaaaaattcactgaaacttaaataaaactaatatttacgtgactcgacactaccatattcaatttatcaacgaaaaaatggacaacttaattatatgcggactcgattagaatgaaaagtgtataatataaaaattacactattgtctctgatgaagcaaaggaagattaaaatacctatccatgagtatcattatttttcttatctataatttttagacagatgttatcttcaattatcaacaatttagagtttatttttagattaacttaagacgatatttaaattatcaagcttttttaaatactaatatattgcatctgctatgttttttaattgttaaaattataaattatattatttagatatacataataataatttcacctaataattaataatatttttttttattttttctttaatttttaattatatcacttttaaataaagtattttttacttaacataaattttagtataggtgtggcacgtaacttttgctagtctactttaagatttaaagtaggatcaagtatgttatgtatttgaagaaataaataaataaaataaatgaacattctataattatatatgtataaaaaacaaggtcttcaattaatgtattttaattttaaaattttaaatgaggtgtcaacctttaattgggtacataatatgagataaatttttgacagggatcttcgttcgtaaagttgcgtcatgtatatatagtagtttagttaattaaaattaagtttgactttgtttaagcgtcagtgataacaaagctgtaattgaaacaaaagttgttataactacttcgggctagctcaagtggctataggtgagtgtttgagtgttggaggtcctgggttcgaattccaagtaaaacatgttgtaatatgtaaacgcttaaatcaaaaaaaaaaaataataaaaaaaaaaataactaaagttgttactatagtatattatttcaatatataagttaagtcatgaatctcatggaaattgttaagtgcttctgttataattatttcagattaccgtaatgtaaatttctgacaacattcttcgatttctctcgatcgatttagttttaccaaattgaatatta

SEQ ID NO: 86003 - DNA, 608 bp, Cannabis sativa
  modified_base (43)..(56): a, c, t, g, unknown or other
aatataaattatttttttaaaaaataagagatttaataattannnnnnnnnnnnnnattagtttattttaattttttaattttttttaatatgtaataaataagtagatatggttttagtgcaaaaaaaatattagtcttttaatcaaaacagctttttctaaaaattaggttggagcagtttcagcttttagctatagcttctccaaaaattcttcaaaaagttagtttttgactgtttaccaaatatattgttatcatagattttttctaaaaaacagcttttaacttttttaaaaactctgtcaaatgagccctaagtattacaatttaaaaacaaaatatatatttagctaccacttaatatataaacaattaagcatcctaagaaaatataaattcaaatgctattaggtacgttgaagaaaaaaaaatataaataagaaaataaatttaatgtataaaatggaaagtaaatacaacatattgacaaatatataggtgcagtaatatagttgtggaaattgatcctctaaaccaacttattatccaactcatttaaaccaactaactaaactaactttcggttatgttagttagttagttggt

SEQ ID NO: 86004 - DNA, 641 bp, Cannabis sativa
ggagaaattccagaacaacttacaagtctcgatgcgttgcaatcattgaatttgtcgggaaattatttgagtgggagcattcctaaaaagattgacagtatgacctacctagaatctcttgatctctcaaggaatcatttgtctggtcacattcctacaagtttgtcaagtttatcatttttgagtcacttgaacttgtcgtacaacaacttgtctggaaaaattccaataggcacgcaactgcaaagcatggatgcttctagctttatgggaaacaaattgtgtggaccgccgctcctcaaaaagtgtattgaagatcctaacacaacgcattcaaatgcaagtaatgaagatggacaaagggaagacgatgaatattggtttcgattgggcataggaatggggtttggagtgagctttgtgggtgtcattgttccgttagtggtatgcggattttggaggcgtgcttacttttggtttttcgaagagtatttgtggaacaagtttgtggactattttatcaaaataaagtacatgttttgaaagtatttgtgttagtcaccttttaaagtcctttttttaataagaaacgtgttagttttgtcttgttttatttttaagtttgtttcatgtattatcat

SEQ ID NO: 86005 - DNA, 4259 bp, Cannabis sativa
ctaactgatccaggtcaatactcgatgtttcatttttccactatatgttgatactgttttgactcacataaacaagaattaagattgatgaactcatcaaagttaagaagctaaagaaaaccgtgataattcaatcttctttagggtaatcattatgataaataatctagttctgttttgctgtttactcattgttatcaaaacagaatcttagttttggtagtgatacccagttagataatcattgttttgattttcatgacattaggttcaaataatggcccacacagaaaatgtaacctcaacttttatgagcaaagaactcaggtacatgaatcactgcaagttggtttattctcacagtactctcaaattactaagtacccttttgaaatctaatttattttgaattcacagatgactttgtggtctatggccaagtctcctctcatgtatggaggagatgttagaaacctggatgaggccactctcaatctgattaccaaccctactctgctggagataaatcaatttagctcaaataatatggaggcatgataacttttctaaatcttggcttaccttgataaagatgaattctttcttgtagctatataagttattttgttgttgaatttacagtttccctatattactagtacaacaagctcaaaggagggagataagaataccaaaagaaaatgtttgtctgataaaactttagaagtacaagttttgggtcttactagctgtgcagacacaaaagcagttggttggtctgctgaagctgtagagcaagattctgaacagatatgttggaaactaaatttgggaaacaaacatcagacaccacccttttgcctatacaagagagaatcacgactaacatcgtaattgtgcttttcaattctcacttatgatgtctcgaatttcttgctggaatagaatatttctttaatactatcacggtaattttatgttcattgttattttagagatgaagacataactgacgaacaacaatatcaaggaaaacttcatttattagcaaaccctcgaacgggattttgtttgcatgcttctccaaaacgaaagatcacctcaaaagagtacaagaggggctcattctcgccttgcagaagggatgcaaatcaggtaaccatgttttcctatttttcattttagcatgaaaattggctgcatccaatatttgagtgtcacaccaatattctttgaacattttctgattcaaaatatacttttaacctgcaatgaaatcttgatagatgtgggaattgcatcaaaatggcaccctcacaaatagttattctggcctatgtgcgacagtgaagtctgacgaaggtgataaattttaaaactgaatgcctataataagtgtaattcaagtgaaaaagaatgcttgcctactttgatttaacactatctttggagagtataatctttaaatttattaacttacactattgctgatcattgaagcagctaaaagcaactcagccggagttcgctcttggattgcaactggaagaaaaggttagaccccttacctcccacccaactgaaaacctaagttagtgttattaatttctagtaaatacttgaacaagcttcataaatttagaaaaagacaagaagacttttactaagtttgagaaacaaaagaattaaaacttcttgcccagtaatagattgattctattaaactgaaatgcttgattttcgaaatcgaaatggaaacatgttttcatataacaagtcctttagtagtgttatttatgtgattgtttctaacaaagagtgatacctccataggagaagtgtatgttgcttttttcaacctgaacccagtgaagacagtaatatcagcgaagatgtcagacctggccaaggccctacctggtgccaatttgaatgatggttcatgcaagtacaaagaagtatggagtgggaaggactatggaatagcaaaccactcaatatcaatggctgtggaaactcatggtcctgcactctttgtcttgaactgtgttagttcactataaattttttatataaattcatatgcacatgttcttgatgaaatattttattgagttttattttcttactatatatatattttatgtggcaaagcaaaccgtaagtgaaaaatcaagagtggaaggaatatggtatattattgttttcatgaatagaataacgaaacagcccacatgtagggttattgtatatccatatatagaaattcctagtcttctcaaaagtagattataaactaaagacatttacaaactgttttataaaaacaacaatggaatatgcaatggaaacttgatcactgaagttgatcaagggtttatttatatagcctcaagatacagagtttgttacaaagtgagctaccttacatactcactcacaaactgtttaacaaaattccttactacttttgtaattagctaaccaaaacaatttgtaactaaactaattgattatataagatcagttattaacccccccttaaacaaaaacaaaagggagttgagattgactttaagtttgattttgagatagttgaaacgatcaatgaatagaagtttggtgagtgcgtctgctaattggtcgacagatggaacatagtgcacttatagttgctgagctaggagtgtttttttttttttcataagtgctgagctaggagttgatcacgaataaagtgcatatcgatttcaatgtgtttaaactatgcgtgaaatactgaattggcggcaagagcagtagctccttagttgtcaacccacagaataggagactcaagaaatgtgagctgtaactcagaaagaagagacaccagccacttcactttagcaacagcattggctaaggcacaaaattctgtgtaactataaagtggcgtttgattgggaggaatgagaataagaataagaatagaattggaatgaaataaactaaatttaaaatgcataaaaaaatcgataaaacaaatttttttttttttttttcttgttacattggaatggtctttttttttttaaaaaaaaaaaaaatagaatagtcattccaccaaaatggtggaaagaacattccattgaaatatcattccaatattttaaaatataactaaacaaaagaatagaataaaaattatttttttttctattccgttatatttcattatttccaatcaaatcaaacgccacttaagaatcttgagaaatccaatctcctgtactttatgctaattaaagctggtgctgcttttgtataaaaagtagtgattctaaaatagatacctcttatgattacactttatcataacttaagattctaaagatacccatttcaaaagaaaaggattctaaagataaaaaaaaaatgattgtatttaggggacttacaaatactattacaaaataactactaatttattataaaaaaaataatatacccaaattaattataatataattacatatagctaatttttcaaatcgaagacaaacattgcaatggataccaaaattagtgtgcctaagtatattgtgaaaagtattaaattttatatgctttttatgcatagtatattttaagataatacattattagtaggtagtatgatgttatattgttgtatgttgaaagaaaacagaaaaagaaaaagatggagaaagagaaagtggacacaatggatgaaaaatggaaatttgctgctcaactaaaacagttggccaaagatctttattaatatattgatttcattacagaggaatacaatcagagagaaatgcaatcaattaataactgaattaacaaacttgagtttgttatgtcagagtcggttggagctgacttgtgatagctagcattaatttgttattgatcttgttgttgtgttgctgatcttatttttgctgttctagtgttctaatatcccccctcaagtgatacgggtagacaccaaatgtcaacttgtttcttaaaaaagcaaaggatgatatgggcaaaaccttggtaaagatatcaacaacctgatgaattgtatcaacatagtgaacttcaagcattttggagaggactctgtcacgcacaaagtgcaagtctatttctatatgtttcgttttggcatgaaacacagaattggaggctaaggagctagctccgaggttatcactataagaatattttatttaaagaaattaatttctatttaaggaaat

SEQ ID NO: 86006 - DNA, 600 bp, Cannabis sativa
catctcatctattgttatcaccgtaactcatctgtagtcactaatattgtccttccgaaatctcaatctcaatcttaaatttcattctgaattttaaacattttctttacacacattttaaatatctaaaaatgactataaaattagtttcttaatcatatgccatcaaaaagaaaaattcaaatttattacttaatgtgtttaataattagtcttgattacttaatatttttttaatcatacatcatcaaatacaaatatgtcgatctttctttttaaatataaaattaactctaactttaattgagccatgtctcctttaatttgagcctagactctattgaaccttcttatattcttaatactattctaaattagaaagttgagttaactaaaaatatttaatacatacatatcattttgttacactatcaaatataaaatatatataaatacacatactacaaaattcattataaatagtaaattaacatttaaatcattagcctaaaactaataattttctaaaatttaactttgcattaataaaataagaaattttagatataattaatctaaattagttatttaaaataaaat

SEQ ID NO: 86007 - DNA, 532 bp, Cannabis sativa
agataattaacagaaaaaataactgattccaaatcggttagaataactaattaacaacctctaatagcccccctcaagatagagtgtagatattaattacacccatcttggaaactatggtagaaaaaggagtagggagtaaaggtttggtaaaaatatccgccaagttttgttgagaagagacatggagaagatgaatggagccttgctgaattttctctcggatgaagtggcagtcgatttcaacatgtttggtttggtgcgctcatgatacacgggattttcactgatgtgaattgcagccacgttgtcgcaataaagattagctggttgtttgtgggagacgccaaagtcattgagaagggcaaggagccatgtcaattctgaagtagcattagccattgcacgatattcagtttcagtcgacgagcgagaaaccacttgttgtttttttgatttccaggagacaagttacttcccaaggaaaatgcagcaacctgaaatggagcgacgagtatcttgacagctgccc

SEQ ID NO: 86008 - DNA, 1250 bp, Cannabis sativa
atataaagataatttgaaaaaactcaacatacttcaaaaaatatatatatatatatatatatatatatataccaaggatgaatccttacaacttggatcaattgactgttttttcttcttgatgtggaggatgtttcttctcagagtcagcacttaaaatctttagcagcatcttcaattgaatttttactgaagaattatattccatctgaacaaaaacacaaaaataaatcgaaactattttcatcatacaacaataatgaacagtatgaattcaaacaaaactagtttcctcacacaacaataataccgaatatgaaaacaaaacaaaaatgatatacaatgaaaataattgaaaccagtttcctcaatcaaccaaatgagaaaaaatactcacaaatataatcaaaatgacacacaatgcacaacaataatataaaaacaaaatataagtatgaaaatcagtttcaaacctagaaacaaaataataaaaagaaacttaaaatcaaaaatatacaataagatcataaaatggagcaatcccattatagaacccttaaaacttgtgaaagcagtttcgaacctatgaaccctataaaactgatttcgacactaagaaaagtaataacaaaatataaatgctaaacaataaagttaaccaaaaccagtttcatcaggcaactaattgaaaaaataaagaaaaacccacacacacacacatacaaaaaaaaattattctcaaacataatcaaaacaacaaacattgtataacaataatataaaaataaaatgtaagtgtgaaaatcagtttcgaacctagaaacaaaataaataaaaagaaacttaaaatcaaaaatatacaataacatcataaaatggagctaccccattatagatcccttaaaacatgtgaaatcaattttgaacctgtgaacacggtgaaatcagtttcgaaccgttgaactcaatgaaaccagctttgaacatgttaaaccagtttgaaacttgttaaccctgtgaaatcagttttgaccctatgaaaaatcataccaaaacttgtgaaaccataacaaaacttgtgaactcatacaaaaccccaacaaaaattaaatgttaaaattccaattcatcaactacaattaaaaataagttaagaacaaatacaataaaagtcatatacaaataaaaatgacataatgaaacattgaaattagttacataaatcaatgaaattggtttctacataataa

SEQ ID NO: 86009 - DNA, 1161 bp, Cannabis sativa
ataagtaaatctgattatgttgaaatgagttttatttagggcataaaacccaacaggccgaccataaggccggccaaaagggtggtcggccaactcttgagtgggagttggtctgtcacttgatccccatttgagtgtcggggtcttcgtttgtctaggtgctgacttggccttcctttttagcgagctgtactgccacgtggtattggttctgtgcacataagcatgtcatgtcatgagaacaaaaattaggataacaatgtgcaatatttaagacaataacggagtctgtactgacaataacagagtctgtcaccgcctcatacttgaattttatatgagatatagatatatcgatagattatttttaactaatagtgttatttatagagattttaaaatatcatgtcaatgccttatacgtctcatttatatttatatatatatttaggactcttttactgtggggatttaaaaaaaatatcctatctgtagggatttgaaaataaaatgggtctcattgcattttgtgaatataaatgagggttcatggccactaaaatatggtgtattataagagattggaattgacttttaacatgggtcccactcatttaatgttatgtttaattgatgtaaaaaaacaatcatttttctttttttaaaaaaatatacaataaattaaaacactcatttttcttttaaaaaaaattaaaaattaattaaaaaacttttgacattttattacacttgtgccatttgaactaatcactttactttttttttagttgccacaactaaagtagtcatacataattatatatttattttaaaaatatcacatttcatattttaagtcacattatagtcttaaactttttttataattatattttttttatcgattttttaattatattacattaataaaaattataattttttcgtttctaaaatggtgcaactttttaattcaattgcaacatataataattagaagaataaatttttaatcgtcttaaaaaaattacactaaataaatattttgatcattattattaaatatttatatttaattatattactttattattataataataattaatcataacttagataataatatatctaaatgtaatgtttaaaaggcgattagtt

SEQ ID NO: 86010 - DNA, 592 bp, Cannabis sativa
gatcatatgatttgatgatgatgatgagtttttgtgtgattattcatatcactatttattatttgttattaattctacaacttattaattatatatcatatattagaaactactttacaatattattaattagtttttatgttattcatatttgcaccatttttataaaaggttatcagattataattttccttctataagtcaaaattgtatatacaattcaatttggagaaataaagaatgcataagagttgttaacaaggttgtgtaagtaactaaaaaatgaaaataaatgaataaataaaatcctagcaaataaaaagagtgataaaagactcatatcttgatggtctctatagctaattaattaaaaaaaaaactacatagaaacgatctcacaatgcaatctgaaaaaattaagagcatgatcatgatgatcatttctcatgtattgtgttctattatagcttaataacaattataataaatagatagaagaggaggagacacatgttgaagtgggagatatatgccacttacttcatattattagatgaccgatgatggcgacgaaggtaaggaatttgagtag

SEQ ID NO: 86011 - DNA, 954 bp, Cannabis sativa
ttttcatcttttgacccttggggacggggttactttgatggtttatacaagtatttttggtttactaatgactactattacagatacgtcatggtacggaattatttgcactacaagatcaaattagtgtttatgttttttaaagaagcactattatggtgcaagtacctattacagttatcaaaaaaatatcattttatttttatttttttaaaaaaatagaaaatgtgtatgatatttctagaaaaataaaaggtattataaaataaaaaagtattatgattaaactaaaattatagttaacaataaattttgagaattattatattttcttcttataaatagcactaattaaattaaatatttttcaataaaaatgatgttgtttattgtataacatccataaaaaaataataatatttaaacaactaaaaatatatataaccaaaataaaaactaagaatattataactaagtatatgtatattgtacataatattaacctatacaggggtaaaaatttcaaattgttatgcctttttccttaacaaaatgttaactataatatttctaaaatataattaaattgagctctctttttttttttttaaaaaaaaaatatattttttaaatagtggcaaaataaaattgaaaattgtaatattattcttttaggaaaaaaaaataaaaattttttgtaatgaaatttttgtgccacggtaaggatcttaaacgagagcctaacttgcctccacccttaggtcgacccttggtatcatatatatttatgtttagcgaacaagttagtaattataagaaaaataatactgtttaacaaaaaaattatttaaaatggtaatatttcgtaatatcatacacaaatctctgagaaattatcaagaaagtgtaacactttaaatatatggttagagtgtaattatttggttaaacaaa

SEQ ID NO: 86012 - DNA, 1941 bp, Cannabis sativa
ataaattttgaaataatttttaaataataatattagatgtaccaatataaatgtgttacctgtacaagagtgtagacataagtagtctatgttggcagttagctgtaaaatatagatgacaccttaaatttactaatatatagttcaatcatttggagggttttattttaccaccaaaatttaagcttggaagattaaatacaaatagattaataattgaaaatactaaaaaaaaatacctctttcaactttattacctaaataccactacacggttacctcaatatttttaccttctctctttattttattacatatataccacatgcacactctcccccatgcatcagacacgtgcatttcccccatctctcatcaatcaaccattaatcacttccctctcttttttttcttttttttttcctttgatttttcatttcttttcagttttttttttaataacttgtaacctccattgttgaacgtgcttaaccctgaacccacatccattttccctctcatttgtgttcttcaaaattttttcaactcccactaacccatcccataactgttttccctctttttttttgtttctcaatccgtatataaaatgggtgtgacacgttcttcatcatctccttcccctgttcaaaagaaaagctccaaaatgggtttgaaatcattagctaataaggccaagggaaaacgtcctattattgaggaggaagactctgatattgctcctccattaacgaagtgtgggcgagctcctcctaagaagaaatcaaaggtcgatgtccaagaaaaaatggctgaagatgttgttggaaaaagcggagaatgttggtggtgctattcgaactgaggtttgtttgcagtttctttttcgtttcccccttttttgtagatattcttgtattttccattttatcgatttggtgtttctagtttgtgatatattctagatttttcattttaaaattttctttggttttgtttggatttttagggctttaatttttcttgatcaattttatttgttcttttgtgggtttggcattttagtttgtttattcttacttttgtttcattttgttgtcttttttgttctgtttgtgttttccagttttttaaatatttttgaacttcagtttcattttaatgtctcttctcagtgtgctttagttttttcatagttttttaatagtttaatccttttatgtatgttttcttttcaaaatattattaggtatagttgtttgctgttcatttttaggtaacaatttgattaagatctttgtagtttatgttcgaagagttgtttatggttgtcagtttgttttcaattttttttatagttttattatagtttgtatacttgtttattttccatttatatttatattttccatgtttgttaaattgcaggtctgggagtacaaatttagtcccttcgatttttatagatccaaatgtgtttgtactagcaatttttctgttattgataatataaagaattaatactttatctatgaatttattgtctatgttccgtgacacctaatttggtcattttcttgatatacctgatttttttccacccccaagatgtacatagcctactgttgagggaagtgtaccagcccaatccaaaaaaaatttgggctaaggttgttggccgttggatacggttcagtgccgaggagttttatttgataactggcattgattattttggtgattacaacaaattgctgtttttccaagaatcaaaccagttgattgaggttttttccgtggtgtaaaaaccattgatcataaagctatggaggatgcttttttggggagaagatggggtctggacgagtctcttggtttgaaactgtctgagctgtattatatccaatattttcttcttagcaattctcctgataaagaagt

SEQ ID NO: 86013 - DNA, 1068 bp, Cannabis sativa
tttttaaactaagagcattccaatgcaagccactttaaaagttatcacaaaattccaggtcacttcaaaatataatattttattttatctctcttctacattattttttagctacttactactaaaaagtactcaaatacttaacaactctaaaattgctattatagtcccacacactataatttaatatattattcattttaataataaaaaatatcacaataatacattgaaattcatatattaataaaaataaatattacatgaaatttaaattacaccaaatttaaaaatagctcaaaatataacataataataattaaccaatccaatataattaaaattatttctaaatttagaccatgtgtgttccactaagtctgcctgaagattgcggtgaatgtttctatcacgaatttcggtatttctttgaagcatagtcgggaagtcggaaataggtccatggcatacttcaaccgttggggtattggtggagccttcatcgtaattaaaatcaaatgactcgtatatttctctttcatcttggatagtcatgttgtgcaatatgatacatgaatacataatatctttaagagcatctctttgctagaatcgagccgaacctcgtataatggcataacgagattgaagtactccaaatgcccgctcaacatctttgcgtacagcttcttgacattgggcgaataattttctcttctctccttgaggcaatgggatagttttaacaaatgtaccccatattgggtagataccatctgctagataacaccccttgttgtactgtgtgccatttatcataaactcaactcttggagcttgcccctgtaagatgtcagtgaataatggtgattgatttaaaacattgagatcattattggatcctgaaacaccaaaaatgcataccaaatccaaagatcttgtgacacgactgggtcgagcatgattgtcagtgcaccgtgatcacctcgtgtgaatttccctttccatgcaactcgacaatttttccatttccagtgtgttgacttcgcttttagccaacgacaatga

SEQ ID NO: 86014 - DNA, 1086 bp, Cannabis sativa
tttttcgattttatctaggtaactgttcatgaaacatgaataatccccacgtttcatgtttataacatgagaataaaataaaataattgctgaaaatcgtcttttgatcttatatggaagtggtcttttgttgctgaggtaacacattctaaggatggttcgcatatctttcaacgatattcaaggatagctggttgaattttacgagatgtccgttaatatgcttattctcgctgtagccttttcagggaaactcttagacttagaaagattttgaaataagttggactttgcttatttgcttagcatatgtgggtcaatgagttgtaagttcttattgccagtgcgtaatgcaagtgtgagattgctcgtaattaattatctctcagagacaattcatttattacttagttttccacaatttctgtgtccagctttccacgtgtcatatccatattcatggctcaaaatatgggcataataattgccccttaaaaagctctttagaaactgaaagagttttttaaacgatccaaactggacaatttatgcggactgtttgaatgtcacccaaccattgtcattgttattttgaaataccgattcatgaagcatggaggatcaagaaaggctcacttaatttcaatttcaaacttgctcattgtgggagagatgataatatcattgcccatagattagctaaagagtttttcattgagtaatgctttagttaaatatattcgatcgttcgtttactctcttaaatagagtccatatgttgataaatcaatccaccctgtgccaacctgtccaaacaagtaacagactttatatttacagtcaattaactaccaactaatttctctaacagtattccagctcagacacaaagacggttagaaatcgttacctcaattctctcgaccacaaatgtatgtaagcctgcctctatacccaaaagaaagggaggttgttttcaaagttggttcacctcgaaagagagagaaaaacacagtgtaaaagagaaagaaaaagatgaagtttttgagagaaaaatcagatacagagagttgggagaagagagat

SEQ ID NO: 86015 - DNA, 1035 bp, Cannabis sativa
atagctttgatataaaatataaataggagcacatgccattgaattgccattgtcgatctaaaaaatattatagaacatcaaaattagaaaaaaaaaaatcttcaaaaatgaataattgttaatgtcaagtaaatatataaaaatagaacatcaaaaattagaagaaaaaataatataataattaaaaactttaaaactatgagtggccacaaaacttaggtatggcacactatatatataagagctatgtaaagaatataaatagttttttttttttagtgaaagaataaaaataattttaatggttaataattgtaaaagttacacaaagaatataaatagtttttcggttataaatttttgctaaaaaatattcattataatgaataagtgtgtacatattttcattgttattaatacatattatgttttgtttaaaaaaagttaatatttgttttattattactaacaattgtaaaagatcaattaaatgagagaaaagaagaatagagagattaggaaaaactacctatacaaatagtgaaatgtgaaatgaaagaagtcaaggaatttatttttcaatgggagtttctttttctttttcttttttacttttttgaaaacaaattttttcaaaaatgaaaagtcactcaaattctttaattaaataatactaaaaattaacaaatttttttttttttaaaaaaaaaaagagaaagtagaaaagtggaaggaaagcttatagaaaatgtcatgtcatctactataataacacaattatataaatatatatcttattatataggtggtaagtaattattttagaatactataagcctttagtttaatttttttaatgatttcttttaatttagtatacatggtaattattttaatatattataacactttggttttatttcttttaattagaaagtattaatttagtattagttattagttacatactaatttttttaaaaaaaattagaaaaatagaaaaataggtactagaaaaagtaagaaggttatgca

SEQ ID NO: 86016 - DNA, 2520 bp, Cannabis sativa
gtttgtggtaaatgtttcatattcaaaaatggtcttataaagctattacatactttttgatttgcctataatattcttggtgactgagtcaactttttcctgcgtaacgagtatgacctcattctactagttcattagcttgataaaataatttctgcctattcttatgaatttgattttgtcatcagggacaaagacaagcggacattctgtactttttgttggcaaaaatatcaaagctattttatttttttctgttgttttaaaaaaaatatatgtttgaccaatattgtcatgtgagctttcttaaaaattcttgttatgtttcattatcttcttagacactatttttgctcttaagtgttgattggtgctttatgtatttcttgtgtgttgtcttgtttgttctttgcaaataaaatgggggcttagtttcaaaaaattcaagaaaaagggggtcataattttcgatcttttgggctattttttctcttattttttcatttatggaaacatgtttttattgcattttatttattgtgtttcctttattttttttttgtttagggatttgctttttttttttttgtagagttttaggaaacttttatttatttaattaattatttgttggtttcctttttggtggcattttcgaatatggttagtgtatttattttttagattttgtggggacatgttgtttcctttttccatttttggtaacctttgactattttttgaaatatttccttttggtttcctattttctatcctcatgtggtgaacaaggtaaggaagttactttccttttttgtttttttttcttttttctttttgatttttgggtaattatgttcaagtgttatatatgctcaactacccgcattcccacgattaccactattcactcctctctcaattttttcaaaagtctaaccttcttcaagtttgagagtgtgttcgctttctagggttttaaagaaaatggaaaaaataaaaaatggtcaaccttccaagaagccctctcgttgctcagcttctgcatctccgatcaccctagctatgccatcttgtgactagagtctctaggttgtcatctgctctgacgaacactgcgagaaagtcaaagacccaaactcgaaagtcgacttagaacctcatttctcctccaatcgttgcctctctgattgctactccaactcctaagcttggtgatcatgatgactctcattcatcggatcactcattgtcgaagttttcttcttcgaatggtgctacaaatatcgagaaagcaatagtgcccttgcccacagtgagttcttgaaccaggtctaaggtatccataccacaaaaacctgaagtggttctacccaaaagtgtctccaaagggaaataggtggtgtcttcattttcaaaggccaaaagtctcaaagaaaatcccccttccatttcttcatcgaattctgaacctgaagaagagaccgaagaggatcaaaaattagagggtatttctgattcaagtgaagagtttgtgcccaaagaacaaccctctgctgataattcttggtctgaaagtgaagagcctgaagctaaacctgtcagggcagaatcggttggtgttcctagcctactacaattccaaagaaggacaaaggaaaaagacccattgtctctccaagccctattcttcctgagaaaagaaagaggccctttggtattactcttgaaaacttcaagccccattctcattacttttgttacaaagataatgctagagacattaaattctatgagaatcgaaatgttactgttgagaaaaattttaatgtcattgctcataagccatttggggtttataacgtgttgaacgaaagacaatggatgggtacttagattggttttgatggctatgtggatcgaattgtgaaggagttttatcctaacatcaatgatgagtgcctcgatgaggactcttttatgtttggtaaagtctttgtcaagggacactagtattccttaactgtgaaggatgtggctgaagctctcaattgtcctatgggaattgggacaactaatgtggaatttgatcgtcaaaaggtgttcgggtatctcactgttcataatgatgtgaaactctccaacacaatgcatatgtctgaactcacctatcaccatgctgttctgatgaggtttgccctatcaaattggtttccttgctccaattcggtaaatgtttcaaatgaacttgccttctttttgtataaagtttctattggtgctaaaattgatttggcttacatgatttgggagcaaattgtctctcttagaaagggcaagaaacttagactcaatcttatttttcctcatttgatctataagattttttctaaccaagaggagttgattcttgagaataaaactattgaaaagcctgctattggaaccactttcaaagttctagagaaacctcctcaaggaaaatctgctaagaaaaaggctcggtttgcttcccctggt

SEQ ID NO: 86017 - DNA, 684 bp, Cannabis sativa
  modified_base (187)..(188): a, c, t, g, unknown or other
ggaagtagtgctagtgcactactactgctatttagcttatcattattcattattttgaggagtaaatatttgataacaattattattaacgatagcatgaaaagtatcaacatgactagggaagtgatttcttccatatatatttcttgactactatgtataaaatatacagtttaatttgttatanntaaagagatactttgataatatatatatatttatatatatatctaacaatgttgttatcgtatttataattaggggcggaaccacgttttgctcgtggccattgtccccatacctacattaaaagcaatctatatatgcatataagatatcgaaaccattccatatactagtttttgtctatctatttaatataagagattttcaccaaaaaaaaaaaatactggtaaaaatttataattaatttattgttagatagaattttttataaaaataccatctttttataaaacaatcataaaacacaaaatagaacaattaaaataacagtggaacaactaaaaaatatttgtggaacaacagtgaaaacttaacacaatataaaacttatacagtattttttaacaaaaaatctgctctacagtaaaaaaaaaagtaaaaaaaatttaaaatttcagcatatggtataaaaaccctttaataatagaatcatcatat

SEQ ID NO: 86018 - DNA, 1076 bp, Cannabis sativa
cggtttgtaatttttatcggttttttcggttcggtttgggcgggttattcggtttgggcggtttacaaatttttttgtacagccctaatggataccaatttaaacactccagccgaaaatatacaataaataataaaatatttttcttatttaaatatgccaaaaatagaattaacaatctcccactttgcactttgattgacaaaatattttatttggagaaaacatgcatcaagtgttagaaacaaaacaaaagagtatagaaaatactattcatgtatgaaagcactctaacacataaaataaaataactttttttatacggaaaaacttacaaaccacaaacaaagcaactttttaaacagaaagtgcacaaaccacaaacaagacaactccctctaaaaacaagggtccagagttgtaacacacaatccaaaaaataaatatcactctccctttttatctatcaagaagtcaaagataacaaaaaaaatgaacaaagtcataatagttcaatcacacataaataaaaagctagagttaaaaatggaccacttattcatcatcattggatcggaagaatttcatggtgtcgtccatcctcttgagaagtaaggcttgacttgtctccattcttcccaaacgtaagttgaattcagtcatttctatagaagcagaagtggaagcagatgcagtagcaggttcatcagtagcaccagggaaagcagaccgagcctttttcttagcaaattttcctcgaggaggtttctctggaactttgaaatcactaatactttgaaaagtaattatatttaaacttttttagcatgtaacacatgttttgtacttttttttacatgtaaattagaaaacaaatcgcgctttgcgtgcggttattttttattttatgataattaagttatattactatattataatatttatagattgttgtatcattatctcagttctctattttaaaaattaaaattgatagataagattgtttgaatattgtattttgatcaatatatgtctaaaaaaatatttttaagattgtatttgatcaaaatatt

SEQ ID NO: 86019 - DNA, 984 bp, Cannabis sativa
acaatactatcaactaagtattcatattcctaaatctctaaatcaaaagcagttttatttatctgattatcataggtacatataattgtcatgagacaaacatgtatttataaagttagggagaagacttagctacattactctagttggacttggcctactccaaaagcttcagttaaatagaaaaaactcacacgtctacttcaactatactttatacatacagatgataaactttattgatcactaataatatgagctaaaaacaaataactattcaatcaacacatatttttttttctgatgaatcaaactttcattccacacaaacaaatttacacctaatgaccatcaagagatgtcatatgattctatacaatttccactattacttacaacttctcaaaccattcaacttcttctttctttacattctttggcataacaaaagaaattatattcttaacttgccactttgtttgctgaaaaatgttttggacactagcagccccctcattccataatacatcatttctggtcagccaaatattgtacaccaatgctactataccggccataatcactctctttcgaaattttcatcccttaactctgtccaatttccgaagcaacccttgtagtggagtgagagccatcttccgaccaaaccattgctctaaaaggtgtatgcattcctgtgaaaaagagcaatcaaagaacaagtgctcaacagttttagaattcccatgacagaacaaacatctatcatctgatacaatatgatatttgagcaacctatcctttgttttaagtctgttccgcaaagaaatccacaccacaaaataatgcttgggaatattgagcctattccaagcttgtttgctccaatggtaatggtcttcagcctgattgttgttacgaattttatgtttattacgcaagtgtacgcaatcaagtagtatctcacacaggtgaggtcgaacc

SEQ ID NO: 86020 - DNA, 672 bp, Cannabis sativa
gattttccaagtatcatagagtttgaggatgaatttggatctaatgtatcggtctccattgattatgaatggaagccaactgtgtgtaaacattgtaaagggctgggacatgaaacaaatgaatgcaggaagaaggaaagcaagcaacccgaatggatagttaagaaggacaatagaaagtcgactgatgggaagaatcacactgttaatgcagaagatgatttccagccagttgtgaaggggattaaaactacagagaaagctcaatcaagccctactgcagtagctaatcaataccaggttttgacagcacaagaaccacatgtagatgtacctattcaagctgaagagaggcagagtaacacaggaggggggggaggacctccttctcctaatggataggatcttaagttggaatgtccgagggattaactcccaacaaaaacaacgagaagttaggcaatttattgctcatcataatgttggattggttggtctcctcgagacaagggttaaggcctctaagttgggggccttataccaacaaatgttccaaggatggtgttttaccacaaatattgcatggcacaagggaggaagaataattgttgcttggaatccgcttcaattccaagttaacattttgaagtgttcaagccaagttatacattt

SEQ ID NO: 86021 - DNA, 1037 bp, Cannabis sativa
gctcctcctcgccaagtgggtaatgccccaattaggtcaatcccccatatagcaaatgtgtagggcgaggtcatcaatcttagttttgttggcggcacgcgaggtatatgtgaaaacctctgacacttatcacatttctcgacaaactaatgggtgtccttattaatctttggccagtaatatccttgtctaatgatcttcttagattggctttgcaaacctgcatgatccccacaaaagccttcatgaatttctctgatgatttcattcgcttctatagggagaacacaccgaagtggaggcatcgaataacatcttctatatagtttgccttcaattattgtgtagcgaggcaccgaatacaagagttttcgcacctcatttttgtcaattggaagttgtatgtcgagtagatagctgattataggagtcatccatgtaggagagttgtctatgatctctacatctttcgtttcacatatactttgctcgcttaccatctccaccggaactaagttcaattcatccaagtccttctgcgaggccagttttgccaaggcattagcgttgaagttttgttctcttggaatttgctcgattttaaagtaatcaaatctttccaagttcttccgaaccttctctaaatactttgccatttttaagcctttggcctggtattcccctagaacctggttcacaattagttgtgagtcactatggcagatgagatttttgactttcaacggctcgactatctttaagccagcagtcaaggcttcatactcaacctcgttgtttgatgcgtcaaatttaaatcttaaagcatagtgaaacttaaagccttctggtgagattaatattacccctgcacccaaattctgttcattggatgcaccatccatgtataacttccaagtttccgcgtcttggtgaacaggtggaatttcttctggagttataccttctattaagaagtctaccaaggcttggcccttgatggatgttcgagggttgtatgttatgtcaaattgccccag

SEQ ID NO: 86022 - DNA, 1126 bp, Cannabis sativa
ttttattactttgaacatcagaaatcactcgcaaacaatccgattccaaaatgaccccctcccaactgttggactttatccaactcaacgcttccttaatcccaaaagcctccacctcatgcggctgcagcaaaccagttttaagcaacgtcttggcttgaagaactaaacccgccgcacttctagccaccattcccacaccaaaccgcccttcggaagcaaatatagcaccatcaacgtttactttaatgcttggaaaagaaggagggcaccatttctcacttacaaccattgaatgaccatgaagagcatctttttcgaactgttgtgctttacaccagtccgaataattcatcttagcaacatgaattacctcttcactcgtcggagaaatagagttccaaactacatcattacgcaccttccacaaagcccaaagagtcatggccgcttcaatactctcaacctcattccatttcgacaatccttcctcaaaccagctcctaaaaaacattgcagcaggagctacagtcggcaccttagcctgctgccagcataacttcgcaaaattacaccgcaccagtacatggagagcggtctcaggagcagccgaacaaaagggacacaggctatcaacttgcacatgtcttaacgccaagagaaatctcgttggaaggcagttcgcactcacccgccagaggaaattaagtacctttgggggtactttgagattccacaatctcttccacatatcagtaggtacattaagattgatatgtccatgagcctcttgttgatgcctataggcgctctttaccgaaaacatgcccttgctatccttcacccagtaccaaacatcttccctaccagttgttgtaagaggaatacgccacacaagctgttgatctaaacgtttattcaataagataaaaacaaaaaattttgaaaataattttataattttgaatttacgccacacaagagaaatctcgattatttgtttggttttaattaagtataactaagaatttgattggtttaaaatttgaaaataattttataattttgaatggtcattttatttattacggtattcatgtagttttaattaagtacaattaagagt

SEQ ID NO: 86023 - DNA, 746 bp, Cannabis sativa
agttcttccacgctaaagctacagataagaaaaagcacaatacgatttctcgtcttcaggatgattcgggtaggtgggtgtcgtgggatgataggcttcctcttgttatgttggactatttcaagaatctttttacaacttctgcatcagagttttcctcggtcgttgatgttactcctagtgctattactttggatcataatcaacagcttcttgatcgggtcactgaggaggaagtaaggcgtgctctgttccatatgcatccgggtaaatctccgggacctgatggtatgacgcatggtttttttcaaaaatattggaatgtggtgaaggatgatgtggtttagcaggttagagctttgtttgatactgctattttacctgatgcgcttaatgatacaaatattgtgcttagatcgaagaaaaaacaacctatttccatgagtgatttgtggcctatatctttgtgtaatgtcctttataaaattatttcgaaggtggttgtgaatcatcttaaagttgttttgccacatgttatctctccaactcaatctgcttttattcctgggtgtttaatcttagataacattatgatagcgtttgaggtaatgcattatctgaagagaaagcgtaagggcaaggagggatatatggctttgaaattggatcttagcaaagcctatgagagagttgaatggggttttcttagagcaatggtgacaaaaatgggtttcgccactcgtttt

SEQ ID NO: 86024 - DNA, 615 bp, Cannabis sativa
atggtttcttcggtcaaggagtcgcacctcttggacaaattcgcctacccctcactgttggacaagctccgatgagcatgactgtaatggcacaattcctgatactagatgttcctttagattttaacgtaatgctaggccgaccgaccttgtatgacttaaaggctgtcacgtcagtttcactcgtgcctgaagttcctaacaaagaatggggtagggtgtctaagaggaaatctgcagtttgctcgggaatgttacaaccttgcagtggccaaggctaagaaggaagtatcctccaaccagagcacagacaagagaaaaaacattcccaagtagggaacttcccaaggcggggatgaagatgtggatcctcaacttggggaaccaagtagcaatgttggacctgtagaagaattagaagagatcgacatcgatctacatatccctatatggttggaattgatacttctattatttcacatgcggatatggttggaattgatccttctattatttcacatgttctgaatatcgatcctaacttccagccattccaacaaaaacgaaggctactggacaaagaacgagcagtagccctgaaggaagaagttgaaa

SEQ ID NO: 86025 - DNA, 802 bp, Cannabis sativa
actctcatcaaagagagtcaagtaatccattgcatttctctgcttgctctctattgcttcccctggtttttacctcttcctggtttttacctattgatatcgatttcaatttctacatggtatcagatttttgccaatggagtcttcgattcacacctccactactgatcctacaggcctcaatggtcaagcttctgctgcgtttccgaactcttctacgtcatggaatccattttccagctcccttgtctcctaactcaccatcaaactagatcgccaaaacttcttggcatggaaatcacaagtcgtccctactgtgcttggccatgaacttgatgaaatcttgttctccggtctgcctcctccctgcactctcatcactggtgctgctaatccggcctttgcataatggaaaaagaaagatcaattgttactatcttggctccattcgtctagggtgttctggcttcagtcgcaaatcataccacttcattcggtgtatggcgtgccttggagcagaaatattcgagtcaatctcgtgcgctgttgttacaactcaagggccaattttctcaagttcagaagggcaacttgtcgatctccgattatgtggacaaagttcaatccattgcagatgctcttgttgtcgccggttcaaccattactgatcaagatttggttttacagcttctaaatggtcttggacccgattacgattcagtggtctctggtattacttctcggagtgactctctcgaaattgttgaggttcaagcactactcatgtcccatgaaagtcggt

SEQ ID NO: 86026 - DNA, 618 bp, Cannabis sativa
cccatccactttattatctatgtagatcgtaatagccaaaagaaaagttgtttatgtatatataaatagggacacgattttgtttatatatatagttaatgaactttcactgttagatagattagttatttgatctgaaggctggagttaatataaaagtatttaggattaaatatattagtaaccggttcactttttgtaataaaaaattaataaattttaaaaaataaaaactgacatgaccaccatgagtcttttttgattgaggcggtgccacatgtcatcttttgattagctgaaaaatgagagctaagtagaacgggcagacgaagcccagttgcgcctcaggcgcgtgcgtgatatgcctagaccacacggtgtcgtgtgttgcatgcgcgcgtgggttgggcttggggaaaaaggagcagttgctcctggatcttctaccgcacgaacccggaggtgccacgtggcacctatgttggctaggagaggattttggcccatttgagattttgtctttggggtaagttgaaaaatgcctcttttattcatcaattaatcaaatttacctctaattttatgtttatttgaaacatacctctttttatatgtatt

SEQ ID NO: 86027 - DNA, 1047 bp, Cannabis sativa
atacaaagtttactataaataaaaaatgattttaatatatgtaattctcaattgttgtaaaaaccgcgcgaagcgcggtaccattccctagtttatatatatataaatatatgtaatcttaattggtttgaaacagttgatgaatcttaaatggaagtcaaaggtcaataagttaaagcttaatattgcccacttgatacgattttttagaaaattgtggagaaaattaaaattggtggtacactggtactaattgaagcatttgattcttatgtaaattccgttatgtattctatatccaattccgatctctaaaacatatgacaattatttgaaagtgaattaaggattttcatgtgatttaaaagagttgccattacccagaaaaattgaagtgctttgagtgatagtgattttaattttagaaccgggaagagaaaatgtgttgagaccaccctccatggcttttaagctaatattaaaattacaaagatactacaaactaaagtaaaaaaaaaaaaagtaatgtatctctaagatcataacataaaagaagaaatgtattgttttttccaacttccaataaaagttgttctcttctggaaacttagaaattttgatgaagcttgagaaatatatagcctgcaccttgcattctgtaatgccaaatcatataatataagtagttatccttttggttatctcccatgattgttttgaaagctttttattctggttctcttctctcccttggttgggacatttattatttattttccttatgattaactcttgtgaagcaatttcattatgttagttttaagttcattcgtaggactgagaatgccgttgttgattgtttggtaaagtgggttaggacctatgaggttcgggatgtgtttcaagggaagtggcctcctttgaggtcactagcttgctttagttttctttccaatgaagaggtctattcgggaaaagaaacaaacataaaaaaaaagtaggtatcttgaaatgaatgaatgctagtacaagctgaacagaaaacaa

SEQ ID NO: 86028 - DNA, 540 bp, Cannabis sativa
cttagaataatcccacttgaccttccccagacaatgtgggattgtacagcttactcggtatttccccttacagatcacgagactactgactgtcacaacactcttaataatgcaaaacataacttgtaattttcctaaatactattatacatatatttcttcttattattaattttgttttaacttgtaattttggccacctacgcgtacataaaatacgtatatatatattgaaaaattaaacttaagtttgtttaaaaaaatccaaaacatacaaattcttttataaaaagaaaataaaaatactaagaggacacgtacaaaaaccctagaatacatgcataactaaaaataaaaataaagagtttaatttccaatttaaaaaaaggtcttcatatattgtaataacaatatgtatttaaatttttttttttggtttattaattatttatatttttatagtcgatgtatatagtttgtctatcaatatcagactaataattaaatatcgttttcttccaaagatattaaataagtgta

SEQ ID NO: 86029 - DNA, 652 bp, Cannabis sativa
aaaataaatataaagtatttaagtgtataaaatcttaaacattaagtatatataccgcaatttacccttaaaaaaatggattgtatcattatcatgaataaactcaaatatgtgacaatcaatttatatacttatataaagcaaaatcttgaagagatgatgtggcgtactatcatctttatttttttaatttatctattttaataggatttttacactagaatctcatattattctactttttccaataaataataaaataacttctcataattattaattatttttgtataaccttttaaataaaatgtaaaaaaattacattaaaataattaaaaaaaattataaaaaggggttgagctcgatcaaagcgcagcttaatttcctagtatcataataaaataaaatgtagagtaacaaaggtcttagaaaaattctaaaataatattaataatgaagaaaggtaaaacgaaaaagaaaaaacaaagagttattgacaacacttcatattttattcacttaactaaattattgttacatgtattgcatgtatacttggttatatttttattttttatatttgttatgtatattttttaaaaaaattttataattaaaagaaactaagtaattttttaattttgtatttttt

SEQ ID NO: 86030 - DNA, 542 bp, Cannabis sativa
caccaccaggcttcaaacgttcatccctgagtatccctaacaagtttctcaacctgaaatattttaagagacagaggtaggggaaatcatcggctccgcatgcgatcagagagaggcaagcagcagagtctgagtggccattcttccctattatataaaaggacccaacccgactgcctccatctccgtcagagcaaaacctcattcttaaactggtaatggtttattttaggaatttaggtttcttttttttggaaaatttacatgtgggtactttatatataaaacaaatgattagggatatgattttgtaccatactttcacgggatgtattccgttgtacattaggtgggtctcagggtacattaaatgagtgatacgtttctacttttttaatcctaattacccctagatcaatctcagccgttagatgaaataactccctcaactgaaggttaccgtacatcacggattacaatccgtgaaagtacaataacaggataaaatcatatccctacttatgtattagccagaaattaat

SEQ ID NO: 86031 - DNA, 558 bp, Cannabis sativa
tcacaagtaagttttgctttgtcagtagtttaaaaccattctgactatacttaaaaataataagaaaacaaaactatcataattttttctttctctataggaggatagaaatgatggttagattatacattctgatttagataatgattttgagagctaaaacatgaaaaatttattattactttgtattatgtctagaatgatttagttaggctcaatgtatattttggtaacggataggtacaaaaacccacaacctgagtggtctgaattccgggaagcaagttttggccatggcgagctgaagatggtgaactccactcatgccttttggagctggcacagaaatgacgatgatgagcctgtaaggtctgatcaaatctggataacatcgttggtaagttcaggatgtgttgctgagaagggatatgaactgaggaagatgcttttggcaccatagaagttattaagcggagtcagctcgacccagattcgatgatctaagtaaatattagatatgaaagaatgtcatggctatatagtgttgctggtttaact

SEQ ID NO: 86032 - DNA, 995 bp, Cannabis sativa
cttgagagcatcgtcaggtctgcaagctgcaattgattaataaaaatgaagtaccaagaagctttactcaacgcttttattcattagatattaaattcaattacatcactacgagctaagttgaaagaaaaagaagtactagtctagactttcatttttcatctaagcttagctaaagtgatccccactacactaatgccatgtttgactaatagtgtaggggccataccttagtaatggaccttctaaagatgtatttgtcacatcttgttggtttaggaggtgatcaatttacttgcataaggtaaaatgaatctctctgtgaagcaaactatttagggaattgttactttattgatgatattatctcagatgctccctgttccagtaccttgaaccaacattaaatttaagtggtaatcataacaaactctaacctatttgtcctaggttctaatgcttctgtgacgatataaggtccctccgtctctcattggtagtctttaatgttgctttctttgttagtatctttagaaggctcatagggcacatcttcattgttgctgccctactcctgatcattgttggaaacagagggagaatcttcgtcactgcctctctctcttgagttgtcttaggaagtagggagagattattcatcactggtttcttgcttgagatcttcttgagaaatagcaggggactcgtcatcactatctccctactcaagttcatcttggaaaatagaggaggagtctttttcagtggagatattaggtgttgactcttcttcactttcttggtcaatgtctgttcaagattgaggaaataaataagtcgtgtaattggttgcttctggttgagcaactcctctaaccctcttgacggcttcttcaaggttgatgaaaccgtcaactctatctagaaactcttgaatggtgtacactgatttgagtttcaagtatttccataatggactcattattgttagtcta

SEQ ID NO: 86033 - DNA, 684 bp, Cannabis sativa
aaaatttacacaaattattattttcggcaaaattttaggagaattacttatatattatttttttttaatttacgatttgggttgctccagtagttcctatacggattgctatgtggattttgattgcgatttaaattactctattgattgctatgtgagttgttatgtagatttccgtaaaaatacaaaaaaagaaaaaaaagaaacatggtgtaagaaagaaaaaaccccaaaatttttaacatttttacagttaagtacatacattatttacaaatgtgtttacattttaatttaatacttttttacaaatatttttacataatttttttttcaattttacatttttatttttatttacaattacggtattcataaaaacaatataaaaacaaaaatacaacatgaaaataacaagaaattaatatcagaacaacatacaaaaaggaagaaaaaaaaacaagatcacaatacaaaaataacatgaaacatcaatagtcggtatgtatagtaaataaaaagttataaaccatagcaatatctaaaattccgcaaaattgtatttttgtaattttttgtgagtatttataaaatatgcctttttatgtgttgtatttaaagtatagaaagaactttccttacaaaataaataaatataagtatagaaatggctttccttacaaa

SEQ ID NO: 86034 - DNA, 765 bp, Cannabis sativa
gatcttaaaaataagtgttgctatttataattttacattaaaaaagacaacattttttataaaagtgtctttaaatgttgctatttatatttattgtaaaaatgtataatttgacatataagacacctcctttatcaaaaaaaaaaaaaaaagacatatacgacacctctatatcctctttctcctcttcttccttggagaacccaacctacagtaccacctcaaccttggttgaatcagctggttcagcttctttgcatcagaatggaagaggaccaccacaacgaaatgaaaattgggcggaattgtacaaaattgggagcaaaaatttgaaaaaccctaaaagcccattcgaagggatcccaatgagtttcagattcataaagaaagcccatatatctctgaaggctgagattgtgtcgagagctttacttgctgcgattcagtgctttgtttgcagagatgagcgataagattgtctccattattgatcgaatgcatcgttatccctttgggttaaggagtaatgatgaagcttcaaagaaagaacttgagaagcttcagaaagaaaagtcaaagcttaaagaagacgaggagaaacattccgaggaagtaaagttgctgaaagaacaagggggctccttcgccttcttaatgtcggagcagaatcaatgtgggtatgtctaactatcagaatcgatgtgaaggtcaagcaaatctattcataatttggctgaaagctcttctccctgccgtaatcgatgt

SEQ ID NO: 86035 - DNA, 785 bp, Cannabis sativa
taatttgaatccaatactaactacgatcttgatttgtgtaaagttttttttggcaatttaggtgtcaaaatatttatatttatcatgtgatttccttgtgcaattaaaccgatttgttcactttgattttgtgtctttattgctcttttctttcaaaggaaagtttccttttcagctgttcattttcttgttttggaaacttcttgtaagagaagaaattctcttataaaaagttagttttgtttgaaaactttgaccttgctctttctctttaatgttttcgattgtgtcttgataatatcagatcaagcacactgtttttagtaggtatgaagtccatgtttatgatcagacacatatttgacaagtttcctttttggtttaatttggttcctgtaaaaactcgattatgctgctgcaaattaggatttttttttaaaaaagtttgtacaactatgtaattgattttgtggatgcctctaggcttgctatgttctataaatagaacatagagaccgccaatcaattcacctcttaagttttttatttctgcatattttttatttatgaggaagtgttctttttgtgagaacttagttgttcaactaggttttattacttatgtatttgttcttataccggtcttaggatcgatttgaacaacttgattgaacaagagaaaggtcttcgggtgaatacttgttcaagccttactacgggaggaagtaaacactcacacttcaaagacgaagggagttcgggcttgaaggtgtttcaagaagtca

SEQ ID NO: 86036 - DNA, 970 bp, Cannabis sativa
aattaaagaaaagaaagaattaaaaagagaataaataatacttattagaaaatattatagtgtgtgatgtcaccgatatatttattttgtatatatattgatagattgattgatattggtgtttagttttgttgattgttatggatgagataattaatgattgacttttcgtttatccttaaaatttaaatatgtgattaagatattaccaattcatcagcaccaaattgaatattagttattcctatatttgataagtctagctgaaatgatagcatgacgatggcatatataatatatgttttatttatgaccatgtgtaatcaatgattaggtcttataattaatttatctattaaatcacgtagtttttaacgtttttggcattgaaattagataattaaacaagtggtgtctttagtttccagaagaaaaaaaaaaaaaacaaaaaaaagtggcgtctttagtcactaaattaattaattataaatttataatgagataatcctaaaggtctttggtaagccacttgggattacctcaaataattgaatgtatgcaaggctgtcccaagccaaatgataatcttggaccaaaaactttaattgggttttattttaatgagatgcaaaacaattttaaatttgaaaactaagttttagtaaatattttattttcaaaaaattaagaaaatgactgaatattataataaattagttaataaaaattataaaaaatatatttactagatattattttttgaacattaaatatatataacagtatgtgatatatcgtatcactgaaaattaatatacctactaataaaatttatcacaaaaaaattataacaatactaaattaatagttaagaaatatacatatcatactaacaaaattatatataccactattaaaatatgtatatataaaaaaaattacataaaataaaataaaaactaaatatcat

SEQ ID NO: 86037 - DNA, 892 bp, Cannabis sativa
taatttttttttaaataataatgtttgttttaataaagtaattagtttttatttatataaatttaaaaaataattttagtaatttgttatttttaaataaattaatagataactttaatattataaattaaaaagtttaataagaagaatttatttatttttttaatttaaatataaattgtaattaaatgaataaaatttttgtttaagtttttaataaataattgtgtatgtaattttatgttggtataaaaaattaagaataataaataaataagagaatgataatttttatgaatttttttgatgaagataaatttgtaattttagaaattaaatataaaattattttaatttttaataattaatgattaatattaatttatgaaatagtaataatttgtttaacagaataattattttataattatttaaatttagaaactaagtttattaattttgtttatataaattaatgaataaccttaaaattaaaaagtaaaatttaaaaagttgataaaagagtaatttgttcattattttaatttaagtattaattataatttaacgaataattttttttatttaaatatgtgtttaattaataaaatattcataaaattttataataatagttaataataaatatttgaaaagagtatatcaatgctttggtgtacttataaatgtataccatagctttgctatatttaaaaatatatcatagtttttgtgtacttgcaaataaagtctagaacaaaaattgttctgcaccttttttgcaatattcaggagcgatggatacacatggcaaaatttgcaataaaatttcataacactttacaaatcattcaaatttttaatacttcatttgtcgcctaaattgtagatg

SEQ ID NO: 86038 - DNA, 507 bp, Cannabis sativa
ttgaatttcaaattactcatatataatatgcatacataaatgtattttcttctattgtctctctctctatatatatagactaattattaataggataatttttatataaaaaaaattataaatttaattttatacatatttttttttttatatatttttaacgtttttcattcttttttataatgttgtaacaacctgaaaattatattccatatttttgcaaaaaaaaattgtaagagaaaaaaaaaactataaatctttaaaaacataatttttttgtttttttttttcttgagtttttataaaataattaagtatatatgtttttaatttgtaggtgggatataaattgtgtagataaactgaatcaggaatatatgcaaacattttataaagatgttttgaattgttacgaagagtttgagcaactgctagaaaaagaagaaacatacagagttcattatgcaaaagaagcggtatacgtcattatttgaattaaataatttt

SEQ ID NO: 86039 - DNA, 719 bp, Cannabis sativa
ttcagggggcatgatttagtatatatcaaagtttgagaggcatgattttgtagatatcaaagtctagggagcatgatttattatataaattatcactgaaacagtaaaattgaatgaaattagataaaaatctttaaatctaacaatctcaatagttcaagggaaatttttagcagccaaaaaagttcaaggggcatgatttggtatacgtcaaagttcgagaggaaaaaaaatactaatcagccttatatatatttggtttttacactacatattgaaattttttttttatatttttttttactttattactgtggagcagaaatttttcaaaaatactgtatttttttaaaaaaatactatgtaagttttatactgtatactgtgtactgtgttaagttttcactgttgttccacagttattttttagttgttccattgttgttttaattgttatatttcgttgttttacgtttgttttataaaaagacagtatttttgtaaaaaattctgtttgacagtataattataaactttagctcaaaatctagtatttttataaaaacctccttttttttaagaacaagcttttatatgggtttaattatgtcatatttaggtaaaatattttttaaaatatcatatttaaataaaatgcattaggatttaccctctcttttcaaacgaaccaaaccagatactctctctctctctctctc

SEQ ID NO: 86040 - DNA, 689 bp, Cannabis sativa
gctgagttaggttggcctcagccccccctacaagatagggtacttttttgagcaaaaatccattccaaagcagaacagaccgaatacttttacttcagctagataggctatcaatggttgagcgaaaccaataacttgaatttatccaatgtgggacgatacgccagggattatttcattatttgggatatcccgtaggtccaccacctcttctagagggtgtcgacctacgcacgctccattcccacactctagatgtgagatagatccaattatatcctatccatccttgtcgatagaaggaatatattgaggtgggcttgtgaggccaacttttggaggtgtggtctagaccctctagagtctggcattaagggagctgagggcttgtctggaggctgagacaaggccctagtggtagaggagacttacctaggaggtgggcgtactcctaatatggatgccgatatccccctctctaagattgagaggaccacggagagaaaagagatggccctccaccaatgcttggctcatgaaggcactactggcaaggccactttatcgattaggcttggaggccaagaattcgctaggcctactcaacccctgcctacttctagagggaagggcaaggttgctgcaaacagttcagatgattcttcctctgaggatgatggtagttgata

SEQ ID NO: 86041 - DNA, 1985 bp, Cannabis sativa
ttgaactaaattagtaggatcataatcccacttattacctggttaactcataatataaatataaaccctaattattaattattaagcttattggaatattgcaatgatgtttcaaccttatggttctaattctcaccatcttacaagacttgttatctccaagatacacatatacaattctataatttctagatgtaaattcttcaaaacatgatttattctgtattatatggaatgaacacccaaaatccaagatccatttagaatatgaattcttagaagttaccagcaaagcacaagttgagtcataactatctctactcactgctacatcccctttagattttgaatcacccgtcttatgcctctctaggcacgcctttttgagatgccctaatttcttatcaatccagcttctaagattcttttggctatcatactgtgatttagatcttgattttacttttaacctttggggctttatcttttctcgcttttgccccttgtataaaatctatcactacttccagaattctttgactcactcctctaatttagctctttcgaattcaaggttgattgcacatcatcgagtgtgatcgactctcttccatagaacattttatccaaagtgtgtgcaaaagactttggtgaataattgagcaacaacaaggcttgatctttgtcttcaatggtgacaccaatgttttcaagatcgaatcaacttgttaaactcatcaatatattctccaacagatttgtcttctaccatcatgaatgaatacatggtctgtttcagatataatctactcaccaacgatttagtcatatacggactttcaagtttcagtcgcacacctgcggctgtatcttcttttgtaacctttctcaaaaccttatctccaagattaattcaaaatgatcgcactacgagcctttgcaagagtctcttttcttatctcatagaacccttgttgaaccaacaaagccttcatcctcattctccataatccaaagtcatccgtaccaataacttttcaacatcatattttgcgactgtcatgattacaaaccttgttctaatactagttaattgtatgaatgaaaacattcaatgacttaccatttagtatgtcggactaacaaacaagcaagacaatcaagaactaataaactaagagatttgagaaatcaagtaataaatcaagtaggaaaatagaaaagaagaccaggtttaacgagttcgagccatgtgtaatgctctacatctcggttggaacagtaacagtcatatctttatttatatcagtgtttacaaggttacaataatcttcacaaacttctcagagagtacgagaagaagtttctctctctagtttagactctctctctcaaccctacactataacgatttacactcaagctatattggtctaattcacacatattataaagattgataggtatttatagatttagaatgttgcctaattaaactatctccaagagtatcatggctcatttatactgccttaaatgatcccattgatctctagcaacaataatcctcgtcagctttgataacacactttcagtacatacaatttgaaagttttgatatagacagacaatctggatacatacaagcgctcattcccagatgaactaccaagaccgacagtatctatccagaagtgaacctgcagacaaatgacaagctatctggagtgacaatacatacacggtacaagcttatctagaaacaccctccagtttctacaaagtcttttgcacaagacttttcggatactcaccaagcttcccgtatcaactctccaaattcacaacttccttttcacatggcaaaacttgtaactataatcaataattctcttagtgcttagagattgagagaactaagtttttgaacaaaagtgttatacaactttcaagttataatgttcctcactaatctaactcaatgt

SEQ ID NO: 86042 - DNA, 687 bp, Cannabis sativa
atggaatatccatcaaaggaatgctgggatttggcttttaatcaattactgggagcccaaactgtagataaattccaccgtgagcctactctctttaacccaatcctggatattgaagaaatccgatgctatgaagctaatcaaggaccaaggaaaagaaaggcaacaaatggtttttacatgctgcccaaaaaagatgatgagtcaagattccaacaagaagatgaacagcgtgtgtcaccaagaaatgaagaaaccatggactctccattaccgtgttcacacagcgggttttcacctggatcaatggagaaggacaacagtcgacggaggagaggaagaccgaggaaaaattctgcctttgtgccgaagccaacggagccaacaaggaaaagaggaagaccaacaaaggaggcgatgctagctatgaaaccaaaaagcttcaaaaaagaaagtgataacaaaaggaaaaacaaggttagtaaacattattgcaattcttgggatactgcctcagttgaactagctattgatctaaataaccactttgtggtaattgagagaaaaaaaaatctaccaagtcaatgtgtcatcgaagagatagaggaggcagcaaagatggaacagatcataagcttaaagaataccaatgaccagttagaagctaccaagcaggttttttgcttt

SEQ ID NO: 86043 - DNA, 696 bp, Cannabis sativa
taaatgcatccaacaccacctatcctataactaactatatcaactatgacaagctttcaaaaaaattcaaaacagcaatccttgctgcccatttattcgaaccaaaaacatataaacaagcttgcaaagacaagatatggaaccaagcaatggatactgagattgatgctttagaagcaaacaatacttggattgtagttcctctacctcctggacaacatgtcattagcaataaatgggtatatcgaatcaaatataacccagatggctctgttgaaagatgcaaagctcgtcttgtcgccaaaggctacactcaacaacctggagttgactattttgaaacttacgctcctgtagccaaattcaataccctcaaactattatttgcccttgcagcaataaaaaattggcatctccaccatatggatatcaacaatgccttccttcatggtgatctccatgaagatgtctatatgacattacacaaggatacactcctaaagaatccattcccaaaaatgcagtctgcaaattgcaaaagagcctatacggactcaaacaagcttcaaggcaatggtatgccaaactcagtcaaacactactccaacaaaacttcaaacaatccaaaaatgaccatagtctattcattcgaacaaaaactggcattttccttgccttactcatctatgtagatga

SEQ ID NO: 86044 - DNA, 1180 bp, Cannabis sativa
ctcattacaccagaattttttgtttcttgcattccatattttgtacacagcagcagctacacaagcagtatagcaatttttcttgaatttgctttgtctttctcaattacttcccctcaagatactcggcagaattgtgttcactgatctccatcccagccaggttctcagttcttgaaggcagtattgtgcaaatctgcactcaaaaaacaagtgcgacacactttctgctgcaatgttacacagcaggcagcatgagtcagctgcgatattaaatctttgcagcctatctcgagtcctcaacttgttttggacagcaatccataatataaaattatgctttggtacattcagtctacaccagacctgcttgctgaggtgaaagtctctttcttcctgcatcatgagttgatatacaccagatattcaaaaatctgatgccacaaattggctgggaggaaggatttgctttaccaggtcctttatgctcacaagtcttctccaataccagctgctatggatgggagcctcatacccccaccaatcttcatcttcaatatacacattatgcacccacttcacccaaagattatccttcttagtagcaatcgcccagacatgttttgcaattgcagcttgattccatttggcaatgtcttgaaaaccaattccaccagcttttttggatttgcatagctgctcccaagctatattccctggaccattcatagtgcttctccctgaccagagaaaacttctacaaatactctcaatctctttaatcaccttcttgggaagaataagaacttggctccagtacatatgaatggataagagtactgagttgattaacacagatcgaccagcaaaagaaagatttttggagctccacactttgattcttgcagtcatcttctcaactaggatagagcattcagctgatgaaatttttttagcacatatgggtactccgagatacttgaaaggcagggtacttttctgaaatcccgaggcatctaccagtctttttgtttcactctcattcatgccactacaataaattgcagtcttcttcttattaggctgtaatcccgaggtcagagagaataatttgaggccccttagcaataagtagacacttttgaaatcacccctacaaaataacaatacatcatccgca

SEQ ID NO: 86045 - DNA, 600 bp, Cannabis sativa
aatatattgatcaaatcaaagagtacataaaagacattttacttgaatgtcaatcaagcaaaaatatcaatataataaatattaatattaactaaaagaataggacagaaagctcaaaccacaatcatgatttcaaagaaaaaacttgtgataaaaaaataaaaccatttactttaataacaatacacccagatttatacttaaaatataaaaactaaaataaaaacatataaaaaaatgaatgatacggatatatatataaactgtgaaagagactaaggttaggaaagtgtcattctccaacaaagaacaaaagaaaatgccaaaaaataaatagacataagagaagatgaataaccttcttgacaccattgcctgatattttctcggccaagaaagcgtgacttggtctactgtggtgtgcgtcaatggagtcaagaacgagaaagagaggtaggtagatgttgtatcatgttagacttagggttaggaggttgtaatgagagagagagagagagaaaggagagagagggactcctttagtgccgtgtctgtgtatgtgtgtgtttgagtcttgtgtgtgttatgtgtatagtatat

SEQ ID NO: 86046 - DNA, 585 bp, Cannabis sativa
tttaagtttttttttattaatattttattgtcaaaataagatcatttcaaattttaataataaaataagtaatatatgatcttataattaaaattaaagaaaaaaacaaataaaaaataattaaattttaaaatgaccataaaggcaagtttgtagaaaaatcaaattttcaaattgaaaggctactaatatctaaaattaatttttcattaattaaaaaattagtaagaattaattttatcttaataattagatttttatttgacattttggattctacacataattctaccaaaatttaaattttgtttcattgaaaaatgatttttgaaagtaaaaatatcacaaaaataagatttggcatagggagtatgcattgcattctctctgcgcgagcgcaagaggagaaaggtgtgtgggagaggctgcattgcagccttgttggccgagctagctcggcatggtgcacctttggacaaaatcatgtccgagacacctcggtcacgagctgtttgtagctcggtcttgaccgaggtgcatctcggcatccgcgcgtgtggctttgcatcttagatattttgtttt

SEQ ID NO: 86047 - DNA, 516 bp, Cannabis sativa
tcttctttgtttttctttgtttgttattaaggaagtttaattttggagtcaattgttgacttaagaagttgtttggaaataattgcgttgaattctatgttttacaaaagatattgaatgaccaatctattttgttaaaaaaagtatcaacatctcaacgtcaaaaatcactatttttccaattttttcttttttatatttattatagttacaatattatttctaatgcatgaaatttttacgtggttgggcattaataagtcttagtcaacgagtcttttttatttatgagagtatttattacagagaatgtttctctttggttcttctgaaacccaaaaatctcgacccctcccttaatgtgtttggggtatttatagtatttttttctggggtaatccctaaaattgtcccatatataattctgtgtaacttcagtaggggcatgcattcctagcccatgcaaaataggaaatgcatggtccgtaccctaggtattttaggggttaggtagat

SEQ ID NO: 86048 - DNA, 649 bp, Cannabis sativa
cattctacagttccccctaaaattaaacattttgtttggagggttgtgtcctattctattccagttgcttcctccctttttgctagacatattattgattccccactttgtcctctttgtaaaagcagtctagaaatagttcatcatgctttgctagggtgttccagattgaaaaaagcctggaaatcctctaagtttgtggatcattattataaatataaacaccttgatataagtgattttttattatgctcttttgatgttgtggacaaagattatattagcatactgttttggatcttatggactctttggaatcaaaggaataatcatttacatcataacaatatcttacatgcctttgatgtttttgattggtgtatcaattatttttttaaatacttagatggacagcaggctaatcatcttcctagtgcttcagttcagttgcaaagcaaggttttggatactgtggaggagggatctttacaggtttacactgatgctgctattgatcctcacagtaagaagtacagctacggtattgttcttgttgatgagtttgatcaagtgaaagccggcatagccaagccttgtgttgggaatgctcctgctgtcattgctgaagccaaggcaattcatcttgcta

SEQ ID NO: 86049 - DNA, 1497 bp, Cannabis sativa
catgattcatctccacagcaggttagtagttctgaattcaatattggtactgctgtctcacctgtccatgagttttctattgctcctcaggcctctacacctgaagatatacctcctgaaaatcaacaacaacatgtctcggttcagccatctcaccctatgattactagagcaaaggccggggtgtacaagcctaaagtctaccttggttatgctaagtttgacacttctctccatgaaccacacacaatcgaagaagccctcctacatgaggggtggaatagctcaatgcaagatgagatgacagctttgcgcagaaatcgaacttggacattggttccacgatcctctcttagatcacccaacatagttggttgcaaatgggttcacaagatcaaatatagtgccgatggtagtctccaacgtctcaagtctcgcttggttgccaaaggatttcaccaacgtccaggagtggactttgttgagacttttagtcccgttatcaaagcttcgacagttcgagttgtgttgactattgcggtcacttataactgggaaatcaggcagctggacgtgaacaacgcctttctcgatggcgtccttgaagaagatgtatttatgatgcaacctccaggcttcgaagacagagccaaaccggattacgtgtgcaagctaaacaaatcaatttacgggctgaggcaggcaccccgatcatggtatgatcaactaagaaggacccttgtcgaatggaattttgaaaactcaaaggctgattcctctctatttttgataaagacttcaaagtatgttatcatggtactcatctatgtagatgatatcatagtgacgggaagcagctcgggtgaaatagaaaagtttgttgtgaaattgaacaagatcttctctttaaaggacttgggacagctgcattttttcttgggaattgaagttttcagaaatgaaacaggattatacttgtctcaaaggaaatacatagccgagctgctgcaaaagcacaatatagctaacgttaaaccgagtccaacacccatgacagcaggcagtcctctttcaatcaaagatagtgagccactagagaagccatctgagtatagaagcatcataggagccctgcagtatctcagccacactagaccagacatctcttttgctgtaaacaagttgagtcagtttctcaaaggaccgacaacagcacactggagtgcagccaaaagaattcttcggtatcttaaagggaccatgtaccttggactacacatagccccgagtgttaatctgaatttacaaggtttctctgacgctgattgggcctgctgtcctgacgatcgaagatctgtggcaggctattgtgttttccttggtgagtctctaatatcatggtcatctaagaagcaaaatgttgtggcaagatcgagtaccgagtctgaatatagatcattggcgcacctggctgccgaactgacatggctacaagaa

SEQ ID NO: 86050 - DNA, 506 bp, Cannabis sativa
gattattggtgtctcatggtttaagatgactagtttcgattatttttttgacagtttttcgatgattttttatttgaatagtttgaaaattttcctttcgatagtttttcaatagattttcgattgtatattgctaagtcgcactgaattaaattttgacatcttttcagatagcaagtgagtttgtggcgactgagaatgaaccctatcgattgagtagtaagagtggaaacttaatattgaattacacaaatatcgatatttaatacgctcaacaaaagtattctttagtatatttttttttctattcataagcttaaaatggtttcgtaatatggtacgtgtgaaacaaacaacagaaaccaaaccagtaagaattactacacgtggataataaggtcttcatctacaaatttaatataccacgtgaagaagaagattatagaaaacaaaacacctacctcttttggaaactagttacctaccaattctttattttattttat

SEQ ID NO: 86051 - DNA, 634 bp, Cannabis sativa
accatcaatcaaagccaccatactcgttaatgggcaacggagattttcatcattgacgataccattcatcaagttcttcattgtgacaaatttccgagcttggaataatctgtaaatgagagtgacatgggcttggagatcgggtctttgggaagcaaaagactggcttgttcggagaaagttgaagaaactcatgcaagaaccaagtggcacacgtgaattagagaggacaaggtgagttacacgagaattgagatcggaaataagagatgggtcgtttttgagggattcgagtcgtgagctgttgagggtcatagatatttttcgggcgatttctgggtcggcttccgaagatgaaagttttcttaaggctttgaaaaccttcccagaagacatgtcaccgattgggggaaggaaaatcttagcagcttgaatgaggcagtttgaggtttgaacctatgagagaactcagtcgagttccacaacctgaaaatcacataaatattagaataattagcaaaattgacctgaatttatgccactaacgatttgtgccccttaaaatataagggctgtataaccagtatattattgcaccctttgttaaattttttaacagacacttatttatttg

SEQ ID NO: 86052 - DNA, 838 bp, Cannabis sativa
atttgaacccaaatttgattactccttgtaggtgttgcccctaggtgtgatgagggcaattcctgcaccaaaaagctggtctgtagccgatccgtccacatgtaatttctaggtaggtctatcttcattcttttttcaagtagggattcttgtatatggctccaaatcatcgcttatgttatttttttctttgcctggacactcaactacaaagtctgccaaagcctgccctttaaccgctgtacgaggttggaaaattatctcatactgtcccaactctatcgcccacttgagtaatcgtccagaggcatttggcttttacaatacttggcacagaggttggtcggcgtatacccaaacaagatgagcttggaaatcgggccttaacttccttgtggttgagataaggtagtaggtgagtttctctatcaaaggatatcgtccttcaacttcaacgagtcatttgctaatatagtagactggatgttggatgttgttttcttcccttatcaccacggcacttacaacgtattcggtgatggccaagtatattccaaaatcttctctgtccagggattttaaaagtacaagaggttttgtgagttgcctttttaattattggaaggcgttctcacattcctccgaccattcgaactttctattacctcagaggatgttgaagaaaggaacacacttgtccatggattttgaaataaatctgctgagtgcggctatctaaccagttcacctctagacttcctttatttttgttaatgatttcatatctaggagggcttgtattttctctaggttagctttcattccccgagcattgata

SEQ ID NO: 86053 - DNA, 776 bp, Cannabis sativa
  modified_base (732)..(734): a, c, t, g, unknown or other
aggaatttcatgctttggctcaaaaccaattagctaaaacattaaagatcttgcaaactgatgggggtggatagtatatggatattaagttcaaatatcatttaattgaacttggaattgaatcgcaatatagagcccctgacactccatagaataatggagtagcagagagaaaaaatcgcacacttttggaaatcgttaggtctatgctgagctattcaactctgtcaatgtccttttggggatatgctattcagatggccaatgacattctaaatgtttttccatctaaattagtccctaagacacctatagaactatggaatggtcgtatacctagtttacgctaatatagaatctgggggtgccctgttcatgtcttaagaaagaaagaaggcaaactacaagtgcaaactgaggtttgcatgtttgtcagattttcaaaagagactaggggtggactattttatagtcagaaggataataaagtgtttgtttctacaaatgccacattccttgaagaagtctatatgaagaacttcaagccgcaaagtaaagtagtattggaggaaatgctttcagaaataactccaactaatgttccatcatcttatactcaaataaaggatataatcccgctccctcgcttgaaccaatgcaagttgatacaactaccactaatgttcctgtaatatcccagaaaataaataatatttaaatggacatattttnnnaaatatgtaattacttggaaaatgaagtaggattatgatctt

SEQ ID NO: 86054 - DNA, 1256 bp, Cannabis sativa
caagtcaatatcgccaagttgatattcttttggatcttttaccatagttaaatctctcattagtcgcatgacgtaaagaccgcacatagtgttattaggttgcctagggccctacatataatataatatgtattaatatttgatttatacataaaataaataatcaaataaaatactttttaattttacagtaaccacatacgtacgtcttagtctcaggagtattaggaaggtcatcaaactaaaaaataatctagcaagtagacataatcatcaccaaaattactcaagattgatgtctaagatcctgaactaaataaaatagcactcaataaagaagaagaaaaaattaatatcaaaatttagataattatataaaaatttagatgatcatataaaaatttagtaaaaatcttacattttctacattagtcacaataaattcgtactattaagacattgattactagctaaacatgtacttttatttattttaaatgataaaataaattgagtttaattgatatattgtctgtctccatagatttcactaaacaagttttcgacattgatctaaaacaggaactccacatccctaaaaatgtgtggaattcatacacaaacttaattaataggggtttcaatgggttaataagagtacgcaatgcgatagtcccagtcgtattttctattcggggaagaaaaggagatctacgggcacacattccaaaaagaatttgacagtctgcacgtggtcgtatggaagtgggagatatactttagtttaacattgaagataacattatctaagaaattcaaggtggtgaatgtgaaaataacattgtccaagaaattcaaggtggtgaaggtaaaaataacattgtccgaaaaattcaaggtggtcaaggtgaaaataacattgtccaagaaattcaaagtggtgaaagtgaaaattaaattgtccgaaaaattcaaggtagtgaaggtgaagattttgaagaaaattaataaattcaagctcctcaaggtgaagttgatgatcagtattcaaatctttttatgttggccaatgttgcagaagaagaatggaatcaacttcggtcagttcatgtcgttctgcctccgcctctgccagttcaggctgcccttctaattccaagaagagttccagtaatacatataaatcttctacgtgaagaaatagtactttggtgaaaaaattaaatatttcaattttatatcggttgtaattatgt

SEQ ID NO: 86055 - DNA, 1049 bp, Cannabis sativa
taataggttttataaaaacatagtttaataattaaacaatgtataaaacacacaagcatgtaacaagttggatagttggatataggatttatttaatttaaattacttaattaatttcaaaaatataaataaataatgttttttggaataaaacaaataaataaaatttaaaaaaaaaaattaaacctataaatttaaaaaattaggtttcaactaacttaaatatctatttaaaaaaaatgcatggtaaaatgtgatctctttacattagtggtaccttcaaactgagtttaaagaatttctcacgctttttttgtagattcacgagatgatataaatttaataaaacttttaccaacactattaaaaatatcgtgcaaagctttattattatcactagaaaatttgtcatcttaaatagtccaattaagttcaggttttgtcttagcattaccttcatcatcattttcagtaggtcgagaccaacttgtaattatagtctgcgatgccttctcatcttgtgacttaatgaatgctctcaatagaccttccaatatggataattcaagttattcaacaggagttgtcgtgcaatggagctttcttctacaaacatcaacatcttacaaaaaataaatgaaacggaataaaataatctcaagatcccactaagagtttagtgacaagctcagataccaattgaaattttttatttcaatattaccaatttatttaatttttttaattaaatgcagaataataaaattagtacttaaacaattattctatagctatagatcataattttgtaactccataataaaccaaaaaacaaattgtgaaaactataaaaacacacaaggtttttgtacgtagtttcaataatcattgcagattgtaagtagttcaagggaccacgcccagagataggattcattagatagatctcaaaaatataaagtaattgacttatgcataaatagactccctcttattgtatgctgcacgcttgatgtattctaccgtctaatcgaatcttgttgaaactt

SEQ ID NO: 86056 - DNA, 669 bp, Cannabis sativa
aaaaaaacacggtaaaaaagtaaaaaaataccgcatgacagtatttttgtaaaaaaatgacaaaaattagtataccatgtaaatttcccttttattttgggagattaacataaatttttaacaaacagtttttaaaaaatatggatttgcaaatatttttttaatatttttacggattttaattttctttttacaaaaatacgtatatttattttcacgctactgctacatgaaagcaattattaggctatttttagcttatttgtcggattacttcttagagcaatttgtcttctttgttgttattttttggacaattttacgcttgttttgtttgatttctagttcccaagatttttatagtgaaaattttgttaactaacgaagagaagaagagttgaaaatcgaagaaaaaaggcttgtggatttcttgaagctcgtcgcaacgagctcctctttggtcgagactaattacccccgcagcaagatcaaaccttggtcacggtaaaactactttacagaatcaaggatttcacttattcagtcgtcacgaccaggctatctatggtcgtggcgagaggctccgtacgggattaggggcagttttatatttttcgtctattttccaaatcataactaattcataaaaaatccaaattaggttctgta

SEQ ID NO: 86057 - DNA, 1030 bp, Cannabis sativa
tttagggacctctttcttaatcactcttgttgtattattctttaaacctagttagtctttaactaacttaactatcaaaaaggacaacttgcatatcgagtccctttgcctatataaattaagagaactactcctctcatttcataataagagaatacaagtcaaatacaagagagagacacaatacagtagagagagaagttagagtgagaaatggagagagatatctcagagagaaaaagggttgggattgggaaattgtattaagcaacattgttgattatgttggctcgggttagtgagttaatgagtgttgagggattacaccatggatgacttgctgtgattattttcttgtaagtactcctgagattgatatctcttattctcattatcaataaagattggtggcaatactttcaaactggagtatgaccaagttcacattgaacttaggatcagaaccagtataaatctttgtgttattgtgtctgacagccatttaaattcatctatgttatatttttctggtttaatgtgtttgctggtttttgttcttaatttgtttgtttaaatgtgatcttgaatttggaattacagagatgaattcctatgtatcatagctaaatttcgtacaaccctaaaaagataaaaaactttacaaacatctactttatttaattttaacatatatttatagatttgaagttttctttatttctttatttttattttttgaaaatacaaatattgtttttcacattgttttaacagctttatatatatactagattgaagttacgtgcattgcacgtatacttagttacatttttttttattattataacttttaattattataatatacaatattattcaaaaaaaaaaaatgtagcgcaaatattagaaatagttgtcatatcagtagagtcactcagggaatgtattttcaaccgtaacccaaaagacaataatgagtaaaaaatggcaaggaagagagcaatgataaagctcttagtggacagcaaat

SEQ ID NO: 86058 - DNA, 512 bp, Cannabis sativa
agatgttgtatataatatggctctttttttttttgctgtatttattcgatgaatttatcttgaacaaaaaatattgttagcgttatttttttttctgttagtttctttttattttagtattactaaagtataatatttacataattaggatgagttttttttagttattattattatcattattctgtataattttttttttgttagtaaaaaaaatatagtctagctgattttttatatatatattttatttttttttatatatcatatatttatattagttctttagtttttattttacactttattttttagaacacttttagatctacgattagactttttttttctttttattatttttatctttctatattaattttagtcctttaacttaaaaaaaaatcataaaaatttttatagtgttgagaaaaattgtgtaatagtgaaagtggtaaaattgagaatattctgtctaagaaagattagctttaaaggtttgtggtagagta

SEQ ID NO: 86059 - DNA, 733 bp, Cannabis sativa
  modified_base (579)..(593): a, c, t, g, unknown or other
ataaaaataaatctcatttgaagcatctattgtaatatcgtggtgatttaattgttttgcttggtcaatctctcatttgtttatatctatatccatatgttttaggtcatgttgtgagatggtttgactttcttctttgatgttgtaatagatattttggcatttctttgcaatgaggagtctatgttgcattttatgtcgctattcagggggaggtctttgatacactttgaattttcttagggggagcatttggtttcagaccatatcatttttggcatggattatgcttaatgaagggggagaaattctttgtttggttgtttaaagcgtttgtttttctttttctttagactctgctatatttcgatggttgcactttgttttgcaatattgttgtcattgaccataatttttcaagggggagattgtaagaaccagtatttttcgtagtgacaaattatgtccagttgcatctgggattcatagtgttagtgttagtccacatcagcaaagatattttgtgtaacaccttaactagcaaaggtgtgatatcgtgattttaaacgtactgtgcannnnnnnnnnnnnnnacgaggttattgaaaatcgtgaataataaaaatttgcttatttaattaaaaatttaaagtattacatatataagattttgggatcccgtttacaaaaaatactttacaaaagttgttgtacatataatcaaaagtttgtc

SEQ ID NO: 86060 - DNA, 874 bp, Cannabis sativa
ttttttttttttttttatgttaatacaatgtgttagtgcctaataactttctatattaatatatatagacttgttatttaattgtttgctcgttgttatttaattattcaacaaagtaaaaattaaatgagtatatgtttaatttttcatggtacatatttttttgaattagtgcattagtattttgtagtgtttttattttattttattttatgttcttttatttttttgagataattcatgtgttatttttaatttcttttagttgatgtctaattgttcaataaagagaaaaatagtctatgttttagtttttcagggtatatattttttgagtttacgtaagtgttttgtagttgcttttattttttttaagttataatttttaatttatgtggagatatttttatgtataattatttttaaattgattttttgggtttatgtgcctttgtttttatgtataattatctttaagttgattttggattaaagtgtagttatttttatgtataattatttttaagttgattttagttgttcataggtcgttattttgttgctaattagttgttgttgcattgacaaaaaatcactaattgcactttatccaaagttgacacttggcagtcacggttgcattctgacgttgcaatactgtgtgcgtcagtcaactttgatagttttgtcccctcactcgcgtgtaagtcacactcgcctgcataatccacttgtgtatttcattttctccttttgcaagtgggctttgtctctaaccgtacgtatttttgtaaataaaaaatttcgtaaattgtattttaaaattaacgaatagtatatatgtctagtttttctttataattgtataaatatt

SEQ ID NO: 86061 - DNA, 752 bp, Cannabis sativa
aaattaattttaattcctacaatgcagaaaaatataataataatatatataattctatactttcattaaaaaaaaaaaattacaataatgtacatatatatatatatatatttattatataatttacataaataccaagaatgaatggacaagctttccaggttccagtttgtttcttgagagcaggcctatttttaaaatcagtagttccatcctttgtatacatatcttgatcctcagccatatatatataatttctactaaatagtaagactatatatatataaatatatatatatatatgtatgaacctcaactcaaatataaattgatagatattccaagtattttgctgaaattttgaacatgtatattgtatcagagagtgtttatatatatgcatggcactcaattcaaaattaaaccacgcctagatatcaacgaaacgaaataataatagtaaatgtattacaatagtaggagaagagtaacgtccaattacattattaatgtgatattaaatgcatgggtgagaaaatcatttaatagtgtgattttgttctttcaaaaaaaaaaattaaaaattgtgatttgatctataaaattcaactcttttctcttttgtgctttaggttttgggattgaggaaagtacactctatatttttttttgggtaagttgaaaaataccccttttattaatcaattaattaaatttacctctaattttatatttatttaaaacatacctct

SEQ ID NO: 86062 - DNA, 635 bp, Cannabis sativa
aaaagaatataacatttacttctaattatatgcgtgttttgttttaaatataaagagaaaatgcatgtaataataaaattacaatttaattttttatgctttatatttgaatgatttatataatttgttttaatttatataaaattatgatatatatttacttaaaaaataaatataataatgatatagtaaaaacatatataatatatgttcctaaataatttgaaatcgataaataataataaattagtttataagaaatcataattcaaagtattctaaacttatttatctatttatctttatatattaacaataattaagtacaaaatatgagttaaatcattaaagtctaaatatggattaagagatgaaactgagattagagttgaagtttaattttgtgtgtgattatttataaaacaaaatatttatgatgtatgattaaaggatgattatagttctttttgaaaatgaggtgatcaaccttaatagaaattttaaaattttataaacaacagcacgcgaagcgcggtttgttttctaattctatataaattatataacagaattcttaatttaacgatttttttctgtttttacgttaactataacataatatcctattaattaat

SEQ ID NO: 86063 - DNA, 803 bp, Cannabis sativa
cctacagctactgaaacacaaaaccttactccaaaaccaattaaattcttaaaacaaagcatataacttaccttgattgcttctaggttgggcttaggttctacaagttacttcaattcaagagaaatggtgaagttttgatcctttgttggtaggtttttgggtcacacgaaggggagaagaaggagaagaagaaaaagttttgtttcttgccttggaagcttttcccttaaatagggtttctttttcttatctaatttattttcttattttatttttttttaaaagtcagcccataaacaattacaatataaatacctattctaaagaatgactaaattatcctccaagaaacttaaattttaaaataacttaggggcattatggtaattttactaatccaccgaactgacattctaaaattctaaactagtccggaatatcctcaaaataattctcccattaatgtcgtgacacttctgaccacatctctaaatttccacagtcgccaagcccaataaaatatttttatttcaaaaatagtatcctcgatacccacatatctcaatataatctcataattaataaattacgctatatatatcattcaataaattatcagtagttaccctaagtaagataataatcttactataattacatatttaataaaatttgtctatttaaatattattttatttttcgggatattacaactctcccccccttatagaaattttctcctcgaaatttaccttaaaagcttgggatacagcccacgcacctgcgactctaattcccaa

SEQ ID NO: 86064 - DNA, 624 bp, Cannabis sativa
tatagtggaaggtttaccgtgatttttatttaccacgagataatttcttggcgtgcatttggtgctttgattattattcgtaaaatactagttacattgaaagatatccgaaaattctgaatatgctctgtgattacagttgtgactgatctttcacatcagtttggaattgcagagtctccaatgtatttttccgcaaattttgatcctgaaggggaattggaataatgtccattattcccaataactggtatcagagccacgaggtcagagctctattcctgcaacgacattggttacgtacggtgtaattagttttgtctaggaggctggaatttaaatagtccacctgtgactttccacgtctttcctaggaactcacttataagggtgatcctgtctaggagactatccaggcctatcctttattgatagaccggcgctatatatacacaatcttttttgggaattgcctagactcaagaaatatgacatgccaaaaactaaaaacagagaagttcaacgatagctgttatttttccctctgacaaaggaggatgaaggatttccttattcagtagaaggtccataaagtgttattaggcatagagaaaaggcctagta

SEQ ID NO: 86065 - DNA, 1062 bp, Cannabis sativa
ccatggcaattccaagagataatattcatgatgatgggtgggcctgcataccaaggcccacctgtgattcgttttttgacccaacaagcccagcagctccactcaaccccttagccgaaactgcctcctcaccatgcacgacacctaccctccctgtacgtctccgcttactgtccagcaacaccaccaaatcttcatcatcattattctcctcatcagatgccaatgattgagcatctccatccccaccaggctgccgacacatcttcacactttccatatatatttctttctttttttgccttcctaatttcatgggatcatgatcaccaccatggtcaacacaatcaacatccatgatttttggggaagcatttacttcagtattcatcaccattcgaacggccggcgctaacaccaccaccgctccaccatccagatcagtccgaagccattgagagccaacacgataatttttcctcctcatatccgcaagcatagcagcaccgtacggcttcaccaactgctcaacaggttgttcaaatcgtttcggacatgaacgttccgaatgtccaataattccacacacaatgcaaaaagtagggaggtgttcatatttaaagtttgcccaaatccactctccattctccttacaaagcttcatccttctctttagaggcttagccaatatcaacccgttggtacgaacgtaaatattctcgccaaatgccattaaaattcttcggatcagattttatatacgtacctctatagccaccagcactccgaactaccctctccaacatgaaacccgatttcagatcatgaatctgaacccagaagtctatcttgtgtaatggcactaccttcgtgtcttctcctttcttcagtctatgaaacacaaggggacaccgattaaatgtccaagggctgccatctatgacagtttggacatcaagttcatgaaagaattggaatagatatctatttggacccaattctttgatgaaaacacccttacccggttgccaaagcgaggccatcaaatgcctcatcgcatca

SEQ ID NO: 86066 - DNA, 625 bp, Cannabis sativa
attaagaagtgttccatataagatgtatgggttattccttttattgccaattgattttgagatagaactttatgtacattaccatacaatcttaagttctataaaggtatcagagtcaaataaaactctaatgagtactcaatttaaatttaagaactagtctaaaaagacgagtaatttgagttgcttataatttgaggatattgagtcaaaagtgcgatcgatttaaaaggaaaagctaaaaaagagttgcttctgatctactgtgagccaaaagtattgtcgggctaaaaactgcgagtttaaaaaaattcttttgtgatatgttgtgagttaaaatgtcacttatgatccaaccatctaagatttataagtaaaaagtagctaggattttgaaagagtgttagaatctcataatattattaatatatagaaaaatattatcatacatcaaatatatggactattttattgctaattagctttaaaagtggaaacacgaatcttactatatgatctcaaattctgacaacaagatatatttacactataaatgaaaaataaataaataaataaataaagatatggaaaaagtagttaggatagggaaatttgacaatatatg

SEQ ID NO: 86067 - DNA, 628 bp, Cannabis sativa
atatatatatatatagtaataaattcatatatttgatctaaccaatgggcctggttgtgggcaccaacgaaaatgagcaagaaagtacttcaaatggtgtttaacacaatccaattcatcaaatataataagaggttaagcaagtgtcaagtagggagcttcttacaaagtccttgaattggatgaagaaaataggtatgtcattttttgattatgctctcttattgttttggttaatttggagtaaaaacttacaaattgatgtaatttttgggtactaacttatgtgtatgatgaagcatttaactattatactcttgtaattctttgctcatctatcttagaatataatgtgttttacatgatggttggttagtgcacagtttaatgagaaattttatcataaatttataggtgatagaaaagtgattcaaggagctagctctaaccgagtggaccaccgaagaaccgtacctaatgcattcattggaggaaaaaatatttgtgagagattgtaaggccatattagtttcaattgttaaagtgacattctatgtagaattttttttccatattctttgtaatatctcttttttttgcttcgtttttttttcatttacattccaca

SEQ ID NO: 86068 - DNA, 941 bp, Cannabis sativa
gttgtttgttactagttttgctgttgttttaattattctgttttgttttcttactgttgttttataaaagaatagtatttttgtaaaaaaattccgtataacagtaaaattataaacatttattcaaaatataatatttttgtaaaaatctctaaaaaaaaaataataagggtcctccgtgtgcgcaactacataatatgatatgaatgaacacgtctctcattgtattattttcaaatactaaggtccaacttgaacaagaatgtcaaggaataaaacccgaaaatcaaagaaagcaagtagtgaacttgaaatttgtttatatatttattttataaaatattatcagtacgtaacttacttacttaattgaataaaaataaaaccttgctcgatgaaataatcgagttgtttgttttaattagtagtttagtttaaattatatttttgccacataaattattcaataaaaaaattgaactaaaatttctctacattttaaaaacaagttgtattggaaggtcaaccgttacactctatttataaagtattctatataaaacatcacttttcccgtggcattgctgcttgggctgcatcccggaatttggctcgtttccttttcgttgaggaggttgctcctatcgttcagcgttgattatgttggttaatgaaatgttctatagttataaaaatatagcgtactccttaggtgagagcatcacttttgctctcacccatgagagcatttttgttgtattctaattggttaaataataaaagtgcatgaaattaaaatgggttagtaacatataaatataatatatattggtagttttttttttttagaaaaaaaattgctatttagttatattaatgttattttttttaaaaaaaataaataaattcaataccatacacgtatgaaatggtattgtata

SEQ ID NO: 86069 - DNA, 949 bp, Cannabis sativa
  modified_base (26)..(46): a, c, t, g, unknown or other
aaaaaaaaaaaaaaaaaatggggaannnnnnnnnnnnnnnnnnnnnaaaaaaaaaaaaaagagagaaggactttaacattaataattgataaaaataaaacaaaacatatattaaaagaacaagaacgatagaattatcataaacaaaaacgtaaataatttttttaaaaaaataaataaaattctatacttcacatttttaacaaagtagaaaataagttaaaattttgaatataatttatataactaataaatttatatattaatatttattttgttttaagataaattaaattttttcttaagtttttaaaataattacaataaataaatatatgtacagaaaattagaaaaaaaatcaaaaatttaatgttaaacataataaatttcttatttcttttttttattattacaattaaaattaaaaaaatatcaaaaataaaaataaaatattattattgttctcaagtattgacctacatgatgtcacataaattttactatataaaattgcttattttgaaaaaattcatctataattgtctaactaattaaattacttaatttatttaaaaatatatatatatttaattcaagttttaataataaagaatatataaattgtaaaattgacatagtcaaaggtattatatatatatatatatataaatatatattagtgtggagtacgtgccattggcacgtaatcccccttaaaatatgtgagttataatcatatatcttactttcattaattttgtttgaaaaaaattaaaataaaaaaaaaaaatttaaacaagaacatagtgtgatataggttcatttattgatgctaagatcgtcagtcgttatgtctaaatataagctcatgtgatttatgttagacatttatatgtataaactgaaacatatatgattatgtataaagtgcggaattaataaaacata

SEQ ID NO: 86070 - DNA, 759 bp, Cannabis sativa
tacccataacataattggtcacttaattttgtatcacactttataatagcatatacattatacatatgtgcccacaaatgatttttaatccaacagtttatatatatgctaagaagaagaacatttcataaatgttattgtcatataattattaatttagaataggatttcataactttatacatattatatatatgaattccaaagtcaaataactacttattttgtatgcatatgcccaaaagttgtattgtatatatcttttaggagcctcttagataaatattttcagatattatattcattaattattttagtttcgaaagtcctttttatgctaattatgttttttttttcgaacttttgacatatattaataattagagttgaagacttttgtctaattttattaataaaaacatgacgtggatgaaagctcataacacacgaattggtatacatgtcaaagtttgatgtcacaatttcgtagatgttaaagtttagagaatataattttatacatggataaatcgtcgtgttattagtaaaattgaacagacattgaattcaatattctcaatgttacatggagaatttttaacaatctaaaatattcacaagtataatttaatgcatgttaaaattcaaaatcaaaaaactctaattagccattaaaaatatacatattttacttatttaaatataaaaagaggtatattacatatgatattaatttaataattagttcatctattttaa

SEQ ID NO: 86071 - DNA, 2391 bp, Cannabis sativa
tatatacaactgacatttgcaaaaacacagtttttcataaatatacagtcatccttatatattaataacaccgtgtaagaaatgattaattatgtaagttcatataaaatattctaatattttttcacctggactacataattaaactaataagtattcacaaaacaatagtgtgtgtaagcaacaaaaaatttcaagaaacacaaatatctgtaaaccaattatgcaccatactgtaacgataagatacaaatataatacataatgagacatttagagattcacatgagcataaatatgactattaatatggatccactcatgacgtagcacaaaaactaagtctctagctcacatcaacaagtgtgcatatacaaaattaaagagtgatccataatatcacatgtattcaacaaccaattgtaatctttaacatgtctatcgtacataaaattggaactcctatcgaccaaatacatcattggcacctagctatctaattaaaaaatattttcttagtacataattttaggtaagtcgtgttagtctagtcgttgacatgttatatgtaaatgctagttatgatactaatagaggactccataactttctcattacatatgagacgttatcattatcaatagatcaacaagactcttaaagttccaagagaaagatataacttctatattcatcacataggtttagtaaattcacattagagtcgactactcttgacattgaaacgaaatatcacaattatgatatacaatcaatcaatgtcgtcgtaacacgccacacattatacctttacaaatgagaatgttgtaaatgttcatgcaacacctaatcacatataactccccttactaaatactcgctttttatgagagaggaagttgtaagtgttcatatatgagacctaattcaaaatagctagctcctcctagaatcattaatgtttataagtagattttatcatccatgcaacattttcaatccatatcactaaaaccaactactatgttataatattggtttgttgatgactaacacatcattggtactataagggtgacaactcaagtacaaatctagcatgcatgcaacagatattatgataggaatgcatatacgtgagtgaactctagactgcctttgataagcatacatatatatgtgagataattttaaaattgatctctcgtcttactaatatacatagactttaggtcgttcataacacatcacactttagacttaaaaactctcaaagaaaacaaaacattaatcacaacagttgttagtcaatgcaaactataagacaatttagtctaccattaatctcatcataaagcatttaaatattcaaccatgtaaggcttatcaagtattcttcatctgacatatattatcaaataacaacttaattcatctccaaaatagatcaaaatcataaaatatgagtaatgtattatatcaagtgacagtataaacatatcattgctccaactgatctcttatatagtactaattaacgataatatttcgaattgactatttttataattacagtaattattatcttgatgcccttcatcaaaatagatttaatctactgaactcgggtttccttgtcagttacattcatcaagccatataataagatatggtctttaaacaagagtttatttctcacatccgtgtataatgatttctaaatagtcaccactttacaactcaataacaataatgcacaaatcgattgctagagtggagactctctataggctttgattcaccttgattactttgatcatcaaacaacttattcttaaaataaaccaccataaaaaaaaatcttctaattattatgggattaagcctaaactttcacgctttattatagcttgaaaaatgtgatataatcatatcgagtctccaagtaattaaagattaagaactactaatggctatcgatgagatgtttagaggtatataattaaattatctcatatatatatagaatcatagatttatcaaactatctcgattttttatctttatttgtctacatattgagttttttactatactctagtcaactgtagatagtaacagtgggagtaacaaaatgtggaataaattaatctaattatttcctaaatagtattttaacttttataatactagtttataaaattctaacataaataattaacttgatatacttgtcaacaataatagctagaagaaacaacataaaaaacttgatattctctataaattatcctttgagatgttggtctttccttacaaccaaccaaacataatatattgaatatgttgatctttcatgagagtaaaaagtgtgaaagaggtagatgaaac

SEQ ID NO: 86072 - DNA, 1129 bp, Cannabis sativa
atggtgaccaagattttgagaagtctcaccaaagcttatcaagaaaaagtggttgccattcaagaagcctaggatctctcaggacttccgttggaagaactaattggttcactcatgaaccatgaaattttcatgagtgctcaagaaaaagaggaagttgagaagaaaagaagactattgcattcaactcttcctcttcccatgccattagtgaagagatgaggatagcttgtgtagtggcatggaggacttggcactcttctccaagaaatacaaaaagttcatgaaattaaaaaagagctttggaaagaagccacaaagagggggtgactcaaaagaaagaaagagcaaagatgatccaccaattttctttgaatgcaagaggcccgaacacataaaaatagattttccaatgaacaaatacaaaagaaaggcaatgttggcagattggctcaatagtgatgaggagtactctaaaaatgaggagaagaatgaagtagcaaatatgtgcatgatggcacttgatgatggggtaagcatttctagccaaaatgattgtgatagtgaaaatgatgatgatcacttagatatatcacatggtgagttgtctaattcatttaagaaactaattaataatgttggtaaatttcttgctaaaaaccaaactattagagagaagaccaacatgctactaaaagaaattgagatttttaaattaaatgaaaatgaacttttagctaagtcataatgtgctacatgctcttcatataagaaataaatttttgatttaaatgctcatgtgaaaagcttaaagaatgacatatatgcatttactagaggtaaggaatgctatgttctcatgttaggaagtcaatgatgtggttttgcaaaaagtggcattggcaatgatccacgtaaaaaataaaagtttttgagaattttttttgtaaaatcatctaggctacctcactttacatgcacatattgtaaccaagatggtcatactatttcctattatcatgtaaagaaatatgcatatctaggcaagactaaatgggtaccaaagggctctaaaactaacaagaaaggacgaaaagttatgtgggtacaggcccggccctgggcatag

SEQ ID NO: 86073 - DNA, 750 bp, Cannabis sativa
agggcataaaacccaacactggccagccatagggggataccccaaaaggttgttggcctatgcctgggcatagggaccctgggcggcccttggctaggtcatgggacctggccgaccctctcttagcttgggaaccttggctggccaaggctaaggttctaagtgggtggtaattttttgtcctcttttgacctctgcaaggggttagtgacgaccttgtaggcatgtataactgtaatcttatacgtggtttccttgggaactttgtataagacatgataatgagtccattatagtcaagtgcacaaacttaggactcaccatttgtctaagtagatatacttgagatagtactttactgatacttagcctcgtacagtgtaatttatctggcaagtacccttgggtaagattgccagaactttgtctgtatcttgtagcttttttgggttgctcacctccctttgtctcttctatgtaggtgatttcgattgttgagatctagggaggtgacagtcgctgtatcataggtctagtcactcttacttttgagagatagcatccagtctgtcccattgccaccttctgggtgatttctggactcatagtgatatatatagccagaactaagtagtcgtgttgtagtgcaccaccatatgaacctcatgttgcgagagtggcaatgatgggtgtcacgggctcaccttttcaagcagcggttcacccgtgcggcaccttgacttctctaag

SEQ ID NO: 86074 - DNA, 543 bp, Cannabis sativa
atgtaaggcttttcattcgtctgcttagcattcccgtattgagtcatgtagggaagttcattcttctgttcaacttttccatatgctgttatgtataaatggtcattagtctcttcaatattcttatatgtagttgtgcatgggccttcaatcttctctttatcttttccatgatacctagtgtaatgttgatttattacagcatcaccatgctctttttgctctatttcactagttttaggaccatatccagctatgtaaccttgatgattatttacaagatcatcagacacctctgcctctctagctccaggaccatatccagatatgtaaccttgatggttgttaatgaaatcattagacacttctttctctttctcaatttctctagaaccatatccagatatgtaaccatcatgattgtttatgacatcatcagacacttcttctcttttctcactagttcgaggagcatatccagaaatataactttgatcaccctgttgaatattccttactccactagtgcaagactacattaat

SEQ ID NO: 86075 - DNA, 2042 bp, Cannabis sativa
  modified_base (1031)..(1043): a, c, t, g, unknown or other
  modified_base (1239)..(1243): a, c, t, g, unknown or other
  modified_base (1279)..(1285): a, c, t, g, unknown or other
  modified_base (1978)..(1989): a, c, t, g, unknown or other
aagaaccattggaatgtgcgaccctattatcagtaaacccacgttgttgctgtaaactctctttctgatgtaatttttaaattcaattattaatgaagttgaagaattttccaagtaattacaaagtttttttttctttaaaattacttgaggggcatatatatgtatgatcaattagaatttatctagaaatacataatatattgcaaacccattccattctaaattttttaaagtttttcaagtaattgattgaagtcacctatgaacgacgcaaagtcaaaggtagcagttgtaaatgagatttaactcataaaaacaacactaagctacatgcaaagctgaatggctaacgactcgcattttataggaatgtattaaaacgacgcactaagatgccttgaaaaaaatacttaacctaatgtgtgaataggagccttaactattcatacgagcattcaaaaatatacagaacaattcacaatgtgaattattaaaagtatgtttaagtttgcttaaatcagattataattccttacgcgaagaagagctaataaactgctcgcaaagcataccaggtaacaactgctcgcgtacatcgtagattattaactacttaagcaatgtaaaaggaaagcaagatcagtggaaatctttaaagtattttagatttgatcaaagtataattgtttaaattgtgagtaaaaatgcaagtaagcaaatatattaagttcaaatgcaaaaatacgaggcaataaataaaagataaaataaaaagcaaagttggtcgtccaacaatgcaaatttatctttacattaaaaattccacaaggggaaaactattgtctcggccatatggccattttcctaaatatataaaaaaaacagcttaaaaatcgagcctacattgtaggagatttggttggatcttcttgttccacttcaacctcttcttcctcgcctaattcttctatactagttaaggtcggcaaaacgggccagacacgatgacacgactcgaaacccgcacnnnnnnnnnnnnntttgggtttgccttaaatgggtttgggtcgtgttcgggttaacacggctaacacgatattgacctgttaatgacctatttaaagttattttagtaatttaacgtgttataaatgggttataaacgtgttaaatacttcataaatgtgttattggttgacatgtttaaataaaatatgcttataaacgggttacacnnnnntgtcgtgtcaacccgtttataaacgggttgtgttcnnnnnnnatttttttgacacaattattaaacggtgttcggtcagcatgtacctgttatacatgggtctcgacacgacacgaacacgacccgcaaacacgaattgccacccctaatgctagtcttctctcaaaaggcaagcatggcatcaacattgtcacctagaaagttgaaatccaaatcagggttggccaaccagatttgatagatggtcttcctcccaatgttgttgaccctgtctttggttttagcctccatctctttgagttttttctcatgatcaacttggagggacttgagagaatcctcgagttccttgaccttcttttggtcggccagacactgcttttctgcctcttcctttgtgtgagaaacctcagccttggagtcattccaatttttggatgtagtatccctatgctccctagtcttgcaaagctcagtctcgagcattttagcccgctcagacgaacaatgatgagtaacataggaaaggagagatgcctgcaaggagaaggaaaatcaaagttggtaaaaatgataaaatgaggaaaagagagaaccaggagatagggaaattaacctgatgcaaaagctcgtaactccttttaggaagatccacagaactgcttgcgtgagaagatcctagtcgttagaccccagagtcaggatgttacgcctgttgagttttgtgccctaaannnnnnnnnnnncaatataatcagatttactaattgttgacttcgcttttagccaacgacaatga

SEQ ID NO: 86076 - DNA, 947 bp, Cannabis sativa
ttttgttgtttttgtgtatttgtgaaataatccctttaattatacatatgatagtagactccatctatatttatcccaatttgctcaaatatgaataataatacaaaattaaattaaattaaatatctttaatcaaaataattttacaatagaaaactataaaaatatttaattaaactaattgtatatccataattaaagatttaaggggtatttaaataaatatgagaaaaataaagctagtttagatatatatggtaaagaaacgtaataggaaaaaatatggtatttaaaataaaaacttaacatatatgagattgaattaccataaacatattaaaattcccttcatattttttttaaaaaataaaataaatgaaactacaatgatcgtcagagttgtcaccagtgccgaaaaaggcgtcagagtttgctaaaaaaaaagtagttgttggtgccgggaagtcaccggagttgctgtcggcactgtaaaagtcatcagaattggcattgtcatcggaaaaattactaaaaaattcaccaagaaactagtttcttcatcaagaaacttcaaccagtttcttggtgatttttcctgcgacaatgccaattttgacaacttttctagagtttgctgttagtaccgagaaagtcgtcggagtagctgctggtgtccgaaaagtcatcaaagttgctgccggcgccaagaagttcgtcagaattagcattatcgtcgaaaaaaataccaagaaaccagtttctttacttcatcaagaaactggtttcttggtgattttttgggcgactatgccaattctgacaattttttcgaagtttggtgtcggtgccgaaaaagttgccggagtagttcctggtgttggaaaaatcgccagagttattgccggcgtaaaaaaagtcgtcagaactggcattgtcgccagcaaaat

SEQ ID NO: 86077 - DNA, 854 bp, Cannabis sativa
tagttttgtgtgttagttttttttagttgctttatagaactattttttgtcttaaatttttaattacttcataaatataaccagtttatttgtttcatattctaacatccaaaaaaaaaaaaaaaaaactcagacatctaattctagtgacaataaaaattctgatgccttttttgacagtgataaaaactccaatgacttttatgataatttttctgatgactgtaaaaaactgtggtgacttttttagcgatgatagttacttcagtgactattctagtgataatggttgttccaacgatttttccgacaataataactgctacaacaattttttggtgatatttcttcttaaaaatcttgttaaatttatttataatattttgttgggatattttattatttatttattttttgaaaaaaaaaaaattgcatgtaattataaattattttttattacaaataaatataaaaaaaaatacacacagcatgaattacgaattactctaacataagttagaataagctattttgaaagtttcaaaaataaaaataataaaaaaaaaaaaataaaatagtatggacatgatctcatacacctagattctatttacatttcattttttctatattttgattggtttattttaattccctatggtacgagaacaaaactataagtcctaccttagatcttccctataattttttttttttttttctatattgcataacatgtcaaaaattaatacaaattaaatatgcttttactgggattagaattagaactaatgacctcctttagatgcatgaaatgactttaccattataccaaagcttattttatgtgtata

SEQ ID NO: 86078 - DNA, 691 bp, Cannabis sativa
cacacaaacaagttgacaagtgatgagaacgcttcagcacaaatttagaacaagtagggagataaaggatccccctgatgaattcctctgcttggggatataggccccataactttgccaccatcagtaatcttgtatgtaaccgaggaaacacagtacataataaacgaaacccacctactagaaaagcatatctgaaccatcatcttctcaagaaaagtccactccaccctatcataggctttgctcatgtccaattttaaagccacggtaccaactttacccattctcttccttttcacgtagtgcattatctcaaaagagatcatagtattgtcagaaattaacctcccttgaacaaaagcactctgagtttgtgagatcacacaaggcaaaccaaccttcagtctatttacaagaaccttagatatgatcttgtaagcaacattataaagcaaaataggacgcaaatccatcatggactcaggttgttttcttcttaggttgagaacaatattagtttcattgagcataggagagaagtaacctgtatcaaaaaacatcctgacttacgagataatatcatcacccaccactgtccaacatttttgaaagaatccaagtgtcataccatctggcctaggagacttatctgggtgcatttgaaacagagctcttcgaacttcaacat

SEQ ID NO: 86079 - DNA, 916 bp, Cannabis sativa
  modified_base (483)..(486): a, c, t, g, unknown or other
agtaagaatttccttcacgtatatgtattcttcaccaacatgggcaggagcaattgtttattttaagttaatcaaaattaatgatttatcacatatattctttcaaaaacgaaataaataataaatgatttcaaatatataaatatttccttcaaagagaaaaaaaattgacacaaaagaaaaatatgcctttcacataagtacggaaataggcctaacgtccgaaagtggcaacgaacttaaaaatattgttttattaaaatagacttaaaatattttagcaatattattgttgaccctgaaaagtgatcaactccagcggggtcgacaaatctgatgcttgtcaagtgtatacacaaataaagagtaagaaacaataaacaatgagatttgttatagaagttcggcccccttgtgatagcaagtaatgacctactcccattttaattgtatttattggaaatattttacgaggatctagannnnctaacaagtatgttaattaacatcctaaatatgaataattccaaaacaatgaaataaacacataagagtttaagaaaacgttacattgattgcagcggaatataataactcattctgttccagatctctagcccttgattcttttctgtcgtagaaaattatcaatctgaacctggatctctttctcaccttcgagtttggtaccaccgtcttactcgctatgatagagtacttgacttgctatgtgtgggtatgacactttttcactaagggttcgaatatggtgaagaacaatgtaggaggctgaagtgactatggaagaaagtctctcatctactagttgtcagagaatgaaaactagatttggtaggttgaatagtcaagttgacaagaggatgagatgagagcatcatgttccttttacagtgtt

SEQ ID NO: 86080 - DNA, 976 bp, Cannabis sativa
ggagtagggtgtgcattctaaaattattaggtggtttgggactgaaagcagtgggtgattggaacattgctgcagtgtttaagtacatttgggcagtagcgaaaaatgaagataatctctcagataaataggttctttgcttgtatatcaaagggaaagattggtggcaatacagtgccaatccaaatgatagttggtacaggaggaaattagttgctttgaagggtagagccttggaattgtttgatgtaggggaaagagaggattgttgcagcaggtataatatagaaaatggctatcaaaaatggctcctactggtgaaaaaaaaaatggtctactgtggtatggtgtcggatcaattgccccaagcacaggttcattctatggctgtcaatgttgcagaaattgaagacaaaagatagagttaagaaatacaaaccagaaagtgatagttgctgtcttttgtgcagcaataataaagatgagagtattgaacatctcttctttgcctgtccgtttacacaagaatgctttgtgttggtcaaaaactggttgggttggaggactagtgcggtgcgatgactatggtgcgtgctatcacttggatagggaaagcaaagatgagcaagtttaagaaatcggtgttcgctgttgcacttgcagctctggtttatactctatggagcagtcaaatgccaagcagtgggaaggtaaagataacaattgtagggctattttccaacaggtacaaaatgtaactaaaagtagagtatcatgtatatggccaaagaatgtatctaattgtgataaagcatggtttgattccttgtaaatagtatagaatgtgaggtcctctctttttacttgaggatgctctttgggtgtataaattatcttttggagtaatgaaatatcatcttatccataaaaagaaataacttttacaatataaatcacgcaggaatatagatgttag

SEQ ID NO: 86081 - DNA, 743 bp, Cannabis sativa
atttatggtcggctcctttgagaacttttttttttgttatttacaccacatactaaattttttaattttttatactttcactatgttaattttttatcgttgttctacagttattttttaattgttatactgctgtttttagttgttctgtattgttttcaactgttgttatataaaaatacagtatttttgaaaaaatttacatgtgacggtatttttgtaaaaattaatcaaaattctagtatttttgtaagttttatttatttaattttttggtggtgttttctaaaatattttttaaaaaaacaaatagtttaactataatattaaattatatatgtagatatagtaaattgatcattttattttgcgtaccaatggatgatatatttcaaattcataagaaaagtatcttaatttaaataagacatttatttttttttttgaaacaaaataagacatttattaattgttactccaaatatatttatttattctcttttcaattctcttattttctaatttttattagatttatgaatttatgtgatattttatagtaaaaacaattatatcatatatagtcatcaaagaatatctacctatctatttatacttataatttaatttataattattaattaaaataaaattaagttagatatctattctatataaagcgtgcctatataactgaaattcttgatttatgagaaatttatgggtgactttttatttttatt

SEQ ID NO: 86082 - DNA, 2539 bp, Cannabis sativa
ggataacaccttgctttataaatccttctcacaactgagtcttccttagtagcaatcgccaaccttgtttctctaagaaagaaaggttacagtcacgaagatcacgaaagcctaacccaccaaaatacttatgttgacaaagacgctcccaactaacccaactaactcccttgctcgatgagcttgactgagatttctaccaaaacttcgccatcataccttctagacttgaacaaatttattttgttaaaagaaacatactcatagcatagcttggtaaagcctaggcaactgactttaacaacacttccttacccgctttcgacaaaaatttagttttccaactaaaaatattcttcctcattttttcgtttgaaaagccaagaattacatttttattcctccccataatgcaggggagacccaaataaaaactatcttcagacgcctctctcaatcccatgaatccacaaacccggttctgaacatccacactagtgttcttactaaagaaaactgaagagttggtgaaattaaccttttggcatgacgccaattcgtaactatttagaagatgaatcacattttgagcctctctatcattggacttacaatacaaataactatcatccacgaaaagcatgtgagaaaccatcggggcaagtctagccacaaggcaaccaatcaaccaatgatgtcgttcatatttcttcaacaaggaatataaaccctctgcacaaatcaagaacagatacggagatagtggatccccatgtctcaaacctctgccaggattgattgggtccattgtatgtccaccgtgagtcacattgtaagttaccgtagagacacaaaatttaattaactgcacccaacgattactaaaccccatacaaagaagcaagttctcaacaaaagcccatttaacacggtcataggctttactcatatcaagtttaatagccatagatccatccttgccaatcctttttcgcttcaaatagtgcatactttttaaggcgaccattacattgtcagagattaaatgtcccggatgaaaagtactttgagtatctgaattacagccagaaaaacctcttttaatctattagccaaaaccttcgatattatcttatagagcacattacacaatgaaatgggtcgaagatcaatcatcacctctggttgtttcttttttgtgcaattcaatattaaatcttagcacatatatactaatttaataactaatattaaaaaaaatctgatatcctcttttgaaaactacttatcatcttaaggttatcttaaggtataaaataactaaactctagtaatgatattagaagcacaagtataatttcttgttatagttatctttcaatattactagtctttttttatttaagcgtttatatattacaatgtataaatataaattagaactcggacccaaaacttctaatatacacgcacctttttatagccacttgagctagcctcaagtataataaaattaccagtgtgtcagtataatgattcacatcatttctacgagcactcacaataaattttatactatattttttaaaatacatcactaaaatttttcattcttattttacattaacttttttccattccagcatatagttttcctatattaaatagtatatatttaaatattttaattacttaaataaaaaaatagaaaaaataattagtaggagagagaaatgaattgacaaaaaaatattattaaaaaaaataaaaaaatttaaaacctctctacttgaagatctctattttaaaaaaaaataagtttaaaggtgatgatgaagcattaaagtctttttctatagactctattttaaaaagagcttttttttgcggctaaactctcactattattttacttgcatttaattccaagctcaaatagtagtaaaaccctccaaactagcaaattcaaggtgtcatcaatttttcacagttaactgccaacttgaattacttatgtgtgcattcttgtacacgtaacacgtttatatttatacacttaatattattatttaaaaattataatatatattttttgaattttatttaatatttttaaaattaatttaaaaataatttttaaataataatattagttgtactaatataaacatgtcacatgtacaaaattgtacacataaagtggcagttaactatatgacacattaaatttgttaatattttagtattttggagctagggtttttactattaaaatttgagctaagtataagtaaaacgaaagttgaatgggttaaccactaaaaactcttttaaaaaataagtttaaaaatgaagatctctatttaaaaaaaaaaatgagttaaaaaataataaccatttcctttttaattttagagaatggaagagtttttaagaattgttgagagtgctctaattttttttttttttttttgtattagttatagatttggtaaagtcatttagtggatatttctttaaggctaattaagattttttt

SEQ ID NO: 86083 - DNA, 698 bp, Cannabis sativa
gcccattccaaaaatctatggctatttttcattagctccggtaggattccgaaaagggtgtagattttggtggcagttttgttgatatttttggaggttgtgggcttgtagtagaagaagatgaatattatagagagagaaagtaagagtaattggagagagatggaaaactccatagatggaaaaagagagattagtgaagagctcatgatgatgatgatgatgatgatgatcttgagtgttgtttgtataattgcaatgattttggtttcttttatagaaggaaataagcctataatacaataatacaggattaattattactattgcataattattattttttttttgtaaggttgcgttattattattttagttttataataaggttttaataaaatacaggttgttgttattttaacattttaaatgttatctttttgtattttccactatacgcaatgtttctctaaataattttttttttcaccaaatattgttacatggcatctttacttttaaatttttaactactaattaatgtgatactttataattgattattacccaattttatattatttattaaataaaattttatggaaccacttttttttgttttttttttcaagttgaaagagaatagtttaacagatgctctgatgcacctgtttcaacatctaaaaaaatattttaat

SEQ ID NO: 86084 - DNA, 805 bp, Cannabis sativa
cgaaaatgaaaagttttgactctcatttccgtaaaacagcaacatctccaagaactaataaccagcttagccagagcacgaaaataggctaagtgatgtcaaaatatcacttagacataaaaaaaaaaaaagtacatcctaaggacgtttccccactcacctagtgtccatatggacgtcatatatcaacctgggcgttgggatgtcaacctaggcactagattatgaaatactttcagtaaaatagccataactcactcaatattgatttgattaatgcaattcaacttgcgtttcgaaactatttcaatgctctgtcaagtcatgtatcacatttcaatcgcaattctgaagttatcgacctcaaattttaccgttaaaggagttatgaaataagctatggcttacccagagcgggtcttgccgccgcaattcggactcaaaaaattaactatcaacctcagaagttagtttttctattgctttaagatagtgtcgttggcctagtctttttgagctaccttgtatgtaaaagcttttatttattgaataatatacagaattcttccaactctctcgtctaacaccccacaaatgaagttttgattgtcctaatttgacatcattgagtaaaacacccataactactcatgtgaactccaaatacgatgattaaaaatgatttgaaaagcttaaaatgagatatgcaacttgtatttcacaagctttcccccatagatctgagcatggtcaaattcaaggtttaagttctagctaattcccttgagatcctcactatgtttca

SEQ ID NO: 86085 - DNA, 774 bp, Cannabis sativa
aataacatagaaaaaaaattagcacaaaatttaatatacgtgactcgcacgtaactttttactagtatatatataaattcaattcacgggttacccgttaaaagcatactttaatataacaactaaaactcgattgaggtgatggttcttctaagagttggcggagcaaaaagcaggagtgagtgacgaacagtttgtagagaaattcggtgcgatttggtgagcagcgagataaagaggacgtcaaagcctggtgtgaaatctctcgttccttgaaggtttttttttaaaaaaaaaaaaaaattatgttgggtgtattaaataatatttaaaaataaataaattaaagaaataagtaaaagtatagcactcacatcttctttactctaactttaaaatacattactatttttttttttatatatatatattttaactcaatttttttatattacaccatacatcaatttcttcaaaatatattgcaaatatctcactttttttcaaattttaatatattttatttatttcaaatatataatattaatctatacacttacccccatataaaaatatgatgaattttgtgccctatttaaaatcttatttcaatataatcttgaatttcattatcaataaaattaagagtgaggattattttattacttatttagtataatgtttgttttacatgtttaattcatgattatatgtttgatatataaattctattaaatccttcatgattatatgttttatttcacattgctattc

SEQ ID NO: 86086 - DNA, 612 bp, Cannabis sativa
tatatatatatatattttataactttagttatatttatataaattttgaacaatattttactaaatcgtcatataaaaaaaattattaacaatagaatttaaatatttacttataaatactccaattttaatatcacactctataaataaattaatatataatcttaattattcatatcttaataattttaattatagaattatattcagtattatatttaagttttattattatttttaattaataaatttatatcttattattattaataataaattatatgatttgttaatatatcgtgacgtgtttttcaggtttgtcgcgtattgtactttttgggttagtttatttgtgcttacttgtcgtgccttcgtacttctcgtgttgtgtttaaagatatatttttcgtgttgtgtcatgtcaatttatagtatcgtgtcatgtcgtacctaaacccatattttttcgtgcctagtcatgctcgtgctttctggacttgtgtaagttttgtgttgtgtcaaaaagtcacacccgtatatacaagtgttcataatataaaattttgagctattttatctcacttgatggagtgctctaatcattcatgtcca

SEQ ID NO: 86087 - DNA, 756 bp, Cannabis sativa
tatctatactccaccaaattcgtagcacaactgttgggtgctgctaatatctctactccatcaccactgcgttttagaaagggttctgctccagcagtagcaccgccacctactggtggtagtttagaagaggtaatcttaatgttatattatgaaatgatctaatacaaaattataaatatggttcatttacaaattgaattgttactagcttgttatttggatttgcaaaccttaccgtgttggatgcactgtcggttggagcctagtgggatggtactgaaggttgttttggggcacattatgaaggagaaaaatttgaaagatagaaagttcttgattcaaaatgatgaatacctacacaaagattatcgtcgggtattcattgaagaagtcaatgtggagaatgcattgcttccgtgtcccataaccgaagatgcattgacaacagtaggtaaaactataaaaagttacgtagcatggccgaaagactatcttacactagttggaaaattcttggtctgtttgaatttaattacttaacttattgtgtttattgattaatgacattgctaattatactgttttttttccatatatatatatagacacaaccacccaccaagcaactgcagaagtaacccgtgaaaagaagcagataagcctttaaagatttacttggtcctccaacacaacctccaaaacaccctgagaggccaagtaagccaacaggccatggtcgttatgtccaaccac

SEQ ID NO: 86088 - DNA, 670 bp, Cannabis sativa
catttcctccaaaattaaagaaatccaacacactctcaagcaagtgcataattgtgctactcctacggattctcagcttcaacgtggacgtcagctggaactcgatcttgataacctcttatataaggaggaggaatattggaagcaacgatctcgtatacagtggctcaaactgggagacaaaaatacgagatattttcaccactttgcttcctcaagacgagcaaaaaacaaaatcacagctcttacatgtcctgacggatctatagtcactgactccgaagcactcgtgcggatgattgagcaccattttgaacaactcttcaccagccaaaaccctgagcaagaaatcattaataatgtcctttctggcctcaccaattgcctctctgaagccgaatttaattctctcagtcttccttataatgattctgaaattaagagagcagctttccaacttgctagtgacaaagctcctgggtctgatggctacaatggctctttcttccaaaaaaactggcatattgtgggcactgatgtccttgaagctgccaaagggttcttaaatggagatgctaacattgaggccattaaccacacggtcatagtgctcattcccaaactctccaatcctcaaatggtgaccgattatcgacccatcagcctctgt

SEQ ID NO: 86089 - DNA, 724 bp, Cannabis sativa
ttttttaaaaaaaaaaaagtcttagttcgcttaaattatttatttgattttcaatattttttgtgtgattttctcagagaaatgtttataaataaaataaagtttgaaaatatattgtttaggaataatttaggttttcttaaataaatttaatattttttaactaatttaatattttggtcaagttttttaagaacttttattatttactcataattaattgaacattataaatatttaaaattaatattttcaataaaggagggcaaaattttgtaggtgacaaattaggggataaaaaaaattattttttaacgtaaaagaaaagaaatctaacaaaaaaggcataattatgtaattgttatagtttaatgagaatttttaacaaattttatagttgaaagtttgggggcaaaaatactaattattgtttacaacaaaaagtatattaaagaaaataaaacaaaaatcctaaacaaaaaatgattattccaaaagaaaaaatatgatattcatcaaacaaaaaaactttgatacattcatataaattatttacggtgtaaataacatataaatacaattttaataaagtatatataaatatatattatttccacgtactgttagttttatttaatattttaattttttattttaattaataattaaaatagtataattatttgaacgatttgttttcaaaaaataaaatatgtgtcagtat

SEQ ID NO: 86090 - DNA, 766 bp, Cannabis sativa
atctaaaagagctatggcactaaggtgcttagcactattataggctaacgcctaataattagttaattatattttataatatttattaaagtaaaataagtgaaatctgatattaaattacaccaataataatattacatctgacaagagtattaggcaccataaataccctttaacatttctctaaatataatcataccacatacatatacatacatatatagtacataatgcaatattagttaagttaggtagtaaatatgattttgcaaaaaaacgtatattgggcaatatgttatacaaaccccttataacaaccctacgtacataattaaataacataatagctactgtaccaaactcttacaatcaactttttcatcacctatatatattgtgaatagagaatcacaattaactcactcacatctacttatattcaagtaagaaaatacaaagaaattaaatttgtgagtatgaaaaataataaacttattatagttgtgacattgttgttgtgccttattggattaaccaagctggccaaagctgatcatcacaatgatgatcatcaaaaaccatcatcactagatcgaaaaggtctcttactacccaaaatcctacacaaattacctaagccatcactgccaccactaccctctttgcctaaacttccatccttgccaaaacttccatctttgccaccactctctttgcccaaacttccaactttgccaccacactctttgcccaaacttccaacttt

SEQ ID NO: 86091 - DNA, 912 bp, Cannabis sativa
acatttattgattgattataattttatatttttgagcattgtctaccatttatgtttgctctgtgacagttagtctttttctttcaactttatggttttagttagttttttcttcatttctcttttcttaaccgttcctaccatcaccttcttccttcttttttcttctggtttttcatttcttctggtttttcatttctttcgttgtctttttaagcaattctcttatgcatatcatggattctttccttctagatatctctactgctctaactaacagagagaaggaagttatcactatgtctaacatagctttgcctcctccacgtaccatctcacataggctgctacgcaaaatctactcaaaaagaggttataacccaaacagttgaagaatttcatccatcaacactggcaaggaagatttgctatcgacatatcagattatgaattcgactccttgatgattacttttagttgtgaaggtgacatgaggagagtgctatctaaggaaccatgacactttcataatcaacacatgattttgtgtctaccaagtgttttgcaaaattcctctatggaaaaaatgactactacgccattttgggtccaagtctaccgactaccatttcttagtaaattaaaagcacttgctcgtgttatgggaggcttagttggttcttttattgatgtgcacgaagactctttaaacgaaggttggggttcttttttacgaatttgggttggtattgatgtctctaagccacttctcaggggacaaatggttactctcccatggctggcggacgaactttggcttgaatatcgctatgaaaggttgtctgatttatgttttgagtgtggtatcataggccatgtctttgataaatatcctctgttcttggttagaag

SEQ ID NO: 86092 - DNA, 566 bp, Cannabis sativa
tatatattggctttttaatttattaattatatcatgacaaatatttttcaaaaataacattttgaacaaatgttaaaaaaaaaaaacaaaataaaaaataagcaaatactattttacacacaaacttaatctctatgattctaagaaaagtatttgtgaagattgttatgattttagctacttaattaattaattattattattttgtaacaaattttctttaaatatttttagtagttgggtttttgataatttataatgtacttagaaattatttggttttgttattttatgttctctatatatataatatatgtttaatatattaaatttttacattactatttttttcttactttaaattatttatatataattttttaaaatataatttaatagatgcaaataaaattagattaaatatatatgtgaatcaatatttaatataactaaatccacacaaatatgcatattgcactttgtgaattagattgaatattttataaatatctctattattacataacatttaattacatatcacttagttgatttgtatagtgaga

SEQ ID NO: 86093 - DNA, 863 bp, Cannabis sativa
atgtaatgtggtttacaaagtgatatcaaaagtcttggttaatcgtttgaagtgtgtgctctacagtacatttcagattctcaaagtgctttcattcatgagacactaatcactgacaatattatagtatcttttgaaataatgctttatttgaaatgaaaaagtattgggaaagtaggtcagatggcgttgaagattgatatgagcaaagcttataataaggttgactgactttttttggaggctatgatcttgaggatggattttgatagtcggtgggtggagttgattatgacatcggtctatctattaaatattgggtccaatctggtggtttctctttggggtcgattactccaactcggggtatccgccaacagaatcttttgtgtccttacttatttatgttatgtgtggatggataatctgctcttattaatgactatgtacgaaggggttggcttaaaggttgtaaagttgctcggggtgcgcctgttatctcccatatgttctttgcagatgacaattatttgcattgtcaagccctgcaggatgagactaatagggtgatgtcgttgcttcgtaattttgaactagctttgggttagaaaggtaaatctgtccaagtcttattttctttagcaagaatattgatgttagtatgaaggcccgtgtgtgctctatcttaggtatggtggaagctggtgagaattgttcgtatcttggactcccaaatactatgaaccacaataagtcagaggtgttgggcttcttaaggaaaagatgaggaagcggattgagggatgggatggtaagtttatctagagttagttaagagattttattgaagacggtggtgcaat

SEQ ID NO: 86094 - DNA, 5400 bp, Cannabis sativa
gtacatgtcaaagttcagggggtaaaaatcctaattagccttaaataaaatatataatttaaaaaaatttaaacatccaccgcgaaacgcggattatttactagtttattaaataggatataaaaaaaataatgcaaaaacttaaaatatggtattcctaactttcattacaaatatatggtacaaaaaaattcataaaaaaaaaaaaaaaaatccataacccaaaacattatttaattatgccataaaaaaattagctcttaaatttttcccagtaatttctctacaactcttaattcttaaacacaatatttaaaaaggagattttaattaaagaaaaaaaaatatatatataaattctctatgtgtagaggtggcaaatttgtaattgtaggagctgcgcaacaacacacaattctgactgaccgttaatgcttggagcgaaagaagttcgtcatctcttatctgcacaaaatagaacaacaacacagttttccatttccatacccatttatttctctctccatggcattctctgctactttctcacacagctctttcccacgcttctcttacttttcagacacacatagaagaagccctctttgttttctgtccgttagagctgttaaatctgcagaaccagaaaaagagaaaaaggcaccccaacccaaaactaaagaagatccttcaacatcaacttcaactgcttcttctactcctaagaagattctcaaaaaggaaaagcctgtctattcaagtcagaaaattcttttatctcattttttttttacaagtttcatgttacacatgtcttcctacttggatttttttctgcctttaataatattttctttctcttcttaacagtgaagaagggccaaattgtgagggtggataaagaaaagtatctcaatagtgtaaatgtatgtgcatttggagttctcaacctctaatctatctaatatattcatctataaattttaatttgtaaaatgcttttaattttaagcaaataataaaattgtaagactccaatacatgaaataaataataaataccatcctatttttagaaataactttgttatagctccctcaacacttgacacttctgagtaaatcaaactataattttatggaatattagaacaaaaagcatataataggtggtatttgccaacaagagacttagatgaaatagttatatatatattggtaattaatgttgagatattggcataaattgtagtatctatcagttgggcatccaccttactacaaaggcttggattatatatatgaagatcgtggtgaggtatatctttcctactcttcttactaattaactaatgtatagatgattaataaaatggttatatctttctttacatggtgagtgttcaaattagtatttgaatttgagtgaatgaaacctttgtcagatcttggacctacgcatcttcgaaacaggagagtatgcactggtaagagattccatcatttctatcttttactttcattttaatgaacatgacttttgtgaaacagagagtcaaatgttgtataaacaaatcttctttttattatgtgatcttgttgtttataaatgcagtggtgagtttaatttctaagcaatgattgttttgtaggtagcatgggttgggattccaacggcaccagcttggcttccaacggatatgcttattgaggtaactactaattagtgtttgagagctcagtctatctcaatgaaaggtagctaagtttgtgtacttggattggatggtgtcctaattagtgtttttatatatctttttgcagtcagagaaactcaattatgaaagattgtgaggtaggttctgaagaagaagctttgaataagcttatgatgattttcataggtttttcttttacatcagaaggcatatcattcagttccggatatctgtctttatttatcaagaccggtgttctacatatacatggccagtactttattgaatgagatttatccatgtgtaggagaaggaactatgatatattatttaaatttgctaagaatattttgtcaactgcaagatattctttatctcgcatgattgtatatttggtctaactgattgattatatattgtatgtttctacttgttttacccaaagaaaacccacttcaagaaaatcagaggttgtgcttcaactctatttggtggaagggatatttaaattatttaacaagagttacttacaataatagatacagaacagcatgtatgaagaatatgaatgaattaaattaaccacaataacattgttcatgcaagcaaattgatttttacagctagtgatgaaacaggaagcaacttacaaattgattgcatcaaagaatcgatagcacatgcacaacttaaatcttttagtatacaactataaacctctctggtgttctcctttgcaactgcaatgataaatctcgtgctctttattctttgcaacagttattttcagtttctgctgctctataccattcgtgtggaaaacaagagaaatctcgagtatagactgattgctggaaaagtaaacactaaaacttggtttcccccttgaaccgtttgtttaaattcaaaatatcctccaatgagggaagaggccgaggtacaggcacatccattgacctgttcaatcttttcaattgttcactgaattttttcaatggcccaatgggagttcgagtaccactctgtacttctgtttcaatttcaacaggctctttacactgtatttcattcacatcttttgaaggattaatcaccaatggctcttccctagtcacttcatataaggattctttacactgtatttcattcacatattcgggtggattaatcaccaatgactcttccttagtcacttcatttaaggattcttgaggaaatttatcatctgtttgagaatgttcatctttctttgtagatttcttctgttgtaatagaggagattcctggagaccaagtctagctctaccaaataaagtgacaggtggtcttttggctggagaaggcaatttaaaattttctttctgagaagtggaaatctttaccagttgcagttgagagtcatcagaactttgagtgatgtcttcaagtgccgccagtgagcaagccgaagttttagccaatacatcttcaactgaagaggcttcaacattaatgtccagaagcttccaaagaggttcctttagagataatcgagtagtaaaacaatatttcttaaagtaatccagctctgtagccatgcaacttggggttgttgaaataacccatttaggagcaagaagttgaagagcccattccaattcttgtctggaagaatgcattgaatagcagacatgccaaacaccaaattggtctcttactgcttcattcattctatattttcttcgcttttcatccaatgaagctgaaccatcatcctcacacgcataccactgagaagaagggcgtattatgaggggttccggcattaagttagcttgagcctccataagctttgcttttgctctttcagaaagtttaggaaatccatcaaatagatggaaacgagtagatggatcttgggagatgatttcaggagctgtaagtgagaaagaatgaaaacactcaggattagctgctttgtcaacatatatcttggatccaaatgtcctcgacacagcagatagtatttcttcctgtcctagaagatcacaagttagataaactattgtagcatcaggatgcttccatatgcaactgacaacctgcgacagcatcaacaatttactggttatttagggctttaaggcttaaaacgacttagtttatccttccaaacaagagacatacaatgattcattccagagatgacgatgctgagtacataaactaaaatagccccactgttgagaaaggttgaaaaaggaaaaaggtgcactagattaattatatttaaaaatagatctaaaggaagataaaatataattcttcaatgacagtcaaacatagtaatttaattacagatcaacaccatacataagatactcaaattacgtgccaaaaacaattggaatgcaagcctcacgatcaacaaaatttatatacagagtagaaagaggacctcaaggaaataaacactaataaaagggctagtaattttatgtggtagaactgcatcgtatgatcttcacattcttaaataaaatgaaaaacgttgataaatcaccagacccttacttaagcttccataaaaattgagataaacctaaaagtcagtatttttcaggtaagcatcagcaataatgaaactaatcctagacaaactaatacaaagctttaagtatgtcaacaaggttaagatcaatatgatcaaaacaaaatctccctacaaaaacaatcgttacttaaagcaaacatagttcaaaaaagtagcattatgtagaactagaaattaaaaaaaaaaaaaaagcagtcttctgaaaatatgagatggttttgcatatttttatacaaagcaccattgatcctcccattaaacctatcaataataaataaaatgaaaggtacaaacctaaggagtgtatacaaattcagatataaagaatacctgttgggtagctaaatgcttgctgggcattggtcgaaggaacctcccaaaagtgcagtctaaaaaaacaaaatcaagttgacaagaaggttttcttcctctctttcccagatacttctctggtaaattctgtaaacactcaggtgtaagcctgcaatcacctgtgtgcagtatgttgccaaattttccctcaaacaagaacatcacagctcctgaaattcaaaaacatataattccagacaagggaataactgtcaattaagccaccccaaaccattagaactcaactgaagccgaaattgaaatcataaatatttacgttaaaaaagttggaagtatattaacaaatatgttcagaatcaaagtttcatggtttccaacaaagaacgaaacaccactaaaaaagaacaacggaatttatggtttgaatacaaaatccattgcttccatgaaattggtataagcaaatataataaaataaaacaacaggaaagaaacctatcaaaaacttgttgtgacaagtgaatgaaataaataccagggcaatgattggcgtcaaaagccgtaaccgtgaatgaatcatgagaatcatcgacgatgatcgactgccccacctcgatttccacgaacatggaatgatgaagctgcaaaaagcagagaagaaattgaaattaaaagacgaaaagagagggagagtaaattaggaatgggaagaaggagaaaaccttgggaaatagttgaaggaggagggctttagtga

SEQ ID NO: 86095 - DNA, 1151 bp, Cannabis sativa
tggtggataatagctgaactcgccagcaaccagagatctaacccgccagtctcgcttatactcaataccacaagccctcagggtattacctacgtaatcaccgatgactcgcaccttcgactctattaatatagtctcaaaggtgacattaggatcatggggagtcttcgatttttgaggcttggaggtcatgatttcaaagtccaagtcacctggctcaaaagcaattgtgactctgggtaaaaaaataaaggcctagccagaggaatagatgataaattgggggattcaggccaagcatcatctcgcaagaaacgacattttccttcattaatttcttgcaagaagcgtctgtggcgattagcaatgtcatcttggtaggtttttactaagtgttccctaatctttgcatcatttacctctaatttggatttgggttctgaaattctgggaatatatgggatgaaaagttcagtgagaactctgtttctacatattttggattgggtcatttttctgcaaagagaaagcaatcccaattcctggatgaaatttatcaaaccagaagttggtaaattggagaaccccaaaaatatacgttctgcctaaactcttaaatgtacccaggtacaattcaaccctaaaattactaaaaccaaatgaggtaacaaaggtgttgactaagaaattagtgatcaaacccagaaacgcaaaataaaaagaatgtacaaaaacaaagagagaaatcacttactgtttggagttggtttttgagacgatgagtggttatgcaatcgacgaaacagtgaacggtgtgaagatccctctgaatgcttgaagtcgaaagttaaatcgaataaaactcgttggaaaaatatcaatgacaaagatggcatgcaaggcttcgaaataatctgggtatggttttttgcagaaaagcttgaaatttttttagagtttctgaaatggcaaaggtattgaaaaggtgattctttttttttttttttactcttgggttaatctccgtcagattaaggagacacttgatccaccgggtaaaatttaaaaaagaaagtggaaaagatggtcattaaatgctgatgtaccccgaaaccacaaaaccgccaaaattagaggacatgcgttttttc

SEQ ID NO: 86096 - DNA, 950 bp, Cannabis sativa
caactagattaaattagattaaaaaccctattaaaattaaaagtttaaaaagaaaagcatatcataagattcacattaagggattaaagaaaatatactttgattagattgatgatgaatttgacgaaggttttcctaaaactcatcagatgtaggatttaggaatgaagctttttttgggtttcaaaaaaatagttgcagaaatttggaagaaatagcaaagagatagagagggcatacaagagggaaattttgagttctatacttcttcttttcttagatagtaatggtggaaatggtggtgagagatgaaaatgaaagacttttaacaatattgtaagcactgtttgattaaatgaaaattgaatcaaaggtgattaacctacgggtttgttgaaaagacaagcatccattgcaaaagccatggttagctctgtattgggaagacaaaaattgccaaaagaagagattcaagaaacttacttagtacacaaaataataagtgaaaatcatgattaaaaagtctttttcaagatgaaaagaaaaatacttttttaaggaaaattgttgtgccaatattttgagcattgacctagctatttctatgttttaattctgagttacttttgttgtgagttggtgttggaagcttggaaattgtggtaagcttctaacctagctatttttatgttttaattatgagttttgggctgaatattgaaatgttttgtgttttgatgttcacttgtgatgtagatgcatgttggtgtgaatttgtataaaataagtaatttcttggttgattgagttctatgtcatggattttgagatcaatttgttggttgaattaattgatggaaagtttggtgaaattgtatgttttgatgtttttattttaagcttgaaattatgtgttaaattcactattattaatggctataatttgtgaa

SEQ ID NO: 86097 - DNA, 948 bp, Cannabis sativa
ggctcgtagtacattgatggaattgcatttttcttcagaattgcaaactttaacaacttcagcaattcctcaaatatgacgttagatgcaatagctttgctaaaaagttgagagacgaaatccaatcacaattaggacacaactcagcttcaatttctttaaataagtcatcaaaatattagtttttggttggtccctcttgtacatcctctattgtcggaggaaggaagtcttgcagaatagggattaatttatcctcttcatcatcaacaggatcatctggttccctgttctcatatcctttcacaaaacctcgatcaaatacgtgtgctctcacattacctaattttttaaacctattatttatacatctcacacaagggcatctaattcttttatcaaaatccttttattctgacaccatcgctaaaaaagcttgtaaaccatttcaaaattcaggacaacgatgatttttaattttggtccaagacaattccaaaaacctcaagtctcctttcctgtttagttagtttgcatgtacaaaatgagtaattgcacaacgtcaacaaattgacatgttaaatagaaacataaccaaaatgattttaagaaccaacaacttaccatctctggcattatttgaaattttgaaatgacagtgctcataaatttatttactaagcaaaataacagtatcaaagggcaccaaaatcagggaaagatttttccactttgaacttctaagtgtacatgccatatataaattggtgactcttgagtcttgtccaccaaattttcaagtgatagtagaatcaaacactacaacaaaacggactttttatcccactttttacatttgataaaataaaatgtgggatgaaaacttttgatcccacttttatatttggaaccttaaataaatgttaggaacaagggccttgtttggca

SEQ ID NO: 86098 - DNA, 1003 bp, Cannabis sativa
ataccaagccttccttacaactacaacaacaacaacaacaagtgccacaaaccaatgataatgcatatagtagtgaaattaaatcagtaaagaaatgggataaaagtatgggcattactgttgagaggcatattgtactctacacagtgacattatgtatctttctgtacacaatcaaagactaaaggccagaggaattatgattttccaccaataaacgtaccacttgtaagaataccattgcctgcactaacatatatattacatatagttaaatacaaagtgtaatgtagtcaagatatagtgactacatatattaaattcatacgggcttaaaaattaaaatacatgtgactggtttgacccaactcagtcaccaaacagttcaacacccaatgcaatgtaaacaagaatgaaactacaccactccaatacaaataaataaattatcgggctccaccatgactttagtctatgttatttcaatatttaatgaaaaaaaaagttgaaaaacatgattcagcatcaaatttcataacttgttgttttcctaaatatataataaatcaaatctatactatctcctcttgaacataaccaaaatttttgaaatgaagaaagtaatcactggaaattttaaaccttgctctacaaggaagacaaacatatttatgttaaatagatatgtaataaccacaaacaagaagtgtaaaaaagagttccaatacaactctaagaataaacaacaccatgaaattttttcaaataaattatctaataacaataaaaaaaatgaaatggagccaaattcatgtgaaaacctacatgttaagctctgttcgaatcgcgagttttaaattaaagaacaagagcataataaaataaacaacaaagagtataaaaaaaaattcaagacagtaattagtaattagtaagaaatatattcatttaaaagtagtaagtagtaccatatttcttatatatacctgagttggtttcaatt

SEQ ID NO: 86099 - DNA, 592 bp, Cannabis sativa
aaattgaggttacaccttttttttctcaaaactgaaaagaggaaaagagaatcgggctactattttaaaagctaatttatgaaaaaagataataataatttgtttaatattttttttagttgagtttattaattttttaaaatatatattattcttttttagtgacatttgaaagtgtaattgattttaatatttggtgacatttttataaatgttattattcacatattttagtgacatttttcaaatattattaaaattaaatatttataataattagtaaattaatgacatttttaattaaatgtcagtaaaatatattaatagtgacatttttaaagaaatgctactaaatgaaatgttattctttcttattaaagtaatatttttaatgaaatgtcactaaagtactattattattacattttttgacaaatgtcagtaataaaaatgtcactaatcttataataatgaataacaaaataacaaaacacagcctctatatataacctgctatatagactacatagtataatcattatattacattgaacctttaaatttattatgactcactacatgcatcatgtgt

SEQ ID NO: 86100 - DNA, 710 bp, Cannabis sativa
agattttggagtccaagtttttatatttttttgggcttattttgttccaatgcttattacttttgtaacacgtggttttaaagataacattactttttgttgtcaatggtggttgcgttttgcttttttggcaagttgttggcaaggaccttaactcatggggtactcaattttagcacgcgactcacttgttaaattctcaaatgtgggctatttttatttatttttatctcatttctataccgactttgcccattaataatactatattttggatccccattagcatagagggaaatcttccttgtctaagaagctaccgtatagaatgaatcctaaatacttcatcaaaatgaatgaatctactctaacacattaggtaggtagaagaaaatgagttgggttttgactatttcatctactctatcataaaaatcaaccatgaggtatctatggtgatctagcttcaagaagtatgggttaaaacctccctgatcaagctcatctaaatcttccaaacgtggagcacaaagtaagcggaagggagaattgcctcttctagatttgcttgctcccagagtgtcgttatcggggttgattgctttaaaatggatttcaagctctggttcttcgctcataggctctggatatagtcaggctcaatcaaccgaccatctttgatctttcttgatagccttcttcgctcatta

SEQ ID NO: 86101 - DNA, 609 bp, Cannabis sativa
ttggaggatcagatttcatttccttccaaaatgaaaaagctgagatgtccatgagagactcctcgagtttaaacctcgcctgagctagagtcagcaaaataatgtgagtatgaccaaagtctgattgcataactgtaactcgcattatgtggaaccagagaacgtatccaactcgcatgtatcaagatatgtgcgggtgtcctttctatactcctgcgaaaacatagagatcgattctctataatgcgagttggtctcgatgacttgacagcctcgataaaccaatatagattcgcatgtctaggttctagcagttcatcatacgatgtccatagatgcgactatataagagcgcagacatcttaaacttaattaaatgttaggtctatcttaagcccgcgagcttacactagaatatgaacagtcaactcgcatattagaagacgcatacgttgctgtatttagtgaatagaaattgttattcatttattgatgtttacgtttttaatttaattactgtaaatcaatatgcaaacagattgacaatgaatgcaatccttgtgtaactaactggacacttgctttgtatataaaggagtgatccaccat

SEQ ID NO: 86102 - DNA, 1164 bp, Cannabis sativa
  modified_base (829)..(829): a, c, t, g, unknown or other
ataggtaataccaatcaatccatttaagtcctctgtgtagtcccatacctacacattctcagaatcatcccacttgaccttccccaggcggcgtgggattgcatagcttacggattccgggactactgactgtcaaagtcatagtcagaatatccaatgatttcaaagtgatctgacctcctatatgtgagcatgtaatctcttgttctcttcaaatatctcataacttttttggctgttttctggtgatcaattcctggattgcttaagtatctgcctaacactctaacaatgtacgttatatctagactcgtacaaacttgagcatacattagactcccgatagctgaagcgtagggaatcttttacattttttaaacttcaaggcttcctttagggcattgcttaagacaaaatttgtctcctttgacgacaggagttctttatcaatatagttcttttgtgataatccaagaataccccgagaacgatctcgatgtatttgaattcctaaaacaaaagaggcgtcaccaagatctttcatctcaaaatgattttagatagaaatctcgtggttttgtgcaataagcctatatcattagtggcaagcaatatgtcatcgacatatagaaccagaattatgtacttactcccactaaacttgtgatacaaacaatcatcattaacattcattttaaaaccaaataagagaatcacttgatgaaatatatggtaccattgacgggaagcttgcttgagtccatagatgatttttttttaatttacaaaccatattctttgggttgatctggggtaattttaggatggntgacctcctgggaagttttcccaataagtgggcgagtgaggacaaagcacatcagaaagactcatgttaatctgtagggtcagctattttccataaagcagtataagagtcattagtccatggcggaaggcccaatagaggcttgaaacggggacattacaaagaagaccttttttgctgctttggcaccaagggggacgaatagggcctctctcgtgaaagccggagagacgccgaagacctctggagtttatgttagaatactgtaaactcagaatatagccctaattaattcatgagaatcaaacaatagaatatagattagcggaagcgta

SEQ ID NO: 86103 - DNA, 996 bp, Cannabis sativa
agatagaattaaaacacatttcaccaaatttttctttatacatttcaagagaatgtatattggtgtccaacatattcaatcaagtgttaatcttgtaggcttattcaaaaagttattaccagcatcaatttttgagaagacagcatacaagattggaattagtcgattagaagatctccacgaatgcctaaatgaggaggagttaattcatactgcactctttttcttttggccaagtttttccagcaagatttttaatgagatagtttttatggacatcctatggggagtataatgaaatattatttatggatatccaaatcaccaaattaattatcaccattaatgtttggttgtattttcctttattcaattaatttagtttcccattctttcactcatatttttgtataaataggggttcaccccattgaaataaacaactgaaaaattctcattcactttctctttatctcttcaccttcttcttctcattcttttcttcttatctattttatattattctatattattttataacatgcaccaaatttttatatctattataggaggtgcctacaatatagtctatgtccaatctgtccttcaattggcacaattaaaacattttaatcctatttttttaagatagtgttcattatagttataataaaactcttgtacctttttagtttcttttcaatattttgtagtgctaaaaataaaattaaataatttgttgttgtaggaaattaagcattaccgaaaatgcccctacaccaacaccccaaagtacaaaaaatcaaggtcaaaaaaagaccttcctcccttgtgcggatcaagagaccttttccctcaaaaccctgcctttttatggcagtataaaagcttctttatcagcagaaaccctagcagcccaatttctttacttcctctaaccctagctgaagcctccttctcttcttctctttccttcttgcttgaaaccctagcagc

SEQ ID NO: 86104 - DNA, 679 bp, Cannabis sativa
tgttggcttttttcttcataatttgaattttaaagaatataacatcactatttttacaatttatttgtctatttaaatgtttttgatattattttagtttttcattaatttagttttaattttttaaatagttaaaattggggaatgaattaaaaaaaaattgtacgagatcatttttttgtattttcatataataaatttttgacaaaaatataaaatttaaaattattaataaaattgttaaatcttactaaactaaccattgtttgttattattttaaaattaatacaaaattaatatattttttataatacaataaaaaaaatagttgtatcataacataatatagtaactgtaaattaaaaaaaaaaaaaactctaaaaaatatttatttagtataataactgcgcaaaatacagttattttgcctggttaataatatatgacatttctatttaaaaagaaaattgtcgtattatgtaaatttagaaaatgcaagtatagtaggtacgtcaacaaaattaacttaaaacacttcaatataaagcatacagtgtctcctttggacacatttattagttctagtggtactggtaaattaacataactaattttaactccaaatagtatgcccataattgcctaaattaggtgttacataacaatagaagttaataa

SEQ ID NO: 86105 - DNA, 577 bp, Cannabis sativa
gttgaactttctctaatttttgattggatgggttacgattaaatatttacaacccgatatttatattgggttgataaaaatatgctataacccgactaaaaccgacgtacacccctactaggtaggtttcactattattatcacattttctcaatataatcaagggctaaagaaaaatcttcttaaaaaaagagagaaaaatgtaaaagagaaaatcttaatcaaaatgaaaacattcccaacaaaaacactactaccatagtcgaaaagcaacggaaggaattaaaagaaaaattacccaattccaaaagcatacacacttaattggaattattaggaacattacaccccttccaaaaaattaaactgtatatattttttaataattaaatttataaacaaattcattgaggcagattagacacaacagaacacagaagtttttcttactctttctcatgttcttagtgaattaattcttcatcccaaaaaaacccaaatcgctaaatatgatttcatgatatcctatcctccataaacttctatgatttacaaacccagaaataaaaataaatta

SEQ ID NO: 86106 - DNA, 882 bp, Cannabis sativa
tatttcaacgttgcaggccttcgaaatgagctcattgaaagttttgggttctgctgtgcccacaaaagttgccacctcagggttgaggttttggcacacattgaagttgagagagtggagggaatctcctatttttcctctctctacttgactgattatttttttttattattattcttttaaaaccaattatttcttcttttttttaagcaataatgaaataataataaattttttttctcgttcaacagtagcacaacaatgcatttgtactaagtcaattggtggatcatttcaagttacctacataacgggtctatattatctgttaatttagagacaagaacatgtacatgtagatcatttgatctaacaggtataccatgtggtcatgctttagcttctttgtggtttcctaatcttgatgcctacgaatttgtagatccttgctacaagaaggaagcctttgaagctacctatgcaaagggtattgcaccaatgcctagtcctgatgaatgggagaacgaaggcaaaaatccaatccttcctctttttgaaactgtattacctgggaggcccaaaacatcaaggaatagagaagtgaatgaacctccagcatgtgcaactaaattgagaaaaacgccacaaatcaaccagtgttccaactgcaaacaacgagggcatatcaaaactagttgtaagaaccaaaaagtcactcaggtatatttcttccaaccaaacttctatttgaattgtaatttcatgaattgtaactataacctatttaaatgacttgtcttaggatcctcctactgagaagaaaaggaagggtcgtccccccaaaaaaaatccaaaccctgaaactgtgaagagaaataagag

SEQ ID NO: 86107 - DNA, 731 bp, Cannabis sativa
  modified_base (654)..(671): a, c, t, g, unknown or other
cagtgaaggtgatctgtaattgaagttaaaagttcttataagttataaccctactactgattatttaccttggaatggggaaaagacaaccatagctcactaattacacagtatagtctttttttagagtactgctcggttcatatttggttaattaattactacttttattttactacacacatcataatgaggtattgttcatatatatttgatgacactttataatatgtaacaaatatatatacatatatttgaaataataacaaatagggttttttcaaaggcaaactactcagatagtcttagtagtaaattatctgacgaaaaattgtgtgactcaagtctatctcttcgttgttttgtatcagttttttctttacgtgccacaaatatgtcacattaactttttttagttagtaccatactcattattattgtatattaaatatataagagtaatattgaattgataaaattaattaaaaaaaatacacataactaaaaaaaaaaatcaaactccaaaggagtgcaagatctctcttttttctctctcccatagcaaagaagaaaaagacggctcgaaagtctgaaacacatcatgtaacacactaactagcataagcgtgttagcatgattttaaacgtactgtnnnnnnnnnnnnnnnnnnacgaggttattgaaaatcgtgaataattaaaaattgtcttatttaattaaaaacataaag

SEQ ID NO: 86108 - DNA, 787 bp, Cannabis sativa
aagaaaagagagagattgtgtttttagaattgtatgaagaattttctagagatgaaaaagattcttgagtaagaatatgagagaaaaacactttaagagaattcaaatagagaatcgatctagagtgtattgtacctctattttaactcaatcaataaagacaatttcaatggtatttcagaattggagtagaaccatacctctattttattattttattgctttaatcgtttttagttttgattactaagttcatccttattttatctccaaatactctgtgtgaattattaatcttgtcattgctaattatttgatgattaagttttagattatttgattttgcacattagatgtaattttcccatactcctcaagcttagattgaccatatttgaatttatgatacatgttgcatgtgtaaatggaaggtttaaggttagcaaattttacaactcgctctttgatgttgtggtgtagtcattgcaaatttattttttggcagatggtgaactctcagttgatgaccagagagataaacatcaaaggttacaattttctattacttctctttactgtcccgtttgtaatgactttttttaaaagccatgatcacttgctctttttgcaccctttctctgttgcactactgtgcaagttccatggatgggtgagcttcataacttggcccattgtgtatttagattggagagattgaaatggacaactagggtctgatttacaatgtcagtaactgattggagagattggaatgaacaattagggt

SEQ ID NO: 86109 - DNA, 818 bp, Cannabis sativa
ctaatgataataataattatcttttttggttgttataaaacaatatagaatagaaaaagaaataggagaagagagaagaccaagaggagaagaaaatgagtgtgaatgaaatttttctctgactagaataatgtgaaactaaattaatgaaataaaaggaaatataatcaagcatttatgatggtaattaatgcattgatttggacatccataataatataacaccatcctttggatgtccataaaaatgtctcattaaaaatcttgctaaaaaaactcggtcaaaagaaaaagagtgcattgtaaattaactccccctaatttagttattcgtggagatcctctaatcgacgaatttcgatcttatatgtcttttttctcaaatgttgatgttggtaataactttgtgaataagtatgcatgattgacaattgattgaatatattggataccaatatagccattttcttgaagatcatgtagtaagaagaacttggtgaaaatatctttagttctatctcctttattatagctttagttgagcaatgaagttcacgttattttcacagagaattgctaatgttgatactgttttattaagtgtaatacatatgttcccgaatatgttatgtcaatgatctcactcccacatgttctctagttgcttcataaaatgtaagtatgttagcatgatttaaagttgccttattaaaaaccttgccagaaaaacttagtgagacaaaatctaagctaaggaaaaagaaaagtgcaacatatatatttcatattcataattatttgcaagttgcctcgttaaa

SEQ ID NO: 86110 - DNA, 1760 bp, Cannabis sativa
  modified_base (1546)..(1561): a, c, t, g, unknown or other
gaccgataagggggtatactgctacttggtcatgcctttcggaatgaagaacgctggtgcaacatatcaaagaatggtaaaccggatgctcaagggccttctagggcagaatatggaagtttatgtggacgacattctagtcaagtctaaagcgtgtgtaagccatgtagatgatcttacagaatgcttcgaagtagtccagagatatggaatgaaacttaatccgaagaagtgcactttcgggatcaagtcaggaaaattttaggggttcatcgtcagccaaaggggaatagaggcaaatccctaaaaaattcaagccttactgaacatgccttctcctaagaagcacaaagacatgcaaagcttgacggaaaaggttgctgccttgagccgattcatttctcgatcaaccgacaagtacatccctttctttaacatcctaaagaaatgccaaaaatttgaatggactgaggaatgcaaggaggcattcggaaaactgaaagagcacatggccaaaccaccaattctatcaaagccagttcacggagaagacatgttattgtacctagccgtctccgagaatgctgtcagcgcagcactagttcgggaagaagaaaaagtccaacaccccgtgtactacgtcaacaagcgtatgataggggccgagatacggtatccattgatcgaaaaattagttttctgtcttctgatgccttcaagaaaattaagaccctacttccaagctcaccccattaaggtgctaacaaaccatccgcttcggcaagtcctactgaagccaaaagcatcagagagactcctcaaatgggcaatggaattaagccaattcgacatacactacgtaccacgcatctccataaaaggacaagccctagctaacttcataacagagtgcaatgaagcagagggtcgaacgaaaacggatccggagccgggatagctatgatatctccgaacgggcttcgactccaggcgaccctgcgttttgaatttctgacttctaataatgaagctgaatatgaagctctaattgcaggactgaaattggcaaaagccgtgggagccacgagagtagaagtattcagcgattcgcaattggtggtaaaccaagtctcgggagaatatcaaacgcgtggagaaacaatggatgcatatgtagctattgtccaggagctactccatgagttcacggattacaaagtggaaagaaaccccagagaaaagaatactcacgcagactgtttgactaagttggcatcagacagcgagtttgagaaactaggggtggtgcccattgagcacctcacggaaccaagcattagagttaaagatacggtgactacgatcgagccggagcaaaactggatggaccccatcgtcaaatacataaccaaaggcaagttgcctcaaacagattgaaaaagggtcgaacatcctggggttaaaggaatcaaagagagaaaataggagagaaatccaccaagaacattcgctgtaataaatgctctcattaataacaaagactcgnnnnnnnnnnnnnnnnaatgccccaaccacgtaaaaatcccaggcattaaacttcctacaactcgtcttacatattatttaactggttgtcgaaaacctcggtcaataatagactattcaatagtttaaatatcatgacttgtcactttcatgacttgataaaaactatacatctaggtacatacaaagatatttaactacttcaagtagcaatt

SEQ ID NO: 86111 - DNA, 620 bp, Cannabis sativa
aaataaagagcagatgaaataaaataagaaaagaggtgagaacaaaccaagtttatctatagccttggctataatctggatttgctctgggccaacgtcaggagaaaatgtatacccaaagtaaaggagaacccactttcccagaaagttcctttcagtgaccgtctgattctgtgtgtctatcaaactgaaagggccaccaattataggccccttggcagtagttccactagagctggtaccctggcctgatccaacaatgaccaaaaacatgttatgactctggtatacttgtggacaataagagaaagcttcatcaggaactcgatgttcgtttataattttggacaaacaaactatttcacactagagcaagttcactgagcctaatgatggatatacgactaatcattaccaaatcattcgtgtttaaccaagcccagcactctccaaaagtcatctctatcataccttctcttttttcaaggaaaaaaaaaaatatatatatatatatatgtataatctcagattgcttgcaagttggaccaggtaagccctggcaacaaactgaggagtcaaccaggctccccaaccccgtgataaagaagatacctaccaag

SEQ ID NO: 86112 - DNA, 503 bp, Cannabis sativa
ataatataatttgttgatgattctcgtgagtctcgtgagtaaattgaaaccaataattatgctgtcttttctaataaataaatccaataattacgaagaaagaaaaaacaaatgcaatggtaaataaaataaaataatgcttgcatatttatatttatatttataaatatcattttttattataaatatatatcgtaattaattaaaatgtatatacatttttttttatttttctttccagaaaataattgtctccctcgctccctaatgtccaccatatttttatcaaccaatttagtttatatttattttaagagtattgctattgggcactagtagtgtctagcactcttaagatgtgtcgcattgcgattggctatagcaatattgacacataagaggatgcttcgtaccactaatgtcttttaacatttctcttattttaagagcattgttatactttttataggtaatatcctacaattaattagcgatatttttaa

SEQ ID NO: 86113 - DNA, 549 bp, Cannabis sativa
  modified_base (393)..(398): a, c, t, g, unknown or other
tttattttcttgtacctaatgattagaccgactctgctggtacaagaacaatagcagaatcaaaataaagagaaacttgtgtatagattgatagatttaaacagagaattacagagtgattaatctgaaaccaaactaataataaacctaaatttacgagactaatcaactcttaagttcataactaaatttgaataaatcatcaaagtaaaacacaggctagaaatttaagagactaatcaatcaactcgttcatagctaatcatcaaactaaaacagatcattactctaaaaccaaacttaataattaaattaagagactaaccaagttcttaagctcataattaaattcaattaaaacagagattgaaagagaagagagagagagagagnnnnnnagagagagagagagagagacctgcaagtaatatgcaaacaaccatcgattctttcaacatagaatttacaacgagggcatctcttccaattcttctgattcgccatttctctaaccatcaaatcctcactccctctctcatcttcattcaa

SEQ ID NO: 86114 - DNA, 665 bp, Cannabis sativa
aagattttctcgggataatcggagaaaatagagagaggagattagattagagagataattaatttaattgagtacggaagagtgaataagcatacgaacgacaactacggggtcataacgatgtcgttttcagtgtagacatgatgatgatgactttcgcgggaggagaagaaagttgaagtggtgggacccgcttctttggcaatttcgatgacgtgtcaatgtgagcgttgatgagttggatacgtaatagtggtgacggcaaggccagattatcggatcatacgtggcgcacggtcaacggcgtttcgaacgccggaatgattttttttaattatttgatttttctgaaactcattattttattttaatttaatttcacataaatctattgggattaaatttcgaaaagattgatcatggtattccataactatgaattccttgttttccacacaaattgaccaaatactagtttttttaatattattttaaattttgtgttttataaaaatattaattaaattatttattttgttaaataataaagtagatcatatatctattatctattatttattatctattatatataaagtgtgcctatataactataattcttgatttataaaaaatttataggtgattttttatttttatttaat

SEQ ID NO: 86115 - DNA, 1002 bp, Cannabis sativa
  modified_base (665)..(671): a, c, t, g, unknown or other
ttttgacatttataggaatgaaattgaaaaatatagcattattgaaagaaggataaatagttaaaataaagtggcaatattgtaacaagtgaggcccactaagtggtcgactactagaattgatttttgcacattattttattcttttttaattcatataattatatcctaaaccctagttaaaatgctataaaaggaacatgatgctctcattctcatccaacaacctacttcaaccaaattaaacctagtaatcattctctaaaaactagtagatgagagactcctttcttagtgatttcgcaccttattcattgttcttcaccaattcgagccttagtgatagagtaccatgtccacacatagcaagtcaagtactcaatcacaatgtggaagacggtggctaaccaactcgaaggagagaaggagaaccagggtcagatcgtgttattactctgggacagaaaggaacaagggttagagatctgagcaaaaggagtcattattattctgctgcatcaatgtaaggttttctaagctttatatgtctttaattttattgttttagagaattcgtatttagggtgttaatcaaacatacatgttagtaaatctagattctggtaaaataaattctaacaagtggcctcaaagccatggtaatnnnnnnntttcatgaaatatggatttaaatagatgaatttgttgatttgggtgtgttcatgttagtttatgtgtaattttataaatgttatatgaattacgaaatttttccaggaaaataattttattttcattttaaaaataatttatttggtttccttttgaaaaaattagtaattttagtttttacggaaatcaattctgataaaaattgagaaagatatgaaagattgaaaatcgagtgcacatggtgtcaagaaggggtgcattgcacgcatagacccttgaaaagacgaggttgcgcgcgcggattcagacatttttgtgtctgaagacacg

SEQ ID NO: 86116 - DNA, 768 bp, Cannabis sativa
atttagtgtaatgatcaagctgttttaacatggaaggaaagcagctaaagaaaaaaaatatattaaagacttattcatataagatcttaaacttccaatcttaaactagcaataaaaattcatccttaattttattattaagaacatgaactgtacagtcaattaaattaaaaaaaataatcctacttcttatggctttgttgtagtttatataaattatgtaatttatgaaagatgcattgtatatcaatgccaaaaaaaattatttcaaaaatcttgtaatcaatcttccagatgaataatcataaaagaaaaaaaatgagcaaaatatacaacacttattgtagaaaataaacaacatagactcaaaggaaaagacatgagttggaacagaattttgtgcctattgtcatcatctttctcaattcttgtgatggttcctgggttggacaatttcagcatatgtaagtacgcaggtaactcagcataactctcttcatttgatcctctgacattattctttgctagttcctttgccctccatgctttgttatattttacctgcacttcgtactcatctcgcatgtcatttattatttgtcttgttttgtagtttgttttcgggtcacgaatcttttctttgatgcaatcactgattacttttgcacttgcttgtctattatcagtactcttgtgatttaaggagcatgagtgaaaatttttatactggataactctgaagttgcttgatgttttagagcttctagc

SEQ ID NO: 86117 - DNA, 682 bp, Cannabis sativa
tttagtttatgttagtcaactcacatataatttgaattgttgcatctctttctttcttgatctttgtttatttcaagatcttatgacgaataagattattggtaaaggacatgaatctggcagcctgaatgtttttgatccactaccctcaacccctattgcttgtttgagtttcgcttccgattttgaggttcattgttgtttgggtcatccatccctttctttgctcaagaaactttgtccccaacataagaaggtgtcctcattagattgtgagttatgtcagtttgtcaaatatcatcgtgttagttttagtccttaagtcaataaacgtgctagtgttatgagttagttcattctgatatttgggatccttctcctatgttgtctaaacttgggttcaagtattttgttactttgtgggtgattattctcatgtaacttggttatttaactttgagtaattttttatattttgtgttttttgtgctaaaattcaaaattaatttaatgtgtctattcgtactttgggaagtgataatgtcaaagaatatacatctgctcaatttcaatcttatatgatctctattgacatgcttcatgaaacttcctgcgttgatactgcaccccaaaatagtgtagcggaatgtaaaaataaacatcttcttgaaactccatgtgc

SEQ ID NO: 86118 - DNA, 558 bp, Cannabis sativa
ttacgaaaattatgctacgcacgtgcatatcaagtagtactcacacaagtgaagtcgaacccacataaattaaaattgattacaactaaactagatatttatgattctatttggttgaaaaataattttaaaagagaaccatataaattgacagaaatttatagaaggcaataaaagttgtttaactatggatgtgaattgaggatatgaatccagttgcttcaatagtactcaattgttaatgctacttaattagtcttcttcctttttagtgataacaaattataatataataacataactcttttcagatcataaatgttcttaattatatgccattgcatttctgagataaaataacatataattttggttggtgtttgaataaaatttatattttggttctaaaacatacatcatattgtagagctcatctcaagcttcaaaacggtatacaaaacgtccaaattggatacccgaatgaaaagttatgataaaaatacgatttctgatctcttataaatttccaaaaatggtagaacacgaaaattctaattt

SEQ ID NO: 86119 - DNA, 633 bp, Cannabis sativa
  modified_base (493)..(506): a, c, t, g, unknown or other
gtttaatttgaatatttatacatttataacaaaattaattttaatatgttaatctttggaacaaataatataaaataaataaaaatttgtatttatttaattgtagatttttcttgtgaaataaaaatgcttcagcaaaaataggtttaaagattaaaaagaaaggataagatttttttaataaaaaaaaggtttcctctgttatgttaaattctattttgggccttttattttgaaaaattataaaaaggactatgtaataattaaaataataaaaaatagtcccctttaacatatttttagtgatttttttcttcaaaaagagtaacagtattatttacttttaacaattaactttttaaaatcatttcaaatctaatttaagttcaactaaaaaaattgtttaaatttgttttgactaaaattgtatccaagagactattttttaccattttaataacataaagaatcctttatataaatatatatatannnnnnnnnnnnnntatatatatttatatatatttaaagtagagatccaaattagaacttacttaaaatagagggacatcccaaaaaaaaaaaaaatcaaaatattagagattaatctatctactttcttccaaaaaaaaa

SEQ ID NO: 86120 - DNA, 1413 bp, Cannabis sativa
  modified_base (50)..(65): a, c, t, g, unknown or other
  modified_base (355)..(355): a, c, t, g, unknown or other
  modified_base (1343)..(1348): a, c, t, g, unknown or other
aattggcgatgagtggagtagcccatgttcttatatatggctcaattctnnnnnnnnnnnnnnnngtgggacaatgtccacaacattttaaatatcactcatcaatttactattcacctttttttcaaaatataattaatatatatcatatatctctctaattcttttcaccgccatatatataaatatatatatagtcttcatacctctcactattttgcacattggtatacactacttttagtgataactttttagtcacaatataatttttttatgactaaatgtaattttttgtcacaacaaatgttacttggaactaaaacatattattagttacaagttgtcactaatntagttttagtcacaacaagtattgtggctaaaaatacatttagttacaacataggaatcattatttaaaattagtcacaattctttcgcttttagtcacaagttttgttgtgactaaatgtaaggttttttgtaatgatatatacctcttattatcattttttttttttcaattttatgtgtatatatagaaaaataactttccacttctacatcatttttttaaagttactttcgttaatattgaatttgtattttttgtatatatattaatattcaaaaattgaatgttttatgcatattaatttatgtatagatttacatttttgtaatgtgaatataggggcttgagttaactctctctatatgtttccttctgttttcttaatcatatatcagccacatgtagatgtaatatacctatatttataatattaaaaattaattgtataattattttaatttataatgtgttctactattttatcaccttaactaaaactgaattcatcttttataattgtgttatatatgtcaccgcaatatcataactttatttaaaaaaaaaaaaaatatgcttgaaaaaagtaaattatactttgagctactattattttatatattgtacatgaaattataaattcacgttactagattaatcaatatttaatattttaatttttttttttgaaaattattcatatgattaccattttaataataatataataaattttaaaagattcacaattattttttttatctctaaataatttttcaatcatcaatatcattcaatctatatatatataaagaagatatatgaggcgatgacacgacactttaaaatctctctaaaattatttttttcttctctccttaattttctcatttttaatattttattagagcataaatttataaattgacatttttactattattttaataagccatttttctcttctctttaattctctcatttttannnnnntattagagcataaatttacaaattgataattttctattattttaataaatatattattattatta

SEQ ID NO: 86121 - DNA, 605 bp, Cannabis sativa
aatataaaatctgtcttgtatatgcgactgggagagaatatgaaaatatataggcttatatatatttatcttgccatctcaaaaaatatatattctaaaaaagataaaacagaattggcataatattatagaatccaaataataatataaataatgtattatttagggagaatagagattttgtttttttaacgaattgtactaaattcgaagaaatagagtagataaaagaaaagtaagtatatataacaaagcatatatccatagagctagattaagtagaaaagaaaacaacagtttcattggggagatgatgtctaatgaggtatagtaaaaaatagagagagagagtgtgtgtaattgcatgattaataaaaagagagagaacatgtgtgtaatgtatatatatattttttaggaaataaagaagagaattcgtgtgtgtaggtgtaggtaaatgtatatatatatatatagattgatatataggttaattagggttaatattatactattattaatataatttgagttttatggagatatttttgtattttttatagaattaaaaattaaaaaatgagaaataaagcaaatttagagtg

SEQ ID NO: 86122 - DNA, 1204 bp, Cannabis sativa
gataagaccttgaagatgatgataacccataatgaccactctctcgatacccacttgaaggtcctccacctgaatttggaggtaatctatacatagacgaagcagcaccaccaacaccacccggacctacgattggaatttctgttgtagggagtgtttaaagggtatatcaattgatgtggaatgggtaaaagttgtttgggattgggattgggattgggagtgagattatggctagctttagggccatttaaaaaaaaattaaaattgatgaccatctctatatctacagcaacaacaaaataatttcttacccatcttggagtaagaatgggcttgcatgctggaagttcttgttgagtaaatctcgaatctgacattgtttcaagtggaatcatttaagaaaaaaattataatgaaaagctttatagaagttagtcggtaacaataataaaataattcatactctagtacaatgttttagattaagtagactttttgctagtgcctaggctataatacatgatacctaaccctatcatcttttatcaaaacaaaagttgtgtgacttccatttgtttgtttagacaatttcttttctttgatgttgtaagatcaacaatactaaataaattaaacagcatgcattcaaacaacggaatcacatgccaatatcaaaatgacaatctgcagcaatcatgatgttgtttcgctcttcaaatagacattttaaaattatttcaaaagcataggcacgcccgagttgaaaattctcaatccatttaattccacatcaaacttaaatagacctcataatcctcaacttacaacctaccaggctgcaaagtctagttccaaacaaacaacacagaaatcacagagtgcaaaggtttcaagtctaaaagttgttacagaacaaccgaagaagggaaactcaaagggacgggtatgtgatttcctcccacattattgtttgattttctacttctagtttcttctgagtagtaacatagcaattgatattgttttctggtaccacagttaccacagttttcctcagccataagtgagggtctacgataaacttaggtgggtcactctaaacaagtgacctctgtctcttttccaaaaaaaaaatatatagttttctggtacccaaatattgtatggttaagaaagggagcctggtttcaaaaattgttac

SEQ ID NO: 86123 - DNA, 732 bp, Cannabis sativa
agtataatagcctgcatataaatatactaacatcacaaaccatttcttccatccacacaaagaaagagagtagagctaccacaactagcaaatcaaagattcatttctctctctcacacacctacatacaactaattaatattccatttttatatcttcattcaaatgggtaggctcatcgactttgatcttccccagaataacattctttcaaacgtagccggcggtggcgcaagcaatgataacccgttggaccctgaggagtttcggcgccaaggccacatggtgattgatttcatcgccgattactacaaaaacatcgagaagtatcccgttcttagccaagttgaaccgggttacctcaaaaagcggctcccaacatcagcacctatgaatccagaatctattgagacgattctaggtgatgtccaggaccacatcgttccaggaataactcactggcagagtcccaactactttgcatacttcccttccagcggaagcattgcaggcttccttggagaaatgctagccactggctttaatgttgttggattcaactggatgtcttctccagccgctactgagttggagagcatagtcatggattggcttggtcaaatgctcagactccctaagtcatttcttttctctggaaacggaggcggtgtcctacaaggaaccacatgcgaggcgatcttatgtactctcgttgctgcccgagatcgaact

SEQ ID NO: 86124 - DNA, 1107 bp, Cannabis sativa
agtgtcaaacaatacagagaagtaagagttattgactgagagttgacctgtaacaactgagggactggcttcatcgtcagcctgagtaagagcaaacacccttgctagagcgggctttgctactgtcttctgttcttctttcttgagctgaggatagtctctcttgtactgtctaggcaaaccactctggaagcatcctcgccctctacactcacccaaatgatgcttcttacaagtccataactagaaccatctttataacttgaagtcaaagagtcaaactccataaagggagacgtcaaagctattggtttcttagatttcctcttttcaacaacaagagtttgctcaatcacaataggatcatcttccacaacttgaatattagaatcaacataaacacatgtatgaacccatctaaatatatatatatatataaacaagaagggaaacaaatataaagtctgtcattaaaaaataactattgagcaactaaacaaaaatggtaaaacaaccataccacaacacagaacacgaccctccttaatctcaatatctttagaatttgaaatggttaccagaatcaccaccaatcccacctaaagacatctgttttttctttatataaaattatagaaaaaattctaaacattcacaaccataaaacaaccagaatttaacaaacaaacaacattaccataatctcaactgcttccacacatgactgagcagtagcttcaacatcaatttgagtgactccgccattgaaataaacaaaattcttgataataaaaaaaatacaaacaaagaaaaaaggaaaaaaaaccaaagttattatttttttgaaagatttaaaaaacttaaaaacaactctaaataaactaaaaaatgacaaaaacaaacagtaagaaaaaaaaaacatagaacatggttaaatgcgaacaccataatcaaaatataaccattacaaaaatataagaagtacatagtaagagtttgaatattagtagtaaattaatactgaaaaaagactctaaaatataaaacaacataacaacaccataaaaatactaatccatgaactaaatggaattacaacaaaataaa

SEQ ID NO: 86125 - DNA, 512 bp, Cannabis sativa
ttactttctgctgctgcaaacgcttacagtttaatattttcgtatatacaactgacatttgcaaaaacacgatttttcattacccactaaagagagttgtattcatagctaaagagctactcgatcacattattataaattagtttacaatcaaatttatttttaacaattaatacattgcaaaaaatattgggtgtggttcactatacatatattttgtatattagaaaaaagttaagtacgagacacgcatgcttagttttatattaggtatataatttaattataaataatataagaaataattatatataatttaatttattattatgatctaattgattttttttaatataaagtggttaagacaataacaagtaatataattattttgtaaagttatttttatgtatattcaatacatttaaataattaattattggatgaacaatattctatcattctttataaaaaaagtatcttctaatgcatatatatatataatatgttgt

SEQ ID NO: 86126 - DNA, 629 bp, Cannabis sativa
agtacatgcatgttgccaagttttcttttataatagttttgtaattacatgctgacaagtgtatattttgtaatacatgtaaattgccaaatgtcaatttaagacagagagagagagagagataaagtgtagtgagcatttaattttttcattaatttaattagatattatgtgtaaagaaattgatctttaagaatagtacaaaaatgatcactcacttgtcttggaatgtagtcatttaggatgatgggaagccccctaatcaaggcctcagcaattgtaccaggtccagcctatgaaaaacaataataaaatgatcagaaatgttcatgacaatatatttatctacatatatatattaccctatgcagagtgtctttctaagtaggtcacctttgttattatgcaatcacaagctcccatgcatttctccatttggttttcgaaacctctaatctaaaaaagggtgacaaagaaatattactgttttggagtttaatctcagttatggtaagaaaaaataaaaagctaagtacagtcaactactcaccttgactgaaatctttcattcttcagattcaagtctggatagaagtgttttatttcggccacatatgataattaactgt

SEQ ID NO: 86127 - DNA, 1271 bp, Cannabis sativa
cataaaaccctagtattatgcaataactatttggagttagttggaagggcaagacatcgtaatgactaaggatgtctttcacgaagggatgaaaaggtagtgtcaccccgcatcgcaaaatgggaatcgagaccaccacatcttgtgtagggatgatcacaggattagtgaaaggaagatgaggtcgttgagatgccgaaggacgtaaagtccctatacgaactaaatttagccgtgcaagcttgtgcaggtctaatttcgtaactcgcgagactagatcctcgcaagaaaatggttcgttcagttgggtattctcaactgaatttgtctcacttccatcaacctcccccacttccttagaatcacgatcaggtacctcgaagtcttctcccatttcttcaacctcgatgtcaggggcatgtcttgaatgaacgagataatcctgggctgacatcgtggactcgctatcgcgtatttcaaccatcactagttcagcatgctcttgaaccatcctatttatctcgttagtagatagcgagccctacggatcctggcaacaggggcctcctcctcagatatcgaggtgggtatgaagatgtcgctcctctcttgctcgtcaacaaaagccccacctcaagaattgagcatctggctatcccataagtcactcatctgaaagatagaagatcttttcagtgtggtgatagtgcgaaaaataacgaagtgccctcgctcgcataaaattcaaaaaatacaaaagactggctagacatctctacaaatggatgggtgtatcttaataacataatgatcatgtcaatacatgaaaattaaggtactgaaacacacctaccatttcgagaattcaatcaatcctcacaaaaagtaagtcgcaaatataaaactaactgtgtacctcaagaaataactgggggtatcccactatcccaaggggcatgcattcctcgcatgaacattaagttaatgagacacacccaccattttgaagaacctagttagtcctaataagcgactacaaaaaaataaaaatgaaaactaataacatgtctcaaatggttgggtgtttcatagtgacccaaggaacatgcaaaggttacatgagcattaagttactatgacacacccaccatttaaaagactcagacaactttcataacaaaagtacatataacctgaaggctaaaaaaccctaagaatcattaaattctaataaaaaagagggttaaaatggctaggtaacaatttaatcg

SEQ ID NO: 86128 - DNA, 627 bp, Cannabis sativa
atgtttgatgcatgagaagagtgtgcatgtggtaaaatagtaataaaataaagatgaatgatataaatatttagtttactgtacagtggtatttaggtaataaagttatcattttatatttttaatgtaaaaatttctaatattaaaatgtaaaaaagtattaaataccaatatcttttagtattttcctaaaaaaaaatattaaagggtatcttacaattcttaaaacactcatgctttactctatttttttaaaatacatcattgaaatactattttattttattatttaatttacctcacacatttatattatatcatagattagtttttttttttgtaaataatttctctaaatcttttaaatattaaatatttaaatatttttactaattaaataataataaaagagtgataaagaataaaacagaataacaaataatgaatagaaaaataaaaataaataaatatttatgaaaaaaataataaaataatgtttagctctctctcttcttaactaattaaatgtagagatagatttacttaaatcaagagtttagaccactctgaacagtttttttattctatttgtttaaagtacactactaaaattttattttttttatt

SEQ ID NO: 86129 - DNA, 715 bp, Cannabis sativa
aaaaaggtatagtttttttagggtttaaattttcagtttaataataaaattttttaattttttaagtatataaaatcaaaatcccctttagaatttaactcctacacatatctcatttagagcatgtatctaccaaactcaaatagatttagagcatgtatctaccaaatagattttacaattttaattcggaactttatctgcagaaaaaaaaatcatgtttcaaatccaaaacttatatgccccaaatatatttagaccattaatttctagataatgtaaatttcatgctaaatttaataaaaaaaaaaaaaagttattgttatatttaatgcaaattttataattgtatttgaatacattaaaggtaaaatattttttttttatcaaaattagggtttttttattttacaatttaaaataggttttttcgcatttttacggaattctacattgaaatcctattgcaactatcgaagtaacccaaatcgcaacaaaaaatcgtatagcagcctaaataaaaatcactgcagaaaccactttaggaacccaaatcataaatttgaataaaaaaaaaaaaaaaaaaagttaaaaagatagtataagaggtaatttcccctaataaaagtataataaaaaatataaaagtcaccaacattattaaaattttattgaaaggatataaaaaaaaatattaaatatgtacataaaaata

SEQ ID NO: 86130 - DNA, 603 bp, Cannabis sativa
ccccctcgagcccctactactcgcacagataaccctcaggtaactaactctaggcgtcgtaataatcgtgtccgcagggaacgaagaaccaacccgacggtctggacctaaatcagccaacctcgagagaccaatctgagaggcatcccaatcaggaagcgcaggttgacgaagaccccgagcgacgtaatcctcacagccggccctcaagaaacaacgacgcaaagtctgccttctcgtcctcgcatggtcgcacacctagcagatacacgaggtccggttccttggagacgcaacagggagaacgataccaagtccataggggcgacctgcgcgatcacctcaacgctattttcagagcgcgctcccacgcccctcgcgatgaggacacaccccgtgatccccttgtgggcgatcaaggtgtgaacactcgcactaacccgcctaacgcacaggcagcgactactggagttaatgtcccggtgaacctcgcctcagtaatcatagctcctgcagtcgcagcagtcccggcccctgtagctgggggaattgatcaaagcatgcttttgcaagttttgaaaatgctcgagcagcagagaaagc

SEQ ID NO: 86131 - DNA, 708 bp, Cannabis sativa
gaggagtaattttcttaattatttaaaaaagccaaaaaaatgttatgaaaaattacagctcatagtcccttacaccaacaaaggaataagggatttagtatccttattaccaaacatagaaaatggaagtataaaaataataatgtttcttttcctcttcattaatgtttcttctgcaaaattattctctggagaaacaatgacttccttaaccaaaagcaactgagagaacaaattgcatacaacgcacaattagactaattaaaacgccacacttagtcttataccaacaaattatactccaagaattcaatcttttgagtattacatgtatatttagaaaagttagatacttctctttagaaccaatgatactatacacccaagggttgagaacttacgcataaaaaaattaaaagaaatcctttatttttccaatgtccgatgagatctgatctcccatacgaagtgaagtaatctataactattcattactacactctcaatgatatgtggctcccatgctaatgggtgtagtgttttaatgacagaaaacatatgtgtttcctcaataataaataataatactactattactaataatatagtatctcagtgcatttaattgtaaatttagttttttatacttggtgtatattgtcattattatttaacatatcacctaaaaaaaatttaaaaattcaaaat

SEQ ID NO: 86132 - DNA, 737 bp, Cannabis sativa
ttatttactataatatcactaattattatgattcattacattttataaagtttaccttttttatttactatattaccattatttaaacaataataaagaaactatcaacacattcatataattggttaggcaatatgaagtacataaacaatcattcacctcacaccttattaagtgaattctattccttaaaaagtaaattgctgactgaacataattaaaatttactttagataattctgaacaactatcttaaatttgaattaaggtaatcacactctttattaagtaaacttcatgtcttttataaaccactaactaaacataattaaaagagaattaaaatttgctttagatatttcttaaccactatcatataataaggtaaaccacacactttagtaggtaaactctgcgctttaaatagtaaatcaaaatattattcaattattaaaaaggttagccactaaattataaaataactttgtgttgaaacttattttaccaagattttaatttactaacatgtatgtttgattatcacataataatctaacatcataaaatataaaattcataaaattatcagataacacatataagtttaagcattcttacattggttgcagcggaaattaatgactcattctattcaatcattctaacccttgattctctatttgtagtagggtattgccaaatgatgaacttgaattgcttccttaaatccaataagt

SEQ ID NO: 86133 - DNA, 695 bp, Cannabis sativa
taaacaacgtgtatgtaattttaatatttacaatgtatgggagattgcaaacaagcaagatagcttataggtgagatggattcatcgtgtatacatcaaggggaatgactagtggaattacaaggcaccagtacaaagtagttggtactagagaagccttgtaattttgaaagatcagttcaacgaattagaagcaggccagcaactctttatgcagtattactatgtattcaagagttacaccctgctctgcccaaatcaaactaaggtgcaatggtgccaacagttttggggaagattgaacaccccaaagcacagctttgtcacatggttggcaatccaacagaggctcaaaactaaaaacaggttactgaaaatggggttagcagtagatgaacattgtgtactatgcttcttgcataaagaaattgcatcacatctcttcttcaaatgccctgttgcagctgcttggctccaggatacaaaatactgattacaatggcatgcagcagctaccaccttgattagcctcaccagatgtatacactatggagagctcgaaatgtcagtttgagggaaaatacaaaagcataaccagaagtgttaatcaagggtctaaaggagactgttacacaaaggattagcatatgttggctcaaaaaagttagtacagaggatgccagttggttttaaag

SEQ ID NO: 86134 - DNA, 679 bp, Cannabis sativa
ataccatgtaaatttccctatataaaattctcaaaactcaaatgggttggggttgactaggatttctttgggctttcttctcttctgcccatcttatgctttggcaattagatatattttcttgataagttgaaaaatattttttttattcattaattaaaaatacattcatattatattttattaaaatatatttacttttttgagtgggttgtctaatatattctcactctttacttaagtctaacatataatttatattaacctaagagatttaatagggatatcatctataaaagtgggtataacttaaagaatataaaagtagaggtaaaaattaaaataagtaaaataaaataggtatacaatataatttactttatattttctctacaaaaataccccatccgatcacctataacacaaaatgaattacacttaatatttttaaataaaacaatatataaattattaattaagaatcagatagattttataataataaaaactgtatatttttaaatcttaaaatttctttgtatagcctaaaaatcacaaaacataaaaattataaactttaatcattaaaaatactcaaaactaataaaggttatctaagtctaagaaaattactaatgcctggtttaataaaaatgtctcaataaaattattaaaagaa

SEQ ID NO: 86135 - DNA, 1159 bp, Cannabis sativa
aattttgatgttgtggtgataattattgtttaaattagagttctaaaacttgtttaaggttgtttaggttgatctaggtattgaggtattggcaaggtttgagtttaagaactcaaaacttgatctctatggtgttttttttttttttctagactcattgttgaattttatttcttagattgggtctattatagtgtatacaagcattctagagattattggaaagtttggggttgatttgtgtacaggggattaatttttggtttccctgcacaatcggtaaaccagttttgtctccttaggaaacccagtgaaccggttaactggttgggtttttttttttcaagaacccttgtttccccaaattattgatttgtagggtatggtcatgtctttcatcgatagggttattcctaatttgattttaaagtccccgggaagtgttttagcgtgtctctcatcgagatttaaatattatggtttagggccctgtaaagcgtcgagctgcaattccactcagactgaccgacacacttgagcactgaaacgaggtaagatagcataaaatatatatacgtgaatgtatgcatgttatgttgtgattgtatatgttttgggtgctatcatagcggcacaaccattgtgtcggttcggtagtacaggcatcatactggttaagagtgatattcaccccaaagagtattaattggtgctatcatagcagcacaaccattggtcggttcgaacgtacaggcatagtcctggttaagagtgatatcatggctaattatactcttgggtgctattgatgctatcgtagcggtacaaacatagtgtcagtcccgcagtgcgatcataatgctggtagtgggtgatatcaaggtcaatagcaccaaccgttaagaacgttcttaaccatctggtgagctcggttgttgagctcaggacggcttaaacataaagccagtgcagctttacctttatatatgttatgcatatctcactgagtctttcgactcatgagtttgctaccttgtgtaggtaagggcaaagctaagctggaggaacaccgagttggagcttggcagtgattttacatatcgcggcagtgcagcctggagggtttcagtctttcaagattttggagtcacattgtatg

SEQ ID NO: 86136 - DNA, 533 bp, Cannabis sativa
  modified_base (319)..(322): a, c, t, g, unknown or other
aaaaggtgaaaatattttctaaaaatatgttctataaaattattttcgctttctaaatttttaattgagaatcaaaattttaaaaattttgaaaaccaaaaaatcaattttaaaacttttttaaatagattttttttcttaatcaatatgttggacttcgaccccaacctggactctgggacacagactctagtcttggccccaatcccacactcagaccacaacccttgccccagacctgaaccaagactcgacttaaataaaattaaaaaataaaaataaaaataaatcttatagaacacacttttattttctgttnnnnaaattaaaaaataaaagtggttaagaacacatttttatttttgagaaacaaaactttaaaaacataaattttactcattttttgtgattaaaaaaattaaaaaacaaaagtgttaccaaatactacctaaattattctcccaaactttttaggttgttaaaaattctttacgaattattgagaatggtagattcaatcaatttaattttac

SEQ ID NO: 86137 - DNA, 936 bp, Cannabis sativa
ataattgctgtaaacatattatggtctgctttgtaattaactgccactatgaaattataaatagaggcaaataatctcaaaaaagggacgaaaaaaactcttggaaaagaggctcagaaatcataataagattgacttgtggactatcactacaacaaaaatgagtttcagtgacacacttgaatgactctaaaactttatagtgacacttcactgcgtgtcactaatgtagctgactggaaaagtaatatttagtgactcatcacagcgtgtcactaaagccttttagagtttcttaataagtgtcactatagccttttagagtccctccaagtcaaactctaaaactattagctacccataatgagcgtcactatatatatatattttttttttaatttacaattattgtatttaatttttatattgaatccgattttatattattaatactttaatagtatatatttatgaacaaattttacaatgaacaattaataaaataaaatcatttttttaagcaacataaattacaattgattagaaaatattattatttttcattaattacacacattttacaatacacatttttttaccaaacccatgtagcaaatttttgctatttagaggaaacaaaatgacactagcatttgaacattttgaactcaacaaacccagaaaaataacatttcaaacccaaaaataaaataaataaatgtatagaactcctaatcaccactactggaccatgatcgaccatctatgaaccttttcatcccactacctttgtcaatctgcaaaaaaaaaaaaaaaaagagtagatcccacaaatcgttacttcaaagttagcaagaaacattgagttttgaaataaaatctaaaatgattgccaatgaaaaatcaatacctagaaaaaataaaacttaagattca

SEQ ID NO: 86138 - DNA, 548 bp, Cannabis sativa
gggggtgtactttttttcttgaaatgtgtgctggggaggatcgaggagaagttccccgccaagcttaaatattaaaaagaagaattatttgcgaccaaactctctaatgttttgattttatatactttttcttatttttttagtgaaaaaatcctccttatgtttatttttctttgcaaatttaaggtgtcatctagatattaccgttaaatactaactgaattattattgtattagcttcaaagttttactttcacgtatatacaaatgtacacagtattcatccgattgatatttaacagtgatatttaactgacgtctcaaatttgctaagaaaaataaacttaagaggattttgccacaaaaaaataaataaataaagaagttaagtgtataaaaattaaaatataaggagatttcgccaccaattactctaaaaataaagatgcttgtgaaccttcgacctctattatacgtgtaaaatagctcaaacattatactaaaattagtattatatttatatttatcacatttaattacaaatatat

SEQ ID NO: 86139 - DNA, 933 bp, Cannabis sativa
tttaatgcacaggttcttgtttgtgtaaactctcaattttgtattgtgttgtttgtttcctttaggaatcttttgctgcatttctgttgggcagaaatgatcaaattagtaattgaagttacgatatttggtgtcagcacagcaaagttaggacacactttgctgtttggtgtttcttgtttgtcgtacatcttcatccaaatgatactttttctctgtcatttatttgattttcaaccgttctgctttccttggcaataggaagggtctcaatactcagcaaattgtacttctaatacttaggagggttagctcaaggtctttggtttgattcttcatgggatcctacctagtaatttgctagagtttcttgcccccaaagatggtagggaataagtatagaagttaagaaagtccatctaactgtcctgtgtatgttatggatttagcaagttcttcagatgagagctacagtggtgtcaataatgttattgtgatcacctatattttgttctcttgcagtttatttcatgggtagggagatctttgcatatgtggcacctcagatcctgaggctgccactaaatgtctcaaaattatcaagggccaagctgttgagcagacttacttggctgtgaaagatggttatgatgatcggaagagtataaacagttaactgagtactttgccacccacatgaacttagctgcaagaatatgaaatattgttaatcaaaggctcctgccttttattttagtggtacttactttacatctgagatgtctgtaaataaccttttctatataggatttagaatagttatctacggctgttaggtaggtggctgactagttgtttgattatggatcataatcatacagtttcataatctaagtcggattttgttgtggaaacatttctgcacgaggagga

SEQ ID NO: 86140 - DNA, 782 bp, Cannabis sativa
tccaaggaaaaggaaaagactattgctttcaaaagtactgaaaaggaagcgtcaaatgaagttggtgataatgacatggccttgcttgtaaaaaaaaattcagaaatacttgaagaaaattggaaataagaagtctaatgttaagacttcaagaggtattacttcttctcttaaaccttttcaatctaacagaaaaaatattcagtgcaggttgtgtgagggatttggtcatatccagtcagaatgtgcaaacaccttgaagaggaatagaaaaggtatgatagcttcttggaatgataatgactccgagagtagtgaagatgaggaaggtaatgttgctttaacttctattatggcgaattatgtatctaaaagtaagaattttgcatgtttgaataatactcccaaagatgaagaaaattcagatagtgatgaatctgaattgactgatgaatctttaattcatctttaagtgaatcttacaaggagatgtatgattcgtggttgaaattttgttctgaaaattgatccttggcaagcaagaataaaaaattgtcatttataatcaaacaattttctgagttaaatgaaaaatttaaagaataaataatttaaaaaatgattaaattagtaagttgtcaaaatatttaaatgcacttgagaaaaatgtaagaatacttaatcttggtttttgaggagatacagaatttaagtcaaagaaatcatgtgggacttggagcatcaaagtctcaattttcaaaaaaaaaaacgtgcttgtttct

SEQ ID NO: 86141 - DNA, 579 bp, Cannabis sativa
  modified_base (397)..(401): a, c, t, g, unknown or other
ttcttcacaatcttccacactatgattgagtattgacttgatattagtgggcatatagtctttcactatagtgcacaatttcaagagggaagaaaataagaaaatttgaaaactataggagttctcttatttgtctgacaaagcgatttctaggttatcaatcacttacaattaagagcctataattatctattaatacgacacctattagggttagattaggatttaaatatggattaaaaaaaacataaaatgtcttaaaattaaaccctagtggtcgaaccctcttgtgggctctatggattttaatttactttattaaataacatatctttttctcaaatatcatattttaactttaactttataaatgtcaattttatctatttaataattnnnnntaattattaaataaaattactatttaatttatttattaattaaacctatcaaagtctcttaattaattaacaaactatctcttttcttctcaattaagttcttgcttagtaaaaattcataaataagacatagtctaatttaaaattctaattgattaattaaaagatcggaagagcg

SEQ ID NO: 86142 - DNA, 1205 bp, Cannabis sativa
gacatttgcaaaaacacggtttttcaatattttatttttatcttgtgctccgtggcgaacttatgaaattttaccatcgttcatgcaaaatttaaataatcaataaatatattacaattaaaaaattattaaaattataatactacatatttataaatcaacaataaaatatgctataaatactaaaacatacaaaatgagaaggctaaaattctctctagccgagtgatctattgtttatacttttttatatatgttaaatattttcttaaaaaataaatattatacttatatagtatatattatatgagtaattaaaaaataaaaaaatctaaatataattatttttatcaaattaaaattaagaaatataaaattatttgaatttaacacaaaaaataaattaaagtgagtgcgaatttttcgcctaaaaattcgagagcagtattttataaacttgacacgtggatccaatcccttagaaaatgatgacatgttaattaatgactctcaaagagttagcctcacttgatctgaactcgcgagatgatgcgacattgacaaggtctagtcgcatactatgccttgcatagtcaaagacaagcaagaccgagagaatttaatacaagtcgcgtatatatagaaatatatgctacaactaggtaatcttctcctgcgactagtaaatatcgcttctttacacaaatattggtccgaatgacttatcgtgttcgacgatttgttagggactcccatgtcctatgttgtcaacacgtgaggtgtccatctatgcgatttttgttgaacacagacatctaaatgataggcccatgagccacttagcaaatacaagatgcaccaaaagcctggaagcttgtgcgagaatacgaataggcaatttgcgctaattagcaagtcgcataagttgccacacttaaagcaagaacggattaaactgttcttcatttattctttaacgtttattcttatttaaattctaaaacctatcatttatgtaaaaccaaaaggacacttgctttttatataaaggattgatccaaatcaaataaactaagcttgcaacagtagactaggcggaccgagatctgactaaaccacaatactttctgtatttttgttatttctagtttttgttttgtttgttaattagtagctaattctttgagtactcgctactctaagtg

SEQ ID NO: 86143 - DNA, 1089 bp, Cannabis sativa
taaaataaaattatatatattggcacatttttttttccttacctactctaattagtaattaatgtgcaataaatcatatattaaatatataccttaattatttttaaattattgtatggttgggaatcgttgactatataacaatagatagaaaagtaggaaacccaccgacagatggagccaattcacaagtagggggcaaattgttaataaatttattttgagggggaaaattataaaattatatattaacatatttaataatatatataatgtatatatttatgatttttaaataatagatcaattttttttttttaaaaaaataataaaataagttaattttgagaaattttcatttttatggtttgaatttttttaagtcaaaaaaataagtacttcagtagaatattagatattgtttttttggttattttataatttatttataattatcataaggttaattttatcagtattttttccttaaaaaaaaaatttatcagtatttttagtttagttttatagtttatttatatagttgttatgaggttgatttctcattatttttatattaatttcttacttttttctctaaaaaaaattgtattttataattttaaatctttaaaattatttttttgtaaataaaaatttcaaactgtaaaattgtaattaaataaaacacaacaaacaattattttttataacaaaaagctggtcaatgattttttttccttttcataatatatatatatatataaaatatttgtcaaatttatcatttttcaaaacaaaaaaccaaaaaagtgttattatcaaatcaatactagaggcgtctggttggaggaataaaagtataagaatagaaatgaaaatgaaaatgtgaataaaaattgaatggaaatatatttaaaattaataaaaaaattattaaattatttcacatcttgcattagataattgttattttttccatttaaaaataaaatagtaaataatagaaacgttattccaacatttcaaaatataactaaacaatttttttttacttttattttattagttccaaccacacgtgattttaat

SEQ ID NO: 86144 - DNA, 893 bp, Cannabis sativa
ttcaacccgtccaggtatttctctgtcttgttgaagttggttgccacaattcctgaggccaatcttgccaagcaatcaaactgagtcgtgtattttttagtaacactcatgttttccttttgactcagctgggtgaattcttttctctttgcgcttctaactgactcgttgtaatattttacattaaacaattcttggatcttctcccaggtcatcgttgtaacatcttaagtcagggacacgatgtcccaccataccagagcgtcttcttgaaattggaatgtgctacaggccactgtgtcattgccagtgacacccataaagtttaagattctggtaatcacagttagccattgctcgactttcatgacatcaagacctcccaagaaaactggaggtgcctgctcacagaacctttcatacaggggttccatctcgttcattgcaactacaggtcctgcctgcacagcaggggcatgagctattggtatttatggagcagggattgtaggagcacccttctgtctcaagcgtcggatctcttcatcttgttcttaatcctagtttgcatttatgcaaacctgttttcccaatcctgggcagcttggggagctcgaccagcctgtgcctggttagcatcaccccggccacgtgccctgcctttaagacctctccctcatcctcaaatattaagggggatatgaactccctaaccacaactagatccaaccgaattaccctggctcttggtgtttcgcctagcgtccatactatttagaacaacctggataaccaagagctagtctggtaaaattgtgatcaaataaaaacttactaattgccgcttatttggaaattaaaaatatacccctattctactattaggctactaa

SEQ ID NO: 86145 - DNA, 805 bp, Cannabis sativa
gccccaaatcttttagtgaaaattcagtattgagagcagctataaactgattaagaagagaagtattgggacctgtgagtaagatatcatccacataaacaagcaaataaaccaatgtgttacccgagccatgatagaatagagaagtgtcggattttgatgctgaaaatccccaatgaagaagagtttgctttagtttatcattccatgctcttggagcctgtttcaagccatataaggctttatgaagaagacacacatgatctggcttggacttgtcaacaaaacctgggggttgttgcatatatactgtttcattaagagtcccatttaaaaaggcattgcttacatctaactgcttgacacaccaatttttgctgacagcaagtgaaagaacaacccgaacagtcactggcttcaccactggactaaatgtgtcttcatagtcaatcccaggtgtttgaagataccctttggccactaatcttgatttgcacttgtcaagagacccatctttgtttagcttaaccctgtgtatccatttattagtaatcacctgcatgtctttagtatagggaaccaatgtccaagttttttgattggtaagagcagtgaactcatggttcattgcagcaaaccatttgggattggtgagggcatccttaagagacttaggttcagaaggaatgagggattcagggagaggatgcttagtagcaagataggctttgggtttggtaatcccattttgagatctagttgtcatgggatgatttcggcttatagaaggagctgggatgatttt

SEQ ID NO: 86146 - DNA, 1025 bp, Cannabis sativa
aaaaaaaaccaaaactagaatacaatattattttttatattttataatataaaatttatttggcaaaaattcctctcatacgttttgcacctgagactacctaaataaaatactaaattgtattatatatatatatttattaatttagttattttggttaaaatatctgacaattttactttatttttgttgatataatatgttggatcaaaatcttacaagaaaaaaacttaaaaaattcataattacagttggtgttgcttttcatgtgggaaattatataactgacctcagggaatatgattctccactcgcgcgtatctttcacattgatggctggttctatttttgtccaattttgtattttaaaagtatttttgtaaataataaactttagaattagtatttttgtaaatattaaatagtataaatgtttatttttgcttgtagtagtataaatgtttatttaaagtaatattaacccaaaatagaaaaaatcccaaaaattattaaataacatttctgcgtacatatataaaaaatatatttttattaatatttttttaaaataataaactagctagagaaagtgtttatgatatgtgacttcattatttatagctattgtagttaccaagaaaaatctccctagattttctaaaaaaaaaaacaactaaacatacacttaataatgagtaattctaatcactatgttaaaaaaaaacatacgtacataattaaataaaaactaagaatataattaagtataagtacattgcaccacgtgacattacttaatatatatatatatatattgttgatttaataattattttatttttctgttaaagttaacagttaaatctaacactgttaaatcaatcaattaataattatttgtttgaaaaaaaaagtatttgttttaagtatctaaatttaatttatttattaaaatataacctagataattatttaaaagtatcaacaaaattagataattatttttatataaatcttaatttaaa

SEQ ID NO: 86147 - DNA, 673 bp, Cannabis sativa
  modified_base (60)..(64): a, c, t, g, unknown or other
taaaaatatttaaaattccatgaaaccgtatttttgttattttttttgttgtttttgtgnnnnngtgaaattaacccaaaaaaaacctaattataatgtagaatatatactattttagattttgtattttgtaaagttacatattggattctcgttttctttaaatggcaatattttttaaaataatataaaatagactctaaattcaattttcgtcatttttttaatataactaatttctaccacgaacaaatacaaaatatatatagaaaaaaaatatcataacacttctagttcaagttattattaagttaattcgataaaaattatgctcagaatttattttgtactattttaaaaatttaaaatctgaattatttaataaaatagagcatccaatcaataaattttacaatatacatagtttaaaataataattacctatatcaaaaatatatattgtctttagtaatgtctctatcaaaaataattatatatatacatataatatgtatatatttattcactagcaagcaacatattacttttaaatgtttttataaatgtacgggggtgttcaacaataaagagctagtttaagacatagtggaggactgaataatatattctagttaatttcatttgtgtaaaattatttatcccacttaacagt

SEQ ID NO: 86148 - DNA, 580 bp, Cannabis sativa
taagctagatcaaacgtcaagggtggtatcaactctgagatagatggtttagtagatgtgcaagctttatatagtccatttgaatttttttttttttgttttttcatttggtttgattattaaagaatgtaagtctttattgtttgtggagttaaaaaatatttctacttattttatatattaagggttaaataaatttagtaactcatttatatgaaagagcatctagtttacatcctaaatatacttttatgagtattgttccaattgaattgctacatcatatttggtagccgaatttgaaagttaataaagtttttaattacccattcaaattcaaatgacaataaattttaaatattattatatttttttatattaatagccttaaattttaaatattattaaaaacgttatttttttaattaaaaaaataacgtttttaataatactaaaataaaaaactaattacacaattattattatacataactgaataaaaattaaaaaaaaaaaataattaacaataggtgttatacgtgcgttgtgcgttggggtaatatattaagccagtatatat

SEQ ID NO: 86149 - DNA, 1029 bp, Cannabis sativa
  modified_base (504)..(504): a, c, t, g, unknown or other
acctatcactactgattatgggtgctcataaaatactcaaactaatttaatccacatgatctgatccaatccgcaaagtgtggatatcttgtgcagattgtattggattagaaaatctaaaatctgtacttgtgcggattgtatattgattgacatgtaaatgtaatcgatccaattcaatccacactatttatatatatattttaaaaaaaattatatgtgcaattaatattttcatgtcaaaaatagtaattaaaaatctaatacgtatgatacaaatacattttaaaccttagtagatcaaatgtatattttattcttatttataaaaaaaatataatttaaaattaaattaaatatttctttatacatataatattttatattttttttttgaatttttttatttattttaatttgttgttagagacataaaataaataattagttttattttgttgttagttatgtataaaaatataataaatattaaataattcaatnttaaaaagtaaccaatctaaaatagctgatccaaatcccacttttacaaattgggttggatttgagttattatatggattggattggatttaaaatatgaaatttatacttagtgcggatcaaatgcactaggagtaaaatagcgcatattggattggatgaacacccctaatattgataggctagcctcaatatcgacttaagtaatggtaaacaaccgagctagaatgggttttaccaccttcttgggctcttctttctctagctaaggacaatccctcttgtaatgccccattagaccatactaaaaacatgacctgcctggatgatgcttcttacaacttaggcattccgaataattgtaacgaccttcaaggccgcccagacgaccaccttgactctggttccctcaaaacctcttattcacacttgaaccaccacatgttgatggagcttttctcttttgatcataagatgagtcaccactacccctaccaaaactaaaagtaggaggagcagcaaccc

SEQ ID NO: 86150 - DNA, 724 bp, Cannabis sativa
ggtgggaggtcagctatggaaagacagaatgaggaagtcaactcattctatgaaagacttccttgataaagcagatgaatttattaaattggaagaggctgagcgaaatgccaaaggcctgaaccaagctaagggaaacaagaatggagcaaacactactggccaaggctcccagggtcaggggagcaacaataaaaatggctttaacaatggaaagaggaccaacaacgataatggtagaaacatctttattaacaacaaaaagccaaataaatcatcatcgttaatgactgtgtcctcctaattgatacaatcttcagccacgtataacattccccttgtccttgcctatgggtatgataacctatcatcccaccaaaagatgacttaccattgagtacggagtagttaaggtcattccatatggaatatacaagttagcacgttacggtaccaacacaaagttagtactatagaatgtccattgaaacggaaagcacctacaaaagtactaccaatgtaagttgcttttcagtaatgacttaggcttgttggtgtacccgcaaagtgtattttcatagttggtcgtcatacctacaaataaagtttgataatgtaaaggtacgagttgcccacttttgatgtaataaggcatgtttgcccattttattcatcaagaaaaaattgcaagttatttttcatataacgacgcagcttgtatgat

SEQ ID NO: 86151 - DNA, 546 bp, Cannabis sativa
  modified_base (39)..(46): a, c, t, g, unknown or other
  modified_base (124)..(144): a, c, t, g, unknown or other
tattataattaaatgacttaattgttaaaataattagannnnnnnnttaaatataaataaaaaaaaatttatttataaatattgattgctgaaagaggtattgttaaatatttaattaattatnnnnnnnnnnnnnnnnnnnnnaattaattaattctaaaaaaggaatgttaacctattagttcctgctattacaggtaaaaaaaaaatgtaacggttacaataaaaatgtaaccattaaatagtcacccttcggtatatatattgatttgggaatttggcttctcaaacacgcctcccatattactttttttttttttggatcagtatataaaattacagaatgataatgggtttgatcttctttttggcatgtatatattcttttgtcttatatgctaaatgttatatacattataaggtttcagttgggtttactggtatatatgctacgataaatttattttaattaagatattttgaaacaatttaattcaaattttggtgttggttatgactaatattttaagtaaattaattgaaaca

SEQ ID NO: 86152 - DNA, 646 bp, Cannabis sativa
ttgatctaacatagccacagaaattaaatttctttttaactcaggaacatgtctcacttgcttcaattttgcaacacctccaccatgaagttgtagcttgattttcccccaaactagtgataggacatgatctattatctcctaatcttatagtccctccttccattgcttgatattcactgaattgtgattcatctagacatacatgaaatgaacatccagagtccatcacccatccagttcttgaatttgaatctgagactagaagaactccagcattaccatatccatcactgtcatcaccatcagaaatcaatcttgcctcacctaatcgattctggttgtagcttttcagaattggacaatcttttctaagaggagtagtcttgttgtagatgaagcactttcttttaaactttgaattcaatttcccttgatctttgttctgtccagtgtggtccttgcgccctttcttagaattctttcctcgaaaaaataagccatctccatcaacttcatcttttagctcagatttattttttaactcttttgacatcaaggcattctgaacttcttcaagagtcaatgattcctttccaaacatcattgtatccacaaaatgttcatatgattcagtgggcaatga

SEQ ID NO: 86153 - DNA, 956 bp, Cannabis sativa
aactcagatacaacttttcctggtgctgaaactgactagctgctaacttctcttttcaattttagaactgcccaggggggctgcttggagatcagattgagcatccttatactcggcctttgcttcatcataggagtttccaatatcaccaatagaagacttgttgaaagccttcaacttgtgtttgagtctcatagttttatagaagactcctttcaatccatgactcctaataggcctactccaactatccataaccaactgtttgtaatccttatgatcaatccagaaattatagaatttgaaaggtttacatcctataatctctgtagtgatcaaacgaattagacacaagcaatggtcagaacaagtttcccaagtgaagttggctatagtattagggaaatcacccaagcctcattatgaaagacattgtctatgcgagaaaaaatccgagcgtcctgcttattcgaccaagtgaaattagaactcgttctcttgaggggactaactttagcctgcattaaccaattattagaatccacaagctcagcagctgaaatcgggttacctcccaacctatcttcatgatggaaaaccgcattgaaatcacctaggatgatccaagctttagaaacattaatcccagagagacatctccaaagctccaaccttccatctatagaattggctccatatatgaaggtagcaaaaaaatctttctgttgaccaatcatcttgatacgacaatggacatgttgattagactcctcttctacttccacatgaacaaagcctttcctccaaactagtaaaattctcccttcaatctcactactagtataatgattccaattaacaaacctcttttgcatcatctcaacaaacctatcaccttttattttagtctctacaagagctccaactccaacattatttaatctcaaaatatccaa

SEQ ID NO: 86154 - DNA, 1715 bp, Cannabis sativa
tttatgtctcgaattatgatttatggattattatgtcaaattattcagtattataaaataggagtgttcattggatcacatttaatgtttttaaacctatttaaattcgatttaattgtatatttgattttagattttaccattcgatctgatctaattaattttaatcatcccatctagaaaaaaaagtcaaattttaatcttaattgtcatgtatgcaaataacgttcaatctgattcgattacaattgaataatcaatgtttgatggttggttttaattggaacagccgctattaaattggatcgatttatgtacccttataaatgtaaaattattttttcaaataaaatggtgatagatgtttagactattataacgttagtgtaatttaaaataaaataattaaaaaaatttaacatgtatttttaaaaaatcagtattaaaaatgcgtacaaaatattaagcaaaattacagatttgcatccacatgagcattttacatgtcgcacttgataaaacttgacacatactgaataattagaggacataaaaataaatagattatatatagtgacaaatattacaaaatagaacgtggtaaagatacatagatgatatcatattttccagtcaattcgatgtatatccacaataagtaaatctcattccccacaaaactcagttggcctttccaacatggcaacaaccatactacaatcagaagaaatctaatcttgcattggtccaaagataataaaccagccaactcaatctcatgtttaatagctagcaactcaacaacaataggagagaagagtattcaacaaaataccttatgttgcagtgatcacccccaaatgattttgaaccaccccaccaatactacaacaactatcagtctgaccaaccgcaacatcaacattaatcgtccccttgttaatcctcgaaggtttccacctgacacccacattttgatttattcacaaccaaacgcccccgtaatttttattccaaaactcatgtaagtaatcagtaacccaatccagagcttgttccatcgaaggaacaaaagaataatacaatgcacaattatgcatatacaaagcctgcaagaccaaatacaacaaaaaaaatcaaacttatcatttggtaacatccttgcaatacggctaagaaagtcaattcaaatttaaaatctttttttgtgaggagagaagtaagtaataccacttgttgaaataaatctccacatgtactgtccagatcagcattgtttaacaagaaatacgaagcattaaacctaagcggccttcggcctctaacaacctactatgacagaactagtagttagttgcaaagtttgttaaaactgttgcaactaactcccagctttctcttctaccctacaattataaatacatgcaaatcaaactgaaaaatagagatcatatcaaaaaatttggagaggaatagatttacagaggttaagtcttggagccctaggtttagggctcagagatccaaaccaataggagacatacacagaaaaagaagaagaagaaattagcacaatattcaaagagaaagagagagaaaataaacactgtaatataaaatggattaccaatcgtacctgtgatttggaatcctactttgtaacttttttatcttgaaaatctattagtggaaaagagcttttctgaggcgagctc

SEQ ID NO: 86155 - DNA, 852 bp, Cannabis sativa
gataatttcctttgagcttgacttgatagagataaatgattaagatctcatttcagtaattatattagtttactgaaaatatccattgttactgggtataaaaataggaaaaacataaaatctatatgtatcataatcactacatttagaattcaaatatatctccataattgttttactaataattaaaagtctaattatgaaattaagctctaattatctgctaattctcctattaaaactaagcggtcattacacaagattagtctgtggaagaccatatacccacaatctcatatcgtatccaatatcatagaatcaggtatgtcttccatcttattgatttatagagtaatcttgataatctgacatgagtctaagattcatgtgtatttgtagacctaatttcttataagctctcccacaaataataccacgtcatatatagctaggagtatacctaagagtagcattcataaaagccatttgattgtaatattttgctctgaaaagcaaggcaagaagagagtcggaaatcatgagaatgcaccaagcttgtgctgtcaataatgctttattatgatactcaaagttacgaaatttaattccccttaaacttttggaaaatacaatttatgccaagctagctaatgcattttctattttttacatagtcaatcccataataatgtgtcatcatggattctagatcatcaaaagtattctttaaaatttcaacatatcaagtaacatcataaattactataaagtcttttgttttattgtatttaaaccacttgaggctagctcaagtggccatagggggtgcgtgtgtgttggaggtcctgggtt

SEQ ID NO: 86156 - DNA, 550 bp, Cannabis sativa
taggagcttccgctgctcccactccaatgtaaccaaaaaatccgagtctcaattgatgttggaaaaccattaaaaaatccaaaaatcaaccgcagcctcattggtaaactcatttacttaacaattacatggcctgatatatcttttgccgtaaatgaactaagttaatttttatccaattcgagagctccccacgtcgttactgctcatagagtactataatatcttaagggcacctttggccaagggctaattttttactcaacatcttcaactaacatatctgcttatgctgaaactgatatgtcaaacatagactttcatctcaaaattttttcagatgctgattgggcttcctacagtgacactagaaggtctgtttcgggctactatgggcttcctcttttgtgccctatatatatacctcatttgtacaccctaaactcacttttggcatttctaccatgtgaataataggagtaaaataaagagattttatttttattacatactcatatgaccaggcccgaccttgggcataggcgggcta

SEQ ID NO: 86157 - DNA, 651 bp, Cannabis sativa
gtaacatgaatatggcatagcccacatgatcataccctcatcttgcacaaagtcgaagatggaggttatatcatgctcatccactgttctgccttcagtggataagggtcaccctcaaacactggtcgattatgcttcctaaacttctcatacaacaactccaaaggattccctacatcctatggcacaaccaaaggtgtcaaaggaatatgaacatgggcaggctgagcctgttgctctctcaactttctaatatgatcctcttgctgccgaattgtctcttccattgtatcatacatttgctctgaattctaaggtggtaggggattcacatcctcaccgtcaatcccgagcccagaaagcttacgattggtaagcctattagatcgcctcgggtgcattacctaatagacctatgatcaatgactttcaacgatagaacatctagtcaaatatcatgctaataagcatttccactcatataataatacctcacataattacccatattcctaacatatttttctagtatcacattaacaattaatcaaataatagataaacagataacacttattataccatgtgtcatacttgttttcgcagtaaatgtacatattcagctagtcttcaggatctttaaaaccatgg

SEQ ID NO: 86158 - DNA, 598 bp, Cannabis sativa
atgaaataatcaagaaaaaccctctctttctcttcttcctcttcgtaccagccaagcataaggaattctttgttggatttggtgttttcagcagggattggaggaggaactaaccaaggtaacccttgttgctttctagttatgttgtgtttcaagttttagttggtttcatgagctgatttagtgttataggggctgttaaggtttaaagattgtgtagtatgatttcaaaggttttttttgggttgattctaagccctcgatatcagttttgagttatggtgtgagaatttagtaagcttgagttttgaaactcaagtttaggtctttaatggcaacttgagtttcatgggtttgttctgtgattttcttgttggaaatggttgtttatgcattgtataggtaccctggagagtttggttaaatttgggatttaattgagttaagggggttggtttttgtgttcccagcacagtatcggtcgaccagttttggcggacctgtacctaccggtcgacaggttgatgtctagtttttggacttctggttgggaccggtctgccggttgggagaattttccgaaccctagtttttccca

SEQ ID NO: 86159 - DNA, 652 bp, Cannabis sativa
atataagctcatggtcccctcacttgttgagataacacaggtgggttgaaatgtaaaatacctaaatttagaaattaagttagttaatgtcccttttataagcatttaggaaaatggccatttgattaaaaatttaatgataaaattacaactataactttagataattaaccctagttttctaccctcttctcattctctcctctccaaacaatatcatgcctccttcttctctcttggcactgacaagtccaaatctattcctctcttccagtttgactgccacctgttataccagaaattttgctgccatctcagtggaggacacgtgtcacgataaggggaatatgaatcgatgcaatcaccttatatggaattactcgttaattacatgagtatcagagtatatttgtaacctatagattgtaaggtgttaggcgaggagctaatatacaaactggtacttagcatattagcgagaaactatatgtcactgaatgcgagttgcgaggcatcaaggacggtatacattggaggagaaaagcgatatatatcaattgcaaaagtccttagtgtacaaactaagtgctactgacggatcggctcaagaccaagtaagcgaggtgcttgtcgcattatgggaagacttcat

SEQ ID NO: 86160 - DNA, 623 bp, Cannabis sativa
actttagtaattataagaatagtccataaattttagtagcaacaagaaaattctagaaattaactatattaaatcaaattttgttgagtaaattccacttataaccaatccttatacattttatccacatgagcatacaacataaataattaaaaataagattaaacttaggtggcttcgcctctacaagaccagaaccagaagttagttacaactgttttgtaactaacttccaactagatcaacaacttgcactatcctataaatcatctacatatcagaagaaaaatacagaacagaagagtgagagagaaagaaaaccctaattcgagacttcatctccaagatccagagagaaagggtccagacagagagtaaagctctcgtgctgaggagttttgaagagaagtgaaaaatcgagttttttaaaatgtcaataatgtaaatgaaaatataaatttgtatacgcctgtagaagcagaatgtaattctgttactgcagaaaccagttttgtagcgataaaaaagaacagacagaatataaaaataattgcagaaagttaaataacttgacacaagagatttgtacgtggtatcagtgttctcctgaacactcctagtcc

SEQ ID NO: 86161 - DNA, 972 bp, Cannabis sativa
aaaacataagggggtttcgccgcaaatttctcctttatttttatcttatattatctcaatttttgggagtaaagatacaaaaatagtgtccaaactccaagtacattattgcagtgtccattgcaaaatgtgccaacttatccattttacatcgatcctcattgtttttaaaactaatgccaaatgcttgctgtttgataaattcatatttctcatacaatataaatgtatatttgtaattacttatttattatcaattaacaaaaataattagtttttctataattttacataggaatgtttatagggaaattcttttatttttcttcttttgagaaaattgtcgcaacaatagagaaaataaaatagaaaatttcacctatctaagatatgtctcgatccagagcatattttgttaaaccatgtacagcttggttaatatttctcctaatatgagaattaataactctaagaaaaaaaaaaaaaaagacaacaaacatctcaaattaaattttcaaagcatgataaatccataatatagaactcaaagcattagaaacccgcgaagcattaatatcattacgagtaattggcaattgcaactacaacacccaatttaggttataacaaagagcatgagcttccattttatttgaacgaaacatccttgaactgactttaaaagaccagcaactacctgaccttgatgattttgaatactcacacccacaacaagaacttttgatactaatttcagagtcacatctatgtttagttttaacccaggtgtattaggaggctaacaaggaaccccctcagatggttaggctattgttcttgcatttcacactggggcagggtcatgcacagtattccattgttgcaggggcggacccacattgtagcgagggggggcagtcgccccccctgaaaaaaaaatcgagaaaaaaatgtatatgtattttaattagt

SEQ ID NO: 86162 - DNA, 729 bp, Cannabis sativa
gggtctccgaggcacttcttgatgaagtgcctgattctttggttgttcaccttctggaacatccccagtttccccaggttgctcctcctaagtattgtgggggttttcctgagccatctcctgccttcgggtttttgaacctcgaggtcttcctcgcggccttctcaccccaggatcaggttggttttctgcagcgttttcttgagtcgccctggctgcgactgcgtctctctccaactcagggtttcattagtttgcctcggttagacgttgtcaaagttggtgattttccaattcaaccaatggtacgtacctagtgggatcataggcatcctcacttttaggcacatactcagtgtcagcattgatttcctcaatcacaatttctgggttttgatcattatcacattggttacttcttgaacgtgttgaacacgtagttcttgaagtgggtggcctccgtgagcccattggctcttttccaagacgacgattagtctcttcaggagagctgttgtctttttcctcattgtaagccatggagaaaaaattctttcttctttggttaggagggatttttctgagcttttatcacgtaggctctcaatgaagcaccaaactgttaatgcaaaatttcgttaatgattatgagcctattttcgcaataaatttggcaaaaaaattataagaaatttgagaaaactaatagaaacaaaaataacaccaggt

SEQ ID NO: 86163 - DNA, 2072 bp, Cannabis sativa
gacatgttggcgcggtatagtcacaaacgggtatttcgggccgaaccaggtttggggttgaaatacaattttgggattttatattggcatattattgttgagtgaataacctgaaaattaattgagtaatgtgatatgtgtttaagacaattttacccttgaatgcttatgtgtgtgttatatggccctagggacattttggtctttttgaccatttgtttattttcaattaaatggaatttcaagtaaatgaaactcatttgtttctcagcccccaaaccgacccccctctctctctttattcatcttttcaatttgtgagtttgttgagaaatagcttgggttcaagcttgatttgtggccatctttggagcttgtgtgattttgagatcttgaggtagtttctatctctttttgttttcaattgttgctgaaattgaagttgatttaagcatgattttgttgtaaagatccttgtgatgcatgtgtgttggaattagtttaatcttaatactctgtgcttgtttgtgttagaagattggagtagaatgctttgtgttgtgttttgagataattttgaggttaggttggtgctttaatatttttatgtagctctaattttgttgttgtatgtgagctgagaatgttggttaagtatttaagctcttgaagttggaattttggtgaatcttgctctagtttggagcctaagttgtatattgtttaaatattaatttagatgcatttgagctgtggattttgagctttagtatgtgtgttttgccctctgttatgttgggtattattgtggaatttaatctggtgtgtgagtatgtttttggcttagtttgggtgtgtttgagcatgtaattcgaagttgaaaattgggattttctgggtttgaaacccaagggccacagcccagctctctaggcgtcgcggcccgcctatggtgaaatcctgggttttaaacccaggtgccgcggccccatgtggggagtgtcgcgacccgcccttcgtttttgggcaaattcgaatccttataactttgtgatctggactccctttcaagagttctatatatcgttggaaagcttgttccaagctctatgtctttattagtattttgaataccaattttatattatgtgaaagtagatttagggattaacgctatactcgtgaatcctggaaattgtgactaggattattggtacttggtcaggagcacccggggatttggaatctccatgtttgcgggacatcaggtaagacggtagttaacacgtagagttatgcgcagtggcgcttatattgaaaatgatatatgtgaataataaggaaccgggattagggttattaccctaacatgagcggtttaatggcctagggttgttaccctagtgattattaatgtgtaaatgctataccatgttaaatatatgtgtatattgagatttaggattatgcgttcaaggcataatcgggttggactcggtaactagaaatatccgtttgtgactataccgcgccaacatgtcgagaaggtgctaggcaccactggtgccaataacaatgctcttttcaaatcattattactcatattaaattaatagttgctgaaaattttgatcaacaactataatgtacacgattagaaaaaatttggactaaaaagttattttaaatgccaaaacaaatttaagatgcattttagaggagttcattataaaataaccctaaaaaatttgatttttgtagcaaaattatgtatttgatttttaattattgaaataatatatatttaaaaaaagtttgaaatggatgcttattttgagagagaaagagaagtaatggttgttttggagaatctgattgagatagacaaaggaacttgcgtgtttttaatggtgtttttgaaaatggtaaactttttcttataaaaaaaaaggaaaatggtaaacttgtcttaatttcgcatatttaaggtgcgtttggaaagccacagtgtaattggatttgtgtgtaattagaggtaattacataatttgacatgtttgtctgaccatgta

SEQ ID NO: 86164 - DNA, 1023 bp, Cannabis sativa
ggtggactatactattgaattatgaagttcattttgaactctagactatattcaatacaccacagtactctttgtcacacatatttttaaacatggatgtaaatgtgatgaattagcaaattttcagaatatattcttgatcttgatttatgttccaattaatatattattgttgtaatagaaattgatattaataaagttctttgacattgtatcacactaccttatttgagtgggagaattttaaaattcttaacccatctttatttggttgacacttgtgataggaactttagaacactactgagaaagtaaatctaaccattcatatggatagaaatagcttgtcagaattatgagaataagatcgtagaattcttgtatagtctattcgagtgacttaggcgaaaattcttaattctcatgaaatgttttatggtatctctattgattactttaatctcaagcaagtatttaacactcaagttaaaatactagattgctatgttgatgacttagtctaaaaggaacttactgtttaagactaaaaataatatgtcacaactagatatgcctcaaaacaatagtaagaggttaaatgtacttctatgtatgaatttaaccagactcctactgttgagtgggagctatcagagatgtaatcaaacaaggaacattaagggacaatcaagaaatatttatgaaagtgacctatatgtttgatgtactagagatgtatatattataaatccttatatctacaccaactcataaagaatccgagatgatggttactcttggggtggatgagttattctaaaagagtgttaaaactcatttataataattcaagctccatgagtgaagatatataactttgtaaattcgaaattaccagaaagttattcaactgaagaaaattctacactgtgttatcactattttattctttaaaaagaatgagagatatgtcttctgtttatttagatttacttaataaacagtaaggaattcagtatccct

SEQ ID NO: 86165 - DNA, 973 bp, Cannabis sativa
aaactaatgccttgtaacttgtggcaatgagagcataacaatctcattccactttactgacaaagaacaagaaaaaagaacactctaaaactttcttctacaattattctatctctttatttgattatttcttaagtggtctgatctgatcataactagcttctctgccaaagctagctagctagctcatgtttagaaaacatttacattagaagctaggaaacccgatgcctaaaattttaaattacttgaaacatatgatctataaattacttgaaagtctactcattttataaacaagactttcacatagcctatgtttcttgtttagttaagcttaaacatatgatctatatagtcatagctatttgtacgtaatttgaagaatggaaacaacagagtttcctcccataaaaatgatatatgattcaagttatgaaatccattatcaacagtctaagtgatcaaattcagtatttactatcagaaaaaatgcccaacccaaatccccaaaatgatttaagatttcaaataatcagttaccaactataatacatcaacattaaccatatgggcatccaaaatatctgattctcccctataatttcacaacaaaaataatataaacaaaattttactttcattcatacacatttctcagcaaccaaacaacagaaagaatgtttcatgctgcaaaggaccaacataacaattcaatcgtgatcaacaacaagaaatcgtgatttgaagtcaacaaattaaataaatccatatacatcttcgttaacgagactcaaagaacaaaaagaatatatgataatttgaatcaaatatataaatatatatatacatgcatgaattaggctaaaaacgaactattccacttcagtagattttaaagcaaaatgaaaacctcatattctctacagaagtgaaagagatgaaaggggaacacgtacataagatgaagagt

SEQ ID NO: 86166 - DNA, 732 bp, Cannabis sativa
  modified_base (71)..(85): a, c, t, g, unknown or other
atagaacttcaggaagttcctataactagtttcctttagcatcctcaagtcttttctttagtgtatccttnnnnnnnnnnnnnnntgcttcaacttgaccattttcttgggggtgcgccactagaaagaaactgttgatgataccattgttcgcacaaaaactagtgaaggacaggctgtcaaactatttgccattcttagaaactattttgtacggcaatctgaaccgagagattatgttcttcacaacaaagtcttgaacttttttagatgtaatggttgccagtggctcgacttccatccacttagtgaagtaatcaaccgcaaccactgcataccgcactccacctttgcctttggctagttgtccgatcaggtcaattccccaaattgcaaaaggccaaggactttgcatctgagttaactcattgggcggagcacgaggtatctttaaaaatctttggcatttgtgacgtttcttagcataggcctttgaatcctcgatcattgttggctagaaataaccttgccttaggattttcctagataaactctgcccggcggcgtggtttccacaaaatccatcgtgtactttagacaaaagtcatgcaccttcttcttgagtaacacatctgactaatggcacggagaaccctcctctgtacataactccctctactatgatgtagcgtgtgaccttccttcttatttttcgagcttcatttcgattat

SEQ ID NO: 86167 - DNA, 942 bp, Cannabis sativa
aagttcgtggtggtgtacctggatgatatcgtggtctacaacgccactttagaagagcatcaggagcacttggctatggtgttccgaaagttaaggaaagaatagttgtatgtaaagtgagagaagtgctcatttctcaacaaagtatcaagttcctaggacatgtagtggaacacgggaagatctgtatggatttggagaaggtgcagacgatccaagagtggacgaccccatccaatgtgaaacaactacactctttcctcggtctagccaattactataggcaatttgtggagggctattcgagaagagcggcacccttgacaaagctgttaaagaagggtgttatatggacatggtctgataagtgcgaagaagcatttcaaagtctgaaagaagccatgattgaagatcttgtattagccctgccagaggtatgcaaaccctttgaagtacagacaaatgcgtcagattatgctttgggaggggtgctcattcaggagggccaccccgtggcatttgagagccgcaagcttttcgaagcagaaaggcggtatactgcacaggagaaagagctcctagcagttattcattatttgctgacgtggaggcactacttattggggtcgaagtttgtggtgaagacggacaatactgatgttagtcaattcctcacgcaacaaaaactaacctccaagcaagcacgatggcaggaattcttggcagaatttgacttctacttcgagcacaagaaaagatgtctcaatcaggcagctgatgcccttagcggtaaagcagagttggcgactctaaaggtgttagcgggtatgtcagctagccaagtgggtacatcaatcaaggagagcatcaaggagaacctggagaaggacccagtcacaaagaacatcatggctctcgcaagaaaaggaaagacaactcagt

SEQ ID NO: 86168 - DNA, 833 bp, Cannabis sativa
tttagttaatagtttagaaaaatgctattatttagggaaatttacacaacacttaacaataaactttttttaaccgattttttttttttttacatttttacggacttttcttctttatttacatttttatggattttttttttcatattttcacttgttttttttttcaacaaaaaatgttgctttcattttagtttcccgtcacaataacgtcaaaataatattgttttgaaaacaacagaaatataatactctgtattttataagaatgtaaaaaaaaaaattgtcatttttgattatttatgaaataatcccatcccttttttttatgcaacatggtcctttaattttaccaaaataccattttcaaatgttacaatttagaaaaatatcaaaaaacagattaggctcccaatgcttacaggccggccctatatatatcttcttcatatatataaatatattaaatagtatatattatatatttatatttgcagaaaaggaaggtatatatgatgattgcattttaattagtttggcaatataaatgatattatcatagatgataacatggggttagcaagcccttaaagccaggttatattccttcttaaactaatttatttttaattattattattattttcaattttatgtcatataaagaaaatggatgaggttgagtacagatccttttattgatatcattttatagaaatgcaattattattcatttatatattttataaatccttttatgtgcaagacatctctattaaaaaaaatagttaatatttcaaaaaaaaaatgtaacaaaaattattggttgatta

SEQ ID NO: 86169 - DNA, 1071 bp, Cannabis sativa
gttatgattgggggtctcctcatcccgaggcaggcggtggaaggtcccggaggctgatggcttgatgcctgccaccgttacgatcttctcaagctagtgggcccaagttaaggtggagtggagctcgaccgcctaccagccgttgccacgggaagtatattcctcctgggccacgggaccgttcatgacctcctctaaggtggccagtggaactccctccttcttggaagactttgaaccggacgcagaagcagacatattgcttcttaaaaaattaagaaaatccaatagttaggccccaaaccaaaccctaatgtttaaaaaagggaatgggggtcccctaatagttggaaagaggccccctccggatgcttgctaaataaggaaaacccaaaaggctttctcggacaaacatcgggtgcaaaagtcccaaaggtagtgacattgcaaaaagaaagaggaaaggggaaataagaaaaagttgagaaaaacgcgaatcactctaagccctaaaggcgttattacgacataaaaaggcaattcccaaaagaaggcgtagtaaaaagaaacaaccaaggcacaaaaaagagagagattctatgcattgtacagcaaactcaggcaaaatcattttccataagttcaaaattcaacccagaaatcttaaacacgcaatacaaacaaacaatatacaagtataaagtgtcctgcgaacttacatgaagtttgaagtttgggggttggtgttgatcgttgataaagagaagactggcaacagtgaaggaaaaagagcagataatctatggtgtctgaaatttttcttctctgtgaaaactcatagaaaatttggtaaaatggtgaaagtaaccaaatgaaataagaaggctggtttttataagccagcacaggtgtgagacagctgtgatcgagcatcatcgtacggtcagaatagcaatcgattcgcattctacagatccaacggttggggcaagtgctcatcaaggccgtaggaaacgtttgagtactcgactgacacccatttaatgcgccatatcattaaatggataggaa

SEQ ID NO: 86170 - DNA, 737 bp, Cannabis sativa
tgaacttgtaaccggttttgacatcatagtgaagaatcaagcgtctttgagggaagcttgacggagatgtactcttgatttcaaggggaactccgaaatcaaatctctttgtcttttgcatttgatttttctgcactttgtttttgggtctactctcatcaacaaacaaagattattttatctttgttagtaccatttttggttgtttattttctgtgtaggttttgcatgaaagctcttgaagagcttgaaggagaacaagaagaaacactaaggtttcggctgggtatgtgttgtagcaagaggagtgtcatggctgggttattttgcaacaaagaaaaggggctttaaggtgtgttcggctggagtgaagttgcagcaagaagagagaaggaaggagaagaactctgctggatttttagcttgctgttcaaaggaaagaaaggaaggagaagaaggaggccggctgctgtgtttgaagagaagagagaagtgttttgtgtgctagggttttttctaggaaaaagaaaagaaagcatttatatgaaaaataaatgcaatagggtttgaaaggataaaatcagatttaaaaatggcatattcggtttcttgggaaagcatattcctttgagatccgcatcaaagcaaaaagacgaaactgcccttgattttgaacgttagaggtgttggagtgggggtagtctcggcatttcaaggctgccagctatttcctacag

SEQ ID NO: 86171 - DNA, 744 bp, Cannabis sativa
ataaaatatattttaaaagtaattaattctctaatcaaatttaaattttgtcaaaatattttctaatataatacttatacataaagagatcaatataaaaaaacatataaaatacgcataacaatgaaattcatttttttattgtatatataaaatacatatatataatcacatctaaagagcaaaccaatgtagttgtaatagctaaaaaaaaaaatttgaaagatcaaaatctcaaaccctatttcaaaaattaaaaaataaaaatatattacctaattaacatacatgtattgcacttaacattacttaattaaagttaattaaaaaaaaactaattagacatgcattgcacgtaacatcaacctagtattaatatatacacatatcctcatacaaaataattattaactcaaaacaattaataaaatatgtttagtattttataaatatagagcatgagcacctccattagtgtatttactctattttaaaataactcacaaaaaaaattactttatttattttacttctaactctttagaggaggtaccagtgaatgttcatcggggagctcatttgatccctacagggtctattagacgatattcccaacactcgtgaggtgacacattcatgtgaagccttccatctactatccatgaaaatcaaacatctaagatactcctcaaagtgaagttccactaagtgagaaagcgctcctagcaatagcaagtttaccta

SEQ ID NO: 86172 - DNA, 561 bp, Cannabis sativa
ctaggaccacactggccacagccaaagccagagccagtggccacactttaatgatggtgtactttaaaatttgatggctgtacctgtacgcggtgatcattagtgttcctcataataattaatcttttattattatttaatttaattttccataatcccttgctacgaggtttgtaataaatatatatttggtttaagattagaaaacatgcatagtttggttggagagtagtacgtactcctacttcaccgacatgcatagttttacgttgctgttcatttacacgccacgtacacaaacaacctataatcatgctcatcattattaattaattaaatcttttctttttttaaaaaataaaatatatgtggatatcatcaactaattaaattaaataaatgattggaatattcaccttgagaaacacccaccaagctcaccaaataatatataattatgacaggtctaataatttcaaacatgtatgttaaactacatctccctccaacctatttaaaaagacaaatccactatttataattacaatttttttcatcaat

SEQ ID NO: 86173 - DNA, 4856 bp, Cannabis sativa
  modified_base (2286)..(2288): a, c, t, g, unknown or other
  modified_base (4787)..(4806): a, c, t, g, unknown or other
ttttgattagtaatcccatttaggggattaggatttcataaataaattgggtagcgtgcctaattatttagggcgttacacttatgatatatttttcactgttaatatcgatctagtccgatgtataactaatatatctgatactagtatactttgccaacgtcctagaaaagacattccacatatttatatatgtgtaaccaaatttaattgttaattatcacgacagtgtaaatcaagtgcactgataaatcatgggactaaatattttgaagcatataatcatgattattttttactgtgttgacattactataatcatgaataaccatatgtttgggatttaacagaatttgtatattaaacatgtaatcataaaagtaacatgtgaactaaaatgatttatgatcttctattgattagtaaataagattatattaaaatgagttttatttagggcatagaaccccaacaatttttctattttaattaggtggaatatcagcaaaatcggaaagtttcgagtctgtccgatttcacccaaaggtgacatatctgagaactggtaaacaagttcactaaaacaaagaatcagactatgtgatatcaacatatcacttaggcatcaaaaactacaagttttagatgttttttcacttacccatgtcaacttgcacgttgggctggcaacctgggcgctgggtgctgaacaactttcaataaaacagccataagtccctcaatattgacgtgattcaacttgtgttttgaagctattcaaatatctatcaagtcatgtctcacacccatatcacaattctgaagattttaagtctaaaattcgtacccaagacagttgtattttttttacaaattacccgaaaatgatccgacgaacgagattcaaaatctaaaaattgacgatttttattaagagtcaatttttaccgttagatcatcatcaatggccaagatcagtctaaagtgatttttaatatttttggtattattttattaatattttaatatgacctacttccatataaaaggagaattcatctagttcattttgcttattcgactaagtccctataagatcagagcatccctctctactttctctgaccttatggggacttagtcgaataagaaaaatgataaatgtgttggggataggcacacccactagctaacataatagagctggtgtgatatgtcagaagtaaaagagacaagacaagacacgtccatgtgccaataactaataccttaattatgtctttcattatattttcttctattagtgaagtaatttgactaactaaactccccataaatgcatataaataggaccatgggtcacatgtaaagggatttttctttttctctctcattggtactatgatgggatgatcttcagtattgtgatgggatggagcgttggcttaaaccacagtttgacagcatcaagatcaatgtggatgcagctatctttgaaggacagaatcagtttgggggtgcttttgtagtaatagaccataacgatttactcactgaaggccatactaagttgcacatgggcaatattgctccgactgttgctgaagctttgagctttcgggaagctctaagttggatcaaaaaccaaccgcctagttctgtttgggtggagagcgattgtcttctggtcatccaaactttaagaagttcgactagtctgtcttcttattttggttgtgtgattcaggaatgcaaagccatgttggctaatttaagcaatttttatttttgttttattaagcggtcagctaatagagtcgctcatgagtttgcaagggcgtctttattttatcctgattgtattttcagtatggaaaatattccaactgagttgttgcctatgttggtgacagaatttgaaggttaataaagtttgattttcctttcaaaaaaaaataaagaatagtagttattttgtaagatatatatttcaaacaaaaaattattattgaatatttaatgttaaaaaataaaataaaaataaataaaagtcattacatataatggtatagtttagaaatttgttgatagaagtatttttttttatcccttttttaatcaatttcactcatttttaattttaataaaataaaataaacaaatataagaaaatattatagtagaaaaatggattggaaagagataagagagtggaagggagggtacatttctcattttgaattaattgtttacagtgtcagtttatatgtatatatatttatatannnatatatatatatatatattctttccaaataatgatttctttgcagtggaatatagcatattaattatggtgaaaataactggaatgaatgaaaaccaaagaagaaaatagccaattttattctccaatatggataagaagttagaagtctgtagtccacactgctatatgccctgggagatttatctttatatacccgttggaattttcctcactttaaattattatcaagccaatttgtaggactatgaaggagaccttttttttttcttcattttatttcttctatagttaaaaacatattaagtattgtccacatatattcaagcacaagttagcaccatacaaatccaggcataatatccactttataataaataaataaataaattaataatagaaaacccagattgaggttttgaaaatcttgatatctcaaattgagaagaaatctcaactaccaaacacctgtccaccagtatacaaacattttcattcttttttctttcattttagaactccattaattaagcccaacaacaaaaaaaaaatattgggagttgtttagaatggctttggggaactgtttgcaagtgagtagtacaacaagagttggtagtggtattgtacaatgccatattcatacattttcttcaaaagaaaagcttaatttagtaagtttcaacaaaggtttgaagaaatcccctctctctttcccttcttttggttattctaaaaccacttcaagaaaatcaatctttgtttgccaagctcgtgaagctctaaacacaggtacaatatatttatatctatatctaattttttattaagtactagtagtgtctaacattgttactatgttttatgaataattaatagttttgatatttaatcatacttgaagtagtatgacacctcatatgaaaataagttaaattaacaaaaagataaaaatgtattgatatgatatgcagttcaagtagtgacagaatcaagttgggataaccttgtggttgcaagtgagaatccagttttggtggagttttgggcaccatggtgtggaccgtgtcggatgattgcgccggtaattgatgagctggcgaaagagtattcggggaagattggttgtttcaagctcaacacagatgatagccctaacattgccacaaaatatggaataagaagcatcccaacagtgctatttttcaagaatggtgagaagaaagagagtgtaattggtgcagtgcctaagtccaccttatctgctaccattgaaaaatatgtagagcagtaagtaataattaaatacattaattctagtaactacaaccactctatgtaacaaacacaaacatcaataattattcactctctgcctatatgtatattttttataaatacatattcattgttgttatgttatgttttaagattaactcatatattttctgttgaattttcaattgttatatctttgtcatttgtatattgaaaatgtttgttatctgttactaatatcaaaaaccaatacaaatacaccatatatgaatattgcacatcaattaagaatatatatcattattttttttactgggtttggaattgattgagctaatctcaagtgtcattagtaaactaaaaatagctcattcttcattattttgaagaaacatgttccttcatcagctataatccataatttcatttccacatctagaaaaaatttagctcttcatttttattttatttttaaaaatattattatttctttttctatctcttctgtaattattttttaaaataaacagaatttgtccctcgtactgatcattgtcgagttttactctttgaacatatttttgttacaaaaatttcttttggactataaacatccttgtaaatattctcattcagtcatattctacttaattctttaagcaatttgttggtgtatagcaataacatgacattaaatcctgcaattcaaggatcaagataaaaaataaatgcataaatatagcaatataactgttaactatgaattatgagaatatatattcactgagctaatattttttactgttaataaattagatttcggatagtttaaaattattaaataaactattgtactataactgtacatgtgaagcagaacttaactgtataggaatatttgtaacgattttaacaggttatagtttggggaaaataaaattctctcttataaaataatataaaatagagaaagaaataaaagaagagagaagacaaagaaaatgagagaatgaatgagatttttctcacttatttattttaattgagtgaatctctatttatacaaggatttaagactaataaaaatgagaaattaaatcaatgcaataaatgaaaaacaattaagcattaatagtgattttcatctttgggtaactaattgattctctattattatggtcaacgataaatatatattatatagggtgactattcaatggtnnnnnnnnnnnnnnnnnnnnatggttacatttttctttgacttgtaatagcaggttactaataggtagac

SEQ ID NO: 86174 - DNA, 770 bp, Cannabis sativa
tggagaagatatcataaacttatcgttatatctttctaagtcaatatgacttagttgatcttaggttagtagatctttatcatgagatggttaggttctggcttaaatgtattattcatgttctttgaattgttaattaaaaattaccaagtggatctttccattacttacatcttaagaacatggcagtataattgagtgagagcgctaatcatagatatagatctataacttctataactatttaaaagtgaaacgatgatttcttttgagcttggcttaatgcgataaatgattgaatgctcatttcagtaattatattaattttagaaatatcatttacaagtagctaaagtgtttaaaggataaaatacattgaaagatagaacggtaaatttatccctactcgatgtagatcatctatagattgaaacaatggacaattcaaagtgcaactatttttggtatatatagtgttctatgtaatcaatagtgcaattctaaatctatagtggactcagggagaattaataagttaagaaatttactaggtaaatttcggatctacttatttggagcttgattacataaggccatggttcccacactaactgggataatattgttttgtagtctcggttagttagttttaattaattaattagaattctaaataagactatgtcttgtttgtgaattttcactatgtaagggcttatttaagaaaaaaagaggatttatggtttattttttaattaagagacattgta

SEQ ID NO: 86175 - DNA, 646 bp, Cannabis sativa
tataattttatattgtcaaagagtacaatttcatatctataatgttgtaataatagaattaataaactgaattattctattgaagagttcaataataataaatgtttattgaaacttcaaaatataggtacatgatccccaaatcaactctatacagggaaagatttgatttgatgaataaattgagaaataattaatttctatgataaataattcttaaagaaaatagtaattttgtataaattattattttgaataattatatcgattatgaattgaataattcatgcagtatttaactatttagtttatttaataaaattatactaattagttaaatataatattagagagagaaaattattttagtgtaaaataatatttatttaatcctaatgaaataagccaataataagaattaatcaattattatttattggtaaaataaacaaaaaaaattatttgtagcaaaattaaaaaattaatcttgcgttttaaaacatgtcccgcacgtgtaatgtaaaagttcatttaggttttgtttgattattttatttataaaataaatcaaattaaaaattaaaaattatcttttattatatgagttaaatatattataagataatgtatttaaattacaaaaata

SEQ ID NO: 86176 - DNA, 702 bp, Cannabis sativa
gtgacagtatttttgtaaaacttatctcaaattccagtatttttgtaagtttcccaactaaaatgatactttatttcacctcatttccctcttttaccccctcataacaaaaaagctaaaaaaaaacaactctctccttctatctcaatctctcatttcatgaggacgacggtcggcgacgccagagagaccactagggccacgaatcacgcacgtattagaaaaactagataactcaagatataaaaaattatatataatatagaacacaataataatagataataattagatatctgtatctaattgattcgtagaaattatcgcaattcgatagtgtaattctattaactaagtcttcctctctaggtctagatctcaaaatcataagcaattttatttatttgattatcaaaagtatacaattgtgatgagataatagagacttagatacataattacataaggcaccattttttgtaacaaaattacatttttacgtttaaagaattttttttttttgtacatttttacggcttttcatagaaataacacgaaaacaacaagaaaactacataacagtaacatgaatatatcatttaaataatatcaaaacaacaacaaaaaataacatatagataataaaaaatcaacaacaaatttaacaagagcacaacataaaaaaaatcgtattttctgtaa

SEQ ID NO: 86177 - DNA, 1219 bp, Cannabis sativa
gagacaagatttttatgtaatttaagtgttaacgagttttcatttacgaatcaatattattaaatttaaaactgtggagtatttactatttttagcatgagtttccgactctaaaagtttcaaccatttgcatgaaggatttatgccatattaataggtcaggcacttggtttttaggctgagacagatctatttacagttgttttcatattctaagcttattgatagggcaaatacaataaaatattaatttttggatctaataggtgaggcccacgcaatgtataactatcattcgtatggctacagtggcattcgtacgaggccaaaggcctcgtgaaaaagaatgtcagaggaaattggtgttgacaaaaatgtgctttctttatgtgtcgtgattagcctcttcgtggtctgacgcaggggacaagtcccttgttttctcaggattttgtcagacatgtgccacgtgggttggcttccacgacccatgttattgtcagacgtctctttgtatcccataaatggtggtcgtctacaggtatttcctcaaagttatcgtttttccaaagaaaagttactgactcatccaactttaggtctccagcttcgcttctctggtgggcaaaccttttgtttaaaccgtttggagggccatctgattgggccctaattgttatactttttatttgaacttacattaacatttattggttttattaaaacttgggttgattgaatagttctttgttgtgttagcccatattgttggtgatcatagttgatgggcttagcatctatgtgtgtaaagtttaggtgaagcagaagtgtgggcttttctagttgactgaaacctttgatgagcagacccaatccaactagggttatgtagctaagtctcctctctaactctataaatacatattgtctcagcataattgtatacttttgataatcaaataaacaaaaatacttctgatttaaggacctagggatgaagacttaattgatagtattgcactatcaaattgagataattgctatgattcaatcagatacgcatatctaattattatatattattattgtgttttatattatatacaaagtgatcttggatttattattaatttatctaagactactttcatgttgggccttgagacagtttattttttagcactcttaaaacacgaataacatataaatatatatatca

SEQ ID NO: 86178 - DNA, 1010 bp, Cannabis sativa
accctgtcattaatattattacatagatcaatattttgttggatgtatgtgatgttatgtaatgagatttggtttatgacttttctccaattggctcacaatagaactttccctgatttcattcactactctttcagttttcttcttttcttttctcagctattatacatacatatatatatatacttatgaatcaaaatcaactttagactcatcaaataacgcaagctcttaagggaagaacttataaaaacaaaacaaccagttcaaataacaccaagcccaagaaaagttatctcaaatggtgtatctaaatagccattgttataatttcttaatcctaaaattttgtagtatttcaggtatgcattatagctagacattaaactaattcaatttatatatatatatatttaacattaacctcgtccaagaacagaaacaacattatttcacagaccactcccaaatcacttacgatcacttcaaaaatgaaaacccttaaaatattagaacattataatctactcaacaataaaaataaaaaagaacaaattgccttcaatacctaaagaaattattctattcattctccaaacaaaccaaagagaaagcaataacaggtgttaggaaggtatacctagaatggaaggttcgagatcatgagtttaagtctagtaataataaccttggtttctgtggtagtaatagtaataatgttcttgatcatgagtattatgtgttaacgtgaaaggccaactctcatccatcattgtatgaaaagcatcgtatctgtctctgattaaaccaactgctgccatatcttcagcaacctgaaatgttaatgccacacgtgagtagaatgaaatgtgaagcaccaatggctgccaccatcatgacagccaaaatgcatacttatcaactgtttaatttttatgagaggcacaaagacaacaaaacaaaccaccaccatggtggtatcagtgtaagttacaacaaaacacacaccg

SEQ ID NO: 86179 - DNA, 1061 bp, Cannabis sativa
gctttggaggagctatagctgtatccgtaccatgggaagagcagctccaaccttgttccttattatttctcattattttattattatttaaattttaatttttataaataattttcttaaaatcaataacaataataaatacaaaattctcctttattcaccaatacccactttcaatgtgatcaaaaaaccccataaacataagattaaggatgttttgggtaatgggtattgggaattaaacaagatcaaataaagattttgttataaattatatctttattcttttttttttttttgtatgaaaagatagaaagaaaaatggaaatgggggggcttgggtgaccgtgctttctgcccgtgcccgtgcccgtggccttagctagccctttcccctgcccctgactcctctgactatgtttcttctttttcttcttcttctttcttctctggttcttcttcttcttctttcttctcttaacaaacaaccattttctttgttgtaattttttcattctttcaaaccatttctaagccaatccacctttttctcgctaaaagccaactattatgacttatttatttattatttttcatataattacatcatcataataataagttcacaatagttatttttgaattattattatttcttttgaaaggttatttatttttattgtttcctagaaattattattatttatttttattatttgcaataaattattacccaatcttattaattattaattcccaaagtccaatacatttatcttaattcttttatgtaaatatttttcaataatataaaaatcattacaaatattttctttaattatagtttgcatatttttcaaaaacaatttacttataccataagttacaggtataattgtccttaaatgtataaaaattagttttttattgataaaaacaaacattagcatcattagaatgctatttatatattcatttttgttaagatttttgatagtggtagatcaatttttatttttattttttatgaaaaagagaagaattttcattaaatcaacaac

SEQ ID NO: 86180 - DNA, 968 bp, Cannabis sativa
  modified_base (226)..(228): a, c, t, g, unknown or other
tggtcggaagttgggatcaatattgaggacgtgtgatattacagaaggatcaattctgaccatatcgtcatgtgaccaggcaaaaatgtctaagtttgctctcagcaattttttcaacgctgattttacttcgagcaataaacctttttaatttttagcttcctggctgggatatttggatcgatctcgatctcttctaattcttccacaggtccaacattcctgnnngggtccccaagtcgaggatctacatcttcatccccgccttgggaaactccctacttaggaatgttcttccccttgtttgtgctctggctggaggatatttccttcttagcctgggccactgcaaggttataacattcccaagcagtttgctggtttcctcttagttgcatctgtcatgaatctactgatgtaggcctaccaggtctcctaggaagttggcgagaggatgagaattgtgcatggaactccgaggagaaagctttccatgagttgaactttccaggtgccagcttgaagtaccattgctggggacttctgagagagtggcaggaaagattctgcaacatacgtctcctcgtattccttgcagatccatttgcatctcgaaatacttgaggtgggaaagaggatcttcttttctagtgtacatcttccaggttggcattttaaacttgtggggcaacgccaggagattgatctcgggggagaagggggttccatgtgctcagtccaactcgagatcattatttctctgtctagccatgccttggaacatattctttaattcgtctagctacgcttgcacaactggactaacctgttcggcattttggctgatatgagacatgccagtatctttcgaagcatgaatttaagcacgggtttcggcctgcacgatcggcatgtcaagctgatcgtctactcctcttctcctattcaaatcatttctgagatcatga

SEQ ID NO: 86181 - DNA, 557 bp, Cannabis sativa
atggattcaaaagtaataaaccaaaccaggtatgtctactacagaaatctctttatggcctcaaacaagctccaaggcaacggaacttgagatttcatgattttattgatgagcattggatatagctgacgcaactatgatccatgtgtgtattacaacaatgaatcaatctggttattgttgtatgtggatgacatactgataattggtgaaaagagacaggccattgacaagttaaaacaaaatctaagtgctgaattcgaaatgaaggatattggtgaagctaagaggatacttggaattgaaatcaaaagtaatagacctgagagactctcattatcacaaaagggatacattaagaaactaattgacaagttttgtatgaatgaagccaaatcagttagcactccattggctcagcatttcaagctaactcaaaatcagtcacctaaaatagaggaagataaaatgtagatggattctatgccctatgcctcttgtgttggaagcctcatgtattgtatggtgtgcactagacctgacttggcctatgcact

SEQ ID NO: 86182 - DNA, 540 bp, Cannabis sativa
tgttaatcaacatatttgttagtaaatttagatcttggtaaaatatttccaacaagattaattaattaattaactaaataaaaaatttgttgcattaaaatacaaaattttactcaccatcgataatcgcaacaacaacagaatgcaataataacaataatcaataagtaacgatgacaacaatagtaaataacaaatttttaaacatcaataatattgaagtagcgacaatgacaattaaaattataatggtagataaacccacgatagtggtggaagactataagatttttgagagaatttatttgtggctgaatttttttaaattacatatttaatattaatgattttttattattaaaagtatgaactaattgtgtttaataggtgttttaaacttgacccctagacccctaaaaaaaattgaacagtagacaaattatgatctaacatttaaaaatagtgtacaaatctgtatcaaaggaagccctcccaaaatggtttaaaacatcctactttttttttcggtgaatatcctag

SEQ ID NO: 86183 - DNA, 868 bp, Cannabis sativa
aggaactaacaacaatggtgtggctgctattgttggaaaagttgtgaatctgattatacagagcaatcagatgcaacggagaaatccccttgaagatccttcagacccctattacctcaccatggggataatttaggtaacattcttatttctcagctcctcactggacaagacaattacatgtcttggagtagggcgatgcagttagcaatttcagtcaagaataagttggaattcttggatggtacttttcaaaacctcttccttctaattgaattatgtacaatgtttggtatagaaataataatattgtgagttcttggatcttgaattttgtttctaaagagatttcttctagccttttgtatgataaatctacagctaccatttggacaaatctcaaagtcaggtttcaccagaaaaatggacctcacttatacaataaaaggaaaagtttaatgaatctgaagcaagaaaatcagacagttagcatgtatttcacaaagctcaaaacagtttgggaacaactcttaaattacaaacctaactgtgtctgcaatgggttcatgtgtcaagaaactttaagaacacaatcacatggagtatataatgtcattcatcatgggtctctcgaattctttctcacaagttagaagcaacatcctgatcatggatcctttacccaaagtgaacagagtttttcacttagtaacccaagaagaaaactaaaaaggaaacatgaaccctgctgcagaacccaattcaggtatgacttttgcttttttggggagataaaaatactaataatagacctaattctcaggaaaataaatcacatcctccaaaaaagaacatatccttttgcaca

SEQ ID NO: 86184 - DNA, 604 bp, Cannabis sativa
aaaataggggaatgatcggaagaagaaaaagccaaattagagagtgatacctcattaaataaattcagccattgttgagtagccatagctctatcaagtcgaatctccactgctcggttagtgcctcggctgcgttcccatgtaaattgataacctcgaagctctaagtcaatgagatgacagtccgaaatagcatcctgaaaaccagtgatgagtgttgcaggataaggtcttccccctttcttatcttcttgactgattatattattgaagtctcctatcacacaccaagggagacttgagtcagcagccatagatcgaagatgattccatgtgtgatgtcgcaagttcctgttgggttcgccataaaaaccagtaagtctccacttcaccatcccaggaatcctaacttcaatatcaatgtgattattggagtagttattgagatgagcctcctcagaaatacgccaaagcatagccagccttcaaataaaaaaaaaacatcgacagagaaacatccctcaaagcctatctttattctgaaccgctccaccacttctttgttacacagagtttcacagagaaataaaaatttgggtttctt

SEQ ID NO: 86185 - DNA, 637 bp, Cannabis sativa
tgtcacaatcccaatttatgagggctattggtacttaagcctcttgatacgaaacgattcccttatttttccctctcattttcattttctctactcattcgaaactctcaaagaaaacatccctctttcagataaatttttgttttgccccttttgaaccttcaaagttttcgaatcgatcgaaacttttcacagggagaatcgcaaatcttaaggttagttttcgaatctaccttctaatttggtttctggatttgagaaaaattctgcactctaaattcttttctaaattctttgaaattttgaggaatagaaaatgcatgtttaagtcttctaatttggtcattccaacccatagtttagaacttagggttttctttatactttctgtgtatttttgtgtggggaatactggttaagtctttcgaatggtgagtgtgtcaccgtattccaatgctcatgcgtgcattcgcatgtcccttgaggtactatgatacacccagccatttgcgacatatgccagcgtttccttttcccatacaaccgcgtatttcaactagtagattttctcgaaacagtgaggagttttcgttagcccaatggttatgcgaagaaggcatgccccttgagatatagg

SEQ ID NO: 86186 - DNA, 564 bp, Cannabis sativa
ttgttatgaatatgaaatatgaagagcaaagttttgtgtcgtttctttgggtttaatgtcgtttaatctttagttagtttttgtcgttttttaaagattattttaagaattactattttttggtgtgttgtattcctatttttttagaatattttactaaaacttaaacttgaacagtgatgtaaaatgtgtgtcaaatttaataaaactaaaaattgtatcaaatttagcacaaaagatagtatgagctaaatttttgcctacaatagatactacattttttaattacctttttgcaacttatattaatactattcattgactttgaataagatatatttataagatattaaaataatataaataaaaattaattattttgtatattttgaatgtgtattaatggtaatattgacttttataactaatttgtactttatgcattgaacaaatataaaaaatttcatggtatagttttggcaaaatttaatccaaaatatacaccattcattggagatggtcttatatattattttggattctgtgttttacaaaagttactaa

SEQ ID NO: 86187 - DNA, 836 bp, Cannabis sativa
atatataggtagatcatgccgaatttattatggctaagaaaaatccattagtattggatgactatcctgcaatattaactagctttcagaaactgatcctaatatttatgaccttattaaaaaaaaaataacgttaaaaattagtcttccttttattttatttatagtacaattggattattaatgagaattggtagggacagctctcttatttatgagaatcctaactataaaaaaaaccctacattattatctatatacaatctctcaagcacaaggaatattattatcataaggcttcaaggtattctctgtttaacaagaaaaaaaggttatcaacaatatggaggtgaccatattttctcgagaaacaatcagaccatcaagttcattgattcgccacttggaacccaaaaagctgtgtctcttcgatcagctaactccatcaacttaccctgaagtagtcattttttactctatgaatgatccaaacttggatcttgacaaaaccctaatccagttgaagaaatctttgtctgaaaccctaactttgttttatcccttatccggaaaaaccaagaacaatctgtacatcgaagactacgacactggtgttccttactgggaagccaaagttaactgtcgtatgtccgactatcttcagcttcgagaaactgagtcactcaacaaatttgtggctattcatccctttaccaaagaaaaagacaactcagatcctcagcttgcaattcaggtaaacgtgttcagttgtggcggaagccctaggagttagcctaaaccacaaacaattggacggagaaactttgagttatttc

SEQ ID NO: 86188 - DNA, 639 bp, Cannabis sativa
tgcacaaataacacacaataatctcaagaaaacaaatttctgatatggaagatcagttataaaccgcaaccacatagcatacttatagcatgaagagattatgatatattttaaaaattttcaatttttttttatttaacttgttcttaggcctatttgattacacttactcacaacttaataacaactctccagagataattattaagtgtggatgagaactttgccaaatttcttttaaacaaaaattacttatgttgaaagaacaagctttgtttaaagtattttttttaagcaaagtaaataaaattacaactaactaaatacaataaataaaaaaaatgacaataacaaaaattgatagttataaaagttatgaggcacaagatgtcatcaactaactataataacagtggtagtagtaacagtaataataataagattttaggagatacaattaaaatatcatcaactaaaatgataaataaaaatagaagctaggaggcactaatgctatcactaaaggagataagtaataggaggcaaaaatagattcaactatcaagaatgtaggaggcacaaaatgccatcaactaccaagaaacatatatataggagatttcaatggttacattaaat

SEQ ID NO: 86189 - DNA, 1643 bp, Cannabis sativa
  modified_base (35)..(49): a, c, t, g, unknown or other
  modified_base (851)..(851): a, c, t, g, unknown or other
tagaagttcattttaggatgttaataacatacttnnnnnnnnnnnnnnntcctggtaaaataattctaacacacaatatacgaaaaaatagactaataggtttagtgacgtatatcattatgtttcattatagtttactctgtattgaaaaatataaaatattatttcaacaaagagaaactagtaggtttattaacatatataatagtaggctatatgaaatgcactgaattattgttctaatatacaaaaagaaaattaaaaacttgtttcaatgccaaagtaaactaatagatttattaccatatactatattatagactatacaaaaagactatattatgtaaacaaagaataaaaatttgtttcaatatgctaaaataaactaataatcaaattatattgcatgtatgagtataggcatagtatagccatatatgccaaataaacttatgagcaagaaattttatgtgagtaagagatttcatcatatttaaatctttgagaagtgcaatactgttatcccggtttactatataagtttgcaggatatgttacaatcattttctttgtatgcaattagatttgatgtctcggtttgaaaaaaaaaaaatagactaattagtttgttattttataggcacacattgtgtttgaaataaagaataaattattccaatatacgaaaaatagactaataaatttattggcatatatcattatattagattatagtttactttatgtttaatagacatgaaaataacataaatacttttacaaaaaaaaaaaaaatgaaacggttatattaaagtatttaaaataacaaattaatttaatataatctaaanataaacacataagtttcaaagtaataaaaatatatataaaataattggtaaataaaatagtagcttattattatattgtatgctaactctttcaaaaataaactttaaggttacccaaatatattttaaataataagagcataatgtataacttacttacaataaatagctctaattaataattaattattaagatgtttacaaataaggtttcaaggtaaccaaattgtatctcaaattattaaaaataaagtttcttttacatgaaagtaattaatgagtttattatcagcattataggtaacaaaaatgttacttttaaaaatccaaaaaaataataaaaaaagaaatttgggattaattttatttcaggcatattattttagaattatggtattttttaataatgtggcaaggtattattataattaagatttattaaggtatttttgtaaatagtttatattttatgtatattattggaaaaatccctataaaaaaatcttaaaaaaatttacaaaataaaaaataaagcaatgtacattactaaaataattagagattagatttataccttaatattcaatgattcaacgtttacaacaccaaaaatggcgcacagagctacaaccactagaaccactaactcttctctttatttatacaaaaaaaataaaaaaaacacacacacacaatctaacaccgagaatatattcttaggtatgaaaaatagattttttttttttaaaaaaaaagttaaaatggttgaaaaatagtgaaattggggggggg

SEQ ID NO: 86190 - DNA, 767 bp, Cannabis sativa
gccaaagcatgaaattcttaaaacttctcaaatatttcagatatcttttgcattaggtagagaaagctatatatagagtaatcatcaatgaaagtaaaaaagtactcataactgcctctagctttgactcttagtggttcatagatatctaaatgtactaaccctaatggtgttttggcatgctctccctttacagagaaataacgtttagttattttgccttctaggctagattcacaaactggtaattcacccaatgtgatatttttcaatggaccacctttggttaacttgtgaagtctatcgtagcctatatgaacaagatgtaaatgccatagatatgttttatctttattatctatcttttactctttatggtttctaggtttagcaacattaaaaagttcgttcataagcacaattggtacattaggtcttagaacataaaatcattgttctatataagcaacacattattaaataccattacaagaaatagttgaattagaactcaaaaaattcaattaaaaatgttacaattgtaaacgtcaaacaaaaatccagtttctactaaaatttgaaataaacaaaacattatcttaaatcaaaaatttattctgaaacttgaggtgattttttcctctagcttggaccgacactaatttgtcattaccaactttaagcttcaactcactaatatttaagtactcccaagtttttaagcagctgcaatgaagagcaaatatggttagtagatccagaattaa

SEQ ID NO: 86191 - DNA, 811 bp, Cannabis sativa
tcgttccactatgaatcttcaatgttcaagagttacaaagtttggattccaactcacaatggtaagagtgataatccgaatatatatatattacaatgattttctcttatttttcctctctattgtcctctccaatcacagtaatgactttgtgttttctcttctttgatgcatgaacacaccccggactattggatctccgaaccaccaccttggttccaaagcttacaccattgtaagcctcttccaagaagcccccaaaaacagtcggttttttctcttgtaaaaaccgaatctgtttttccttttgttgttcttgctctgattttctattgttgatgtttgtactgatctgttgtgttgaatctctctgatttggatctattgttatttttctgccttgtgttttgattttctggctatatatattctgatgtagaggagtgcagagttaggagggttagttacaaagtaaaaaaaactttgtcactaacttaactaatatgtctaggtaaatagaggcctgaggccacataagaatttttactgcctttgtaaactctttgtaaatgtactggtttattttacagtgtatagttaatatgggattttatttcaacattactcaaacataacaatgtaagacaaacacaattattatttttatagatttaatcacaccaaaataacatttaattatcaaaattttgtcattgagttatagcttatagttacttggtgttaataagaagaagaaatttaatagtctaaatatttatttctctaaaaagaaataaacttaattggatat

SEQ ID NO: 86192 - DNA, 642 bp, Cannabis sativa
gtgaagaaacgaaataggtttaggttcaaaagggttcactaaggatattcattttatggtaggcttaaaagactcaaactatctaaacaaactgtgatttatgtctgttaagagagccaactgagttaagtttaactctatggacccatttgctgcctataacattcatagtgggatcgtagtgaaccaacacccaagtgttattcttgacaagagctcttccttcctgattcatagcagcattccattttggattatttaaggctgctttgagtgtcttcaattcaatgggcaatgtggactcatatagaggatgttttgttgcaagatacgacttgggtttatagattccattctgggatctagtgatctttttgtgaactcttgtacctgtaggtaatgatgtctcttgagtgggaatgggattatgtagagtgggttgggatgttgcaggaatatttgatggtattgaggctaagggctcatggtgagatgctgtagcagcaaggtgtatgttagggaaagtgggttctggtggtgaggatgcaacaggtaggacgttggggtttgagcttggtggaggagttgtgtttgagtgattaggtgattgagtagtgggagagggatctggtgtagggttga

SEQ ID NO: 86193 - DNA, 745 bp, Cannabis sativa
gagttctcaaatcagaatcctttgcgacacgacttgagcaccataaaaagcagaaaaataccaatttagaccatctaaatacgagatgtaaccatcaacaaaatttattccataatgtaaaatagttacattgacagtaggcttccacatgttgccacctcctaaaccaacatgtgggacttcaagtccattagaaaaattaaaaacaaagtgacatttagaaatagagcctatactaagtttagttttcataataacaagaacatcaggatcacattgtgaaatgagcaaacaaagttgacgaaatactctggggcttcccaaaccccgagcattcaaactaacgataatcatggagaatggcgagcctgctcatcagcctgcgccaaagaaacaccacaacgttcctccaccagtgaaagttcagaaaattcaaagatggtttcaacgtgttggtgtgtagtagtgttggtcgaatcagtcaaaggaatgtctctagtacgacaccactttaacacatggcgaacattaccacctgaagaaactaactgtcttttagtgaacagagaggacattctattttcttgtggatcatccattctaagatgaaaattgaagttggaattagcattactattagttggtattatggtgatagcagtagatgttgttgtgattggagatgtagtagataatgaaactgtagaggaagagatggcagttggttgtgtcacatgcagatatg

SEQ ID NO: 86194 - DNA, 853 bp, Cannabis sativa
atcttgtaaagctgccattagttttggatcctacaatgaaagtatatacattggagctatcaaaagttaatggtcaatataatgggatctaaaagcacagaccttacaagcttcaaaaatttcaataatacaaacaagaattaaaagaggctcagcaagtttccataccttgacaaaaattggcatgtagaatcctggaaacagcggtctatggggcaatggtaatgctatgacctgtgacagcaatccgaacagaaatcatttgcaaaggatagaaaaatagccaacaaagaaccaattgcacaaggaaaggaatcatatcattttacaaacagctcaatgaaatgtacgaaagtatcataaacttcgcaattggaaagaaatgcaaatttagtttcctaaagtagatacttcttatatatcagttaatgattaaaagacagcattccataattgcttctactaatcagatgaacagaagataaaaccaaaatctgttgacagacttgtgtacactaatgagattagtagcattgatttgacaatgaaaagactagtgtgagaatttcagatcaaaaatttgtgccaataatttaaacccatttcataattacaaaaaatctctatacaatgtcataaaagcactattccacttcatttctcatttgttacttatgtatctcttcttatcaaacatggctacgatcgtttcttcaaatgctttcctccctcgcctcaatttcaagtttaacaattaaatttcaaatcaaattatcctggcttaaccaattacaatcacattatacatagcaccaaagttcactaagcattaaagtcaaaaaacctaaacttt

SEQ ID NO: 86195 - DNA, 659 bp, Cannabis sativa
atttaaattattttttttttcatcttttcaaattatgcatgaaaacaatatgttttgtaaaataaggcaaaatatcggggcgttacagttcttcaaagttttcataagaaaaagaaaaaagtgagaaaaatttcaataaaagcaattataaagtaaataaaaatattaagtatatacatatatgcgtaaaaacatggttattatatttaaatttttagttctatatgcaaataaattatattatgtataaaatatcttgtatttgttttattaaaagataagtatattattataatattaaatttaagatttaaatttaaaatagttaaaataaaaccgtatataataataataataataagttaaaataattataatttaaaatttaaatttaatatagttaaaataaaaccatatataataataataataataagttaaaataattatagatatcttactattataaatatggcttattggtgtgatagttgatgacaaatttgccctcataaatttaatgttattacaagtctatttcttttatctttatcctcttttgtttttatcctcataagttgaagccaaaaactacactaattagtcctaaatttagtttgctttatgttgtggaaaatataagaatattttatttatgg

SEQ ID NO: 86196 - DNA, 577 bp, Cannabis sativa
acaaattcaggattctgagtctgtgttgcttgatctgcatcactgagatattgaggcggtggtgtactgtcttggatgaacttcaagagtctgtttccacgaatggcagccagcacctgttgcttccatagtaggaagttatgatcattcagtcggatagacaaggagtgattgaagtgaactgttgaagagtcttcacttcttgctctgtttcgatctgcagcagaaaacccagggggtgcaccaagatttgttgagcttgaattcgtagttccaatgttaagccatatttgccaccaaaggtggccactgctctgataccatgttatggttagaaatccttctagccattacagaaaacacaaagaagatgaaagaaggaaagaacagaaagaacagaaagacagagagaaagaacagagcaaagagagtgaaagagtgattgaaagattgtattgcatttctgtgagaaaagctacaactggtttatatatgcaccagagtacaaggcaaaggccaacgaaaataacaaacaacagaaagttgttagaaacagaaaacagttataactaactgt

SEQ ID NO: 86197 - DNA, 885 bp, Cannabis sativa
tgttatatattcttttcatatattcttttttatatatgtgattcttttttttattacttgtttgtggcatcgcccctctaatcagactgaaacccaaaagttaaaaaaatgttaaagaacaagaaaaataaatctatatattacattttaacaatactaataatatacttttaaaaaaaacaatactaataatattaaagtggccagttttcatttttcaagttgcaaatcatttattattagattttaataattaatataatgtaagtagttaacaaaactacagcctacaacataatttattaacagatataaaaattaaaaagttaaaagatcaacacaactaccttataaagaattagatattatcttaatttttttttctttctcatttcaagccaagtaataccgaccactatttttgtaatcacgtgattatattaagctttattttatatgcaaaaaagacatttaatattttaatcttaattatcaatttaaatatatttgaaatatttatcacttaaattttaatatggtttggcccccaaacatcccgtcctagctccgtccctgtataacatattatacaatgtcataggttcaaattctacaatactctttttcaatatctttttatatatatttctgagagtttcaaattttaatttactttagactcatatattcccatgacaggatagagaatgtattttatttatataattttttaaaagaaaattagtgtagctcaaacatatataaaaacacattattattttatccaatctttaattttatgttttcccaaacatggtattagatacaatataatccagtccaatccaaatcatttacattcatattcacaaaatccaaatccaa

SEQ ID NO: 86198 - DNA, 516 bp, Cannabis sativa
ttttcacccaaatccgaatttgtactattcatcatcttcaaccttgagttctccatggatgtgcaacaatggtggtggatggacagcattcttgcttagtaagtctctttcttgtcaaaactttgagtagttaagcaagttttccgaaagtttgaataattatctagagcatttgggaatttgtggatttattttggagaaattgttgaatatttgtgaaatattattgttgttggattattgtggtattattgtgatttttgggaagtgaagaaattaaggggaggtgctgccgaatttttccaaaaaaaattttgtgtggtaattgtgaagtgtgtcatggattccaagcgtactagaacaggacaatcgggtgcttcatcatcgaatccgccaacaccggcgtcaaagtccgattatgaaaaagatagatttgtgagtttgaaagcgcaagaaagatactttgaattgcaaaagagagctttcattatagatcgaggtatcaaatatgatggc

SEQ ID NO: 86199 - DNA, 702 bp, Cannabis sativa
cttgtcaaagtaaggcgggttcggccatggaagctgaaacctctgtcttactgttggctctgcaacatgctagacaatgtggctgggaggaaattcatgtcctttcggatgctaagatggtggttgaggcttttgcagcaggaaaatgcccacttgattggagtttctttaatgtttctttggttatcttagacttaattaagttatttagagtttgttgtttcttttatattagtccaagtagtaatggttttgttgatgagttagcaaaaagtgctagattgtctagccataatgctggctttgtgcaaggggagggagttccccctgtgattcccgattatctttccgttgtttaatgaacttggttggtgttctttcaaaaaaaaaaatctcattaacaccaaatcagaactctttaatcatgagtgcgtgaaatttatatttcaaaacactaaaaatgtgtttaatacttatttgtaaaattaaacttttctatctaaaaaccacgtagctaccaaaaattgaaaattatacattattttctcgtttaataagagcatctccaatagtagcatcttgtaagaatattaaaaatataatattttattttatctctcttctacattatttttgacactcttacttcttaaaacactctaatgtataacactctttaaaaatgctataattataatctca

SEQ ID NO: 86200 - DNA, 1248 bp, Cannabis sativa
gaacacttcctttttcaaaaaaaaaaaaagtgaattaaagtccatacgcagtgtttcatttgatagtgaaattagttacaaatcaaggatggtgtacgaaatcttcttcaataatcttttgatattgaaaaagggaaatcaacttttacataatatcggtatatatatttctgcaccttattttctattttgtgcatgtaataattttgtcaacccaaaatattagaaagttattttggttatttgtacaaaattgctcatttaaatagggtgaatatataattgaaaaagaaagtaacaaaaattaataagtaattatttaacctttaaaatatcatttaaacgaagggatttttttttgctaaaatatttaagaaagtaatagaataatttatacagtagttaactgtaaataaatatttctattttgttatatatatatataaccaagttaaacattaatgtaaaaatacataataaaattggataagtctataatacacctccttaaagcggtgttttggtaaattttttatctatttcagcatatagaaaagtattttagtctaatatttttcatgatcgcatacgttatagttatttaagattacttattcacctgtaaatttttcaaaaaattctaaatagcttaaaatgccgaaaataagatttatatattttattacatgtataattatttttttatgcgtggtaaataattgataaactatttagaattttttaaaattttaaaagtaatttaatataactacaacattaaattacaaaaaaaaaatggactcaaatatatttctaaatatcaaaaaagtgattgtaaaattagtgtaatatattttaaaaatattatattattaaattaattgtgtaagataaatatctttctatcgttattaaatgggaatggtatttttacaacccaaacaattgctcaaaattagccaacaaagtctatcaatggccacgtgtcgaaacatagtcttctctcccaccgcagaccccactgcatcttgttgttccgaactcccacgcgcagttgaaagacacgtactcacatgggcctgatgtcaactttccagccaattttttttcaaacaatcagctgtatataaacacaataaaatctgtatacatttaatttttttgacttgttattggttaaaataatttccctatagcatgaggaaggatgtgttgttcctacactagaatttccctatatatatatat

SEQ ID NO: 86201 - DNA, 607 bp, Cannabis sativa
atggtgaatgttcattaatagctagtgattatcaaaagttaatctgggtttttcttgccaatgatgtattcgtcaattttcttgacaaatttaaatatcaaaaaattgatttactttataaatttactatatttatgccatggagcactatgcatatgaaattgaagtaagtaacaaaacagggttctttgtgtggtttgtggttaatattaccaaaaaccaaaaataaataggacaatttacatgaaaaatacaaaatgatacttttattacaattttactttcacaaggcttggacaatatttttacttttattattgttttatttactaagatacatcttacgcatattatacattattatctcactcaaagtttttcctttcttttttttttttgtcagttttaatttgaattggatatccataatcatatttcgtttcttcctcttaatttctccatatgatttcaaccttgatctttccatcatttcaagttcttcctcacgatttcttctctgtattgttattcttctacaattttttatataatagtaataactctcttatcatcttttccattcctactgcaaaaaaaaaaaaaaaaa

SEQ ID NO: 86202 - DNA, 1675 bp, Cannabis sativa
attacaatatagtacgaatagaaatatgatttgatgattattattaggataaccagctgatatataaatagaaatgaatgcatatatacttattattatgtacgtttagttttccttctaaattcacaaaggaaagtgatatagaacagagattattttaattaatcaattaaattaacacacatatcgtaattattaattaataatggaaaagagaagtgtgttgaatctaccgagaatgatcgggagtgattatgaactaggtaaggaaattggccaaggcacatatggtactacttacctatgtcgacacttagtaaccaatgaaactctagcttgcaaggtcatctcaaaggctaatattacaacccaggtaattttataataataaattatactaattaactatattatgtaattaaataataataataacaatgtatccttatatatataggagaaaattgagaatatatatcgtgagttgaccatcatgatgacattgtcggatcacccgaacattgtgaagctaaaggcatttcgtgaagatgaagacttcttttactttattatggagctttgtgagggaggcgagttgtttgatcgaattgaggctaaagactacttgaccgaggcagaggcagcccctgtggctaagatgatagccaaggcagtttgtatgtgccatgtggctggggtcatacatagagatttgaagcctgaaaactttttgttccttaacaaccaaccagactcgcctctcaaactcattgattttggattttctgtgttttttaaacctaatcaaaggttttcagatatagtggggactctgtcttatgtagctccggaaatgttgagccaatggaagcgtcatggaccagaagtggatatttggagtgctggagttatcatttacattatgttatgtggtcatttcccattttatcttaattcagatttagattttgataaaactactcagacaacttgtgctattttaaaaggagacatagactttgaaacacaaccgtggcctcaaatttctgagagtgctaagagtcttattaggcaaatgctagagcgtgatccaaaaaagcgtttgactgctcaacaagtgcttggtaattactaatctatgcatatatattttttgttttgtaatgtgtctttctaattaattttattttcttaattaactttattaatattggttattatgtttattattgcagagcacccttggattcgaaatgcataaaagtaccaaatgatactacttttctttttggtctatccatggcatcgataacaaagagttcaattcaagatgatgaagacgaaaatatactcttgtcttaattaatgatcatttactgttatgtatatttatattttatcaccctttgttttatttgtattaatattgattatttcacaacattctatttcgtttgcagcatttatttcaacttcaactttttatttattcatacatgtatgtgtgtttttctacttaattaattaatttctgtacaattacaacaaacaaatgttttcagttctcttgttcaaaatataaataaataaattttcagttctcaacctagctagctatataagtaccaataacccaactaataattactactctttcttcattcttcaaagaata

SEQ ID NO: 86203 - DNA, 1051 bp, Cannabis sativa
tacttggtttgagtgagatagatggccttgtcatcacgaagaacctcaaaaccgagaaaatagtgaaccgagccaagaattttgagagcaaatttgttgtgaagggcctgaatcgtgctttgtatctgtggaggacattctcctgtgatgagtatgtcatcgacatacataagaagaagcagaagtttattgtgtttccgagagaagaagaaacttgtatcggcagtggaattggtgaacccccatagcagtaatgttgattttaatgtgtcaaaccaggcgcgaggggcctgttttaagccatagatagctttatttaacttgcaaacatgttgaggaaattcttgatcaatgaatccttttggctgatgcatgtagacatcctcttttaattcaacattaagaaacgcattattaacatccacttgttgaatatcccaaccatttgttgcagcaagtgagaagataattcgaatggtgcatggcttgatgtcaggactaaaagtttcaagaaagtccaaccccggtgtttgttgaaaacctcgtgccacaagtctagcctttaatttattcaccgatccatctgcattatatttgattctaaacagccacttattagtaattattttcatatctgtagtggggggcacaagaatccaagttttctttttcttgagagcatgaaattcttggttcatggcattattccatttgggatcgcttagagcttgttttacagaggttggttctaaaatattgttgatttgagtgatgtatgtcttgggcttaaacaccccagccttaagatctagtgaccatgggatgagtattgtcacgggtagaaattggtggttgatctgaaacaggttgtgtgagagaggatgactgagaaggtaaaggatatggtaaggaggaatctattgatgtgtattggctagagctggtggcagtgtttggggtactgaggtaaggggagtgaggtgtttgaacagaggcattacaatcatgtgatgaagttgtgggagtattgactctgtagttattgttattg

SEQ ID NO: 86204 - DNA, 674 bp, Cannabis sativa
aaactccctccatccccatatgctcctccttatagggggtttttttttttataagatcaatggtttgtatagatttggatacgaaccactaaccaatgattttaaagtatgtgggtcaataagttgcaagcttttattctcaagtatgtgagttaatgagctccaagctcttgattatctcatcttgaatacttctattatgtactctgtttatctcgatatggacacattgcctcgccagttgtactcgttaatagttgttattcttatcttgtatatgcttatgtggcagggagattgaatattcatatcaaccgtaattcctgaaacgagtcatttaatttgcatttaataatgcaattattgagttgattcatattcctcctaaagtacatgtgtcagcttctaattgatagtcgaatttgggtataacacgttctaatgattctcacgggcggtgccagctattgatgttgaaaataggctcaacaaccactacaagaaaagccacttttgccggcgcaattgaccaattgcgccggcaaaagttgtcagcataaataagatgctgaatttgggattgcattcagctataacttttaccggtgcaatgaaatgcgccggtaaaagatgaacactgaaccgccaaatggcgcgaacacatgtccacttct

SEQ ID NO: 86205 - DNA, 544 bp, Cannabis sativa
aatttaagttcaatagcagactgtggaatcggttgttctgatagcatatccctgaacaaggatgatgcagctataatatacaaggaagttattttttgagctcagagttggatgttggttgatatggggatgaagttactctattgatatggggatttgggattttacagtctaattgtcaaggcttctgctatgctcccggtcttttttttacatatatcacagcttttacttggttggcctattttctttctcttgtacatggccgcaggatgcctaacagtttgggatttgttctgaaagtgcttgtgatacaatatgatttgtaaattggttatgctggcatcaagagctgtgctgttgaaaattgcaagttacagtggtgcaataattttggatgttgaaaggagcctctaacacagaaagtatgatgattgtgaactccagcttgctcaaaatctttatgtataaatatgtattatatatatattatattggaattattttcaatatgactcaagccagataattatatgtgggagca

SEQ ID NO: 86206 - DNA, 677 bp, Cannabis sativa
actggacctgctcattaaaggctttcgttaactagaaaaacacatacttctgtttcatttagaatttatacatacagatgctaagcccattaactatcgattaccaacaatatgagttaacacaacaaagaactatctgttggattaaacctcctcttacactgatattagactcaattcacttaatacaaaggacagaaaaggaattacaagtaaaaaaccctaatttggccttcggcctctaaaatccctaacagaaattagttagaatggatttgttaaatccacacctaactaatttctgtaactacctaactaactcatacagatgcaactcatacagatgcaaaaacagaaaccctagatcaaaccctagatctatatatacctgcattcaagcttagatctaaacggttgggtgtgttcttcaagatccagagttattgaacttgaagaaggatgaattaaagctcacacaagcacaagaacaaaagagaaagttagtacagtttgagagagagggataaaacacattatatgtaaaactaaagagattaccagtcaaaaatcatacatgtgacttgaaatctccatctttgtacttctgatcattgaaatagtggaatcgagctctcaaattcgaggagcagctcaaacggagacgtagccaatttatt

SEQ ID NO: 86207 - DNA, 623 bp, Cannabis sativa
tcattaaaaaataaaataaaaaaacagttacttaacataaaaaagttcaaaaaattaatggaatcattaaaaattgcaaaatttagaaaaaaaaaaaaaatctctctctcaattctttctctcttacgtgtcttttttttttgttcaccttctttattttcttgaatcccacaatcactacgatcgaaactgctactactcatcaccaccacaacttaatattcaaatctaccaaaaaataaaaatttcttctctcaccaccacaactccttcattcttcttcttcctactttctagaaatttatacctaaatatacaatctatatacatgtaaatttcaaaactaattaaaggccaaaattcaacctccatcctctcgggtgaagctccatctcatcattagggtcgtcttaaacattttggaggtcctgtttcaatcttaaattttaggcccctaataaaaaaaaaaactattttattataataattgtaatttatttcattacaactttaagtaagtatcaaccttctatttaaaacaggtcattcttcgcacacgttttgaagcgaattcatcaaccatctcttcatattttacagtttctaaaacatcattttcaatc

SEQ ID NO: 86208 - DNA, 723 bp, Cannabis sativa
tttcgtaaaaatgcaaaaaaaaaaaactaaacttgacttgttttgaagtgaagtgtgtgtaaaataaaaatgattttttttttttaatataactaacttgatgataatttctatcacgaaggtatgaaaaaaaaaaatatactcaattttatcattaagttattttttacttatttaaaaaaaaaaaaatcaattcaaacaattgcataatagatctcatacaatgaaaattacttggaatatagtttggtgtgtatcataagtccccacaaataggcttttagaaaaacaatcaatgtgtcatctaggtgtcgtcgcattaataaataccatttttaattcaacttttataatagtattttcatatttagtttaaaaataatttttaatggttgggcaaaacattttctttttcttttattaaacttaaaaaccaaatataagttatcatacacacattgcttttcattttgttttatcatcataggaggaaaacaagaggggagctatttgttgcacacctatatatgaacccaaaacctaacaaaaataaaaatgatttctaattttgtgcttaaaacaaaaccaaaaaacaaatacgtaacaaaagacaacatatatcttactattaatatgatatgttctttttatctcaatgcagttaattaaatgtgctcctatttaatcaagattgtaattaattaacaccacattctcaatact

SEQ ID NO: 86209 - DNA, 1282 bp, Cannabis sativa
acaaaaggtcgaaagatatctttattaatgttaaggtttcagaaaataatacttaagagacgtgaagattattgcaacaagataaatattgtaaaacaaatataagaacagcataaacacatcaaaaaagaatacgggaaacttctctcctagtgcagtcagaaggaagtccttcaacatacaaagtgctagaagcatctgaaggtaaaggggctaatgcccgtcctggcctagctgctgcctccattgggagctgatcttcaaaactagcagttcgaccgttccgtgcaaaatcaggtataacagccccttgacgtgccatgttaggatggtcagttgttggaacattttgcataccaccaacaaaaccccttcctaatccaccgtgcatattaggttctccagaagcaaacgaaggattttgcttcagaaacaacaagcataagtgatgtagcataacaataggtagaagcatcacaaaggaaattatcacagtttcacgggtaaattcttcggaaacaaaaaaaacataattcatttagcatgaacataagtacaagcatcacatgggaaaataatcacagtttcaaggacttgattaattaccgcaatcgggagatagtggtcatatgctgatccaattgtctttgtgtcccttacacccctatttccatcatggtcatcatcatgtgcaaaatacttgtgcatctcgtggcctgaaggctggccagaaatggaaggatctgcaaagaaaagtgggcataattccacatgcacattgtgaatattttcattaaggacatgatgcaattgttgaactacagtaaaattgcatttaaaccagaaaataggactgagcattcctctgtgcattagcataatcatttcaaaagatagaataaaaaaattcaaaccaatataaacatctctaataagtattcaaaaaatcaacatgggaatggaggcaagaggcacgttggtgagcaagcatattctcctttctcgcattcagaaagaggataacaatataaaaaatttggacaatatcaaacatgctatgagatgacacaatacacaatgaaagtaaccctgtacaatgatgactatcaaagggtactttatttttttttgatgaaactatcaaagggtacttagcttatagttaagtgctatatatttctttaattagcactatttataaatataaaatgtgaatcttatagatatattgactaatgtggggtctaaatggtacccctcaacttccatttatttgtttatt

SEQ ID NO: 86210 - DNA, 2069 bp, Cannabis sativa
aaacaattttatagaacatgttttttaaaaatattttcacttttctacttttaaaaacaaaaaactgattaaaaaaatgttaccaaacgtcacctaaattgatgaatttttgattaattaatttaaaaagatatatataaaagttaaatagtttatatcttgaaagattttcgacataattgagagattttcgaatagtttaactttttgaattgttgaatccatggcaagagataatttgatgaactgaaactaattaagaccctaatattttactcaaaatgcatcacttattagattttgtggagaaataattttaatttgtatccttggattttaatcaaaagaataatgattgagacgtacacagtctgagaatcatcccatttaacattctccaagcgaggtgagattacacatctcacccggtattttcctttacggttcatgggactattaactgtcacaagttgagatcttttttttattttagtattttattttttaaaaaagaaaaaataaataaaaggaaacacaattttaaagtttttttatgacatttctctttataaaatgatttttttctcatattttaagtttttttttaaaaaaaaaaatgtcatatttagtataattaagtttctatgtcatatatatcaaaatttatcttttttacccatatttttgtaaatagcccctataaaattggttgaaaataacaccttgcaatcacattctactaatttattccttaaataatttattaatgtagtactaacgtggcgttaatttggcccagttcaagtttaagagtctaggcaaaaaactatatgtaaatagcagtatgatattgaataattaaaaatatgtatatccttcttagagctaatatatatatttaatgttaataaattagattttaaataggttaaaattattaaatagaacatcgtactacaactatacttattactcatgactacataagcaaaatgtaactaaaagtaaatatttgttatgatttatataattgggagaaattctgcaacaaaaaaaaaattgaaggtcaaaattttacaatggtcttcaaggaaaaaaattattattgattctttattaaatatttaatcgtttttcccaccaattgctatcccaacaacacagctatattaaatagtatagatacttgtatatataaatatatattatagaattacaaactaaaatatagctgtaaaagcaataaataaaaaataatctcattaaatttattcttaaagagcacatagtacaacttgatagaatattatcactcataattatttaaactaaaccataatgtatagtttggtagggttttgatcttcttaaggaataacatgagtagggttgattagggtttccatggataacaatagctcttcttttgaggagcataaccatcatgaagacaaggtccattaggatgaacaatccataagtttatatcgaaaataacttccatcgaagatttgaagatatcgaatcgatgaaactccttatcccattgaaagctacaaaagaaaagtgtagtgccccaaaaattgggtaaaaatgagaacaaaaaggagtcgttgttgtggagaagtctgattccgatatcatcgtctttcgatttacaatgaacagttagatcggtatttaaaccatttcgcaccacaatatcaaccgcaggtcctccattagcttcacataataatgatttatgagatagtgatgaagaaaagaaaatgattataacaaataatagtaatggatcaatgataatgcccataagtttttttgaccttaagacaatgaggctagggttttaaaataatgagattaattctctcttcttttatagagactaaaaaatataaacgagttagtcaaattaatattatgatgaagagaaataacgtaccaaattcacatttggaatattttatttgacaacatgataattttcatttaaattaatttataacgttcttcttttgtattaattaaaacaatatttgtacgtagtgttcactttccaaagttgc

SEQ ID NO: 86211 - DNA, 807 bp, Cannabis sativa
cggggcggggaattggcagggagtactctccctgtccccatccccgttaaggattttagtccttatccccgcttattcttcattggggatgggacggggaatcccctaatgggggcggggacggggcagggaatcccctaatagaaaaataaagtttatagtaaaaattttaatatacaaaaatattaaactacaacaaaattaaaatattacacattaattattattcaatgaactaattattatccaaaatacaacttaaaattcataaaaagatactaatatactaaaaaatacaaatataaattataaaatattactagaaatataagataaaatactaaacgagtccccgtcggtgcggagagtgtaattcccgtcccgccccattccctatttaggcggagaatgaggcggggccccatccccgtgggagaaatgtgcatccctaggatggagatacaaattagtgatatattgttaaaatatagttcatttggtaaaatattagttccaacagtgtatcaaaaaatatgtcaaatttaacaagtaataaaagttgtactaaatttagtacacaatacagcatgactatgattgactctggactaatgacgcgtttactaaactgtaattggaatcagaataatcaatgagagaaatgaaacggtttaaaataaaaaataattgaaaataatattttattatgctgtttactaaagtgtccgaaaagaaaactaaaatcatattattttatttacatagctaaaaaaagtaattaaaatactttaatttgacaaaattgtc

SEQ ID NO: 86212 - DNA, 578 bp, Cannabis sativa
atcgtattttctgtaaataaaataaaaaaaaatcataaaaaatatttaaaattccgtaaaattatattataattttttttttggttgtttttgtgtatttgtaaaataattcttaaaaattattagagttccctgctctggaatgttctagggtcttttctggtattttccagtttactcccagttctcttctggttcacttccacttcccaaccgtcgtttttcttcttctctttctccaattaatgcatcttcattataccctccatatcatcattgcttattctttaatgcagcccccgttttccctctaccgagactaccattaatgcttgctcagataacttttggttctccttccttccctatcccttcatgcattcaataactgtcttgttcttcagatggaggcgaatcattgccctatggctgggcagacgaggatctagacctccagcagctcgaatggctcatgtatctcctcatcttccaggttattcttacttcaggtatatctttctcttattttcctatttaaagaccagcattttgtattctgatcatctttcatctgtact

SEQ ID NO: 86213 - DNA, 772 bp, Cannabis sativa
aataccgggcaccggaaatgcaaaatatgaaagctactaaataactcaacctgcatttctgaattccataaataacagtaataaattatttaaataactataaataatttcttaattaaacataaccaactgataatttccaaattaactaagcgggctttacatatgtgattttattttatataaattaatgtttaattataaacttaataaaaaattaaaaaaaatgagagaattaaagagagattaaataatgttacgttctcaaatatgaaacgtaattatataatacattattatacgataacatgtaacaatataaatatgctgcttggcttccaggttttgttctcataaagaaaatattacatcgattttagatctgttcttcgattttacatcgatttaaacagaatgacattttattactgtcatgaactctgaattaggaatttattccattctatttcaacctatttttatgtacaaggtcataaatattattcattgggtatagccattccactgagttagggtatattcattgatatttgatatagttttttgtctacaataagttcaaaaatcttagaaggtttaataaaacttttatggcttagttgttgagtttttataaatgtaattttttaattttgaaagtaatttagtaaattagatttaaacctgcaaacacaatatataaaaattaaagaagaatatggaagaaaaaagagaccattattcacatatagagataataatagaaactttt

SEQ ID NO: 86214 - DNA, 592 bp, Cannabis sativa
ccttgaaatggtgagttcgcatggagaccagcctctttcgaaagttgctattcatcagaccgtatttgcccttagtgacaaggcttatattaaagcctctaaaagtgttcttggactcaaggtagaatgtgattccattaaaccttttctttatttatttatttattatttttttttttttgaaagagaaacttgtttcttcataagttgatggtatgtcagtaagttaagaaaatattttctttcaggaagaaaatatggaatgggttgttgtcaaattcagttctcctaacccatcaaacgatgactggataggagtattctctcctgctattttcaagtaaagaaatgtgcttcctttattgtactttatttgactttatcattctttaagaatttgtaggcacaatttactttttatgctatgctatccaataatgtttcttgaatttttactaaacaaaaacacataattgaacttgaagaactcagttttttcccctgatttccatttccagtgcctcaaattgccctgcagaaaatccagcaacacatacaccaacactatgtacagcacctattaaggtttgaa

SEQ ID NO: 86215 - DNA, 1414 bp, Cannabis sativa
  modified_base (111)..(122): a, c, t, g, unknown or other
  modified_base (223)..(223): a, c, t, g, unknown or other
gatccctacaaaaaagtattttttactacaaaagttttactgtgcatatataaaagattgtcgcctagtgactacaaaataagccctaatgtcccaaagaccgtacgctcnnnnnnnnnnnnccccaacatgtacaatctccatctgctcgttctcacagctgctcagccttagccttgccctcacctacacatggaaatagcaactgtgagtcaacagactnagtaagaaaagcataaacaatagcataataataacccggattataatcaggtacccatacacccaaccataatcctatcctcgtgtcccacacggtgctgagtctagaacgttcatacaaaaataccatcgaccataatatcagcctatactcaatatgctagtcatactctagccatactgatgtgatagcatcaatcggtatttatgccaaacatacattaatcaatatctagtataacactatgtataacgatactgctatcaatgtactctaacaggcataaataacatgtacaccaaacatgtaaatacatatgcttgacattatacgaatcttacctcgttttctaattcaggtgtgtcgaccaacctaagaggaactactgcttggcgaattacaagccgctaaatcacatcattcgtaacacgggtaagtgacacgctaaatcatatccagggacttaggctttaaaccaaaagttttcctactgaaagttaacatggaaatattctaaattttcaagaaattaaccatctaaagctttaaaactaacacgaatcgacaacacgaaaagtttaggaactcgtctcctaatccgattaaccagtttcacagcaagtaacccagaaatttcaaaaccccaaccaaatcgaatccaaacctcaccaaaccttcaagacctgcttaatataccccaataaacatatcccaagcaacagaacaacataacatgctcaaaatcaaaaattcactattaaagagccaagtttgagttcttaaactcaaagcttgctcaaataacacaaaaactaccaaaacaagctcaaatcaacataaataaccataatctaacttcaaaaaacattcagaaacaacaacaacaactacagaaccctaaaacccaaattcttgcataaatccttaagttaaagctcaagaaagcaaaaagggaactcctaaggaactttaccttggattaatacacttggaacctgctgggatttcttgaattaagcagtaaaacaatcaaccctaggtgggttctatagggttcgaaagagagagagaacttagagagagagagagagagctcttttttctaattttggattttgtaaaataaatgaataaaaatagattttatttaattaacaccagccattaaaatcagattactaatctattaaa

SEQ ID NO: 86216 - DNA, 1045 bp, Cannabis sativa
tgaaatgcctttccacggttacttctcgcttatctctaaatggttccatgtctgaagcatttcattcctctcgtggcattcgacaaggagatcctttatctccatatatttttctccttgttgctgaaggtctttctgcttcccaaatctatctgtaagcagattcagcgattgactgctaaattttggtggggttctaattctaatgatcgtaaaatccattggaagtcttggtctagtctcacggtctctaaattttttggtggtttgggttttaggactctcaatttccataatcaagcccttcttgccaagcaagcttggcgcatttggtctaactcagactctcttgcattccattctgaaagctcactatttcaaaaactctgatttccttgttgcttcaaatggtcacaattcttcttttatctggaaaagtctcctctggggccgccaactcctcaagcgtggtctggtctggaagataggttctggcaataacatccccttatctgcttcaaattagatacctgacatttcttctcctaccattcttcatcctattgagccatctctttcgtttgtttattttttcatcaactctgataacacttggaatgtttctcgattaaaacactaccttcctctatatcaggtcagcaagattctccaaatttcccttcactatacccctgctgatactctcatttggggatttcaccattctggcatcctcactgccatctagcttctactactgccaatactcactctccttcttcttccaatccaaatccttttgaaaaatggtggaaaactctctggacccttccaatcccccaaaaaattaaacacttctcctggaaagctttcaattgtattttgtcgtgcgctctaaatttgtttcacaagaaagttcttccttaaccttcctgtaatttttgcggcactactactgagtctgtttctcatgctcttattgattgtaccagggctcgcaatatatggaagctgaaagtgcaactagtagattttaatgattcaa

SEQ ID NO: 86217 - DNA, 941 bp, Cannabis sativa
aactaaactcatcaaaatcaaccctaaacctaacaaaactttccaataatatcataaatccatgatagtgcaagcttagggttttacctcagattaaactctcaaatttctacctaataacctctaaaattgaagaaattcatgccctaggctgttggttcttgctggccgaacaaggaagaaaaagagtgataaagaggtgtttttatctatttccttatttttcaaattaatggataaaaggttaactaattaacatttatttacttaagtggtagctgtcaaacaaaggtggagacacgtatccaaaaaaaagtaaaattactaaactacccttatctttaaacctaactcaataaacgacttatgagtaaaatggtccaataccacaaccccgccaacaccaaccatttgagcttacataacatattttctttcactgaaaaggctatatgtttacccatgtgactataatatcctccgttgcattttccatcgccaccgagttaaaatcacaagaacaagatattttacagaaattataaatgttcacatatatccatcaatagtaatatgcataataataaaattagtatttataatctcactaatccatatctagatcatgcggtcattacactggttgtcacgtgtctctttcctagggcacatagtggataaagatgggattatggttgatccggccaagatcaaagctattcgtgattggacaacaccaaaatcgactactgaagttagaagctttttgggtttggctggttattatcgtcggttctttgagggtttcttgaaaatagtaacacccctaacagaggtgacccgaaagaatctgaagtttgtttagactgatcggtgtgagaaatgttttcagaagttaaagcagcgcttgattaccgctctagtattaactcttccttcag

SEQ ID NO: 86218 - DNA, 1060 bp, Cannabis sativa
atacgacccatatttttttatttatggcctaacacgtattcacaacactattataggatggggtgcaccccaaaaagaggtgcttcactgcaccctctcgtattttctacatctcaataattttaattttatttgtattaatgtaaatattatttgtaccctacaaaataatatgtacatcccaatatttaaaaaaattaagtttaatttttttttaaatatcactcttaatatttatttttttgtcatattattttttgttaatattgatacttattttaattttactttcatatatttttaaattatgtataatattttttccaataaaatttcacataattttctatttaaatttttttgttataatatttgaaatgtattttttttttgtttgttaggtacatttgttaagaatataaattggaagaaaaaattaatattattaaagatatatatattttatgtaaaataaaaatcattaaaatagagtgtatttataagtttttgtggtgcaaataaaactctcatatttaagacatcacgattatttaagatatactacaaaatttaataaaatttaaaataatttacaatatgattacatataatcttataaaaaattatgaatattaaaatttgaatatttattatcatttttaattgaattataaatattttttagcattattatcattaaattacaaggtttataaaaaagaatcatcgttttttaacgtttcatactcttaggctaatttaattttgtgcttatatgttgtatttttcgtgtttgtcataccgcatagtgcttaaacttatatatatatatttttttttcatgtcatattaatttataatatcatgctatgtcatgcccatactcagtggtagagctagggcaatattttagtggaggcaattttttttttttttttgaagtattgataaaatataaattttaatagaaaaactataaattctgtgaagataaaaataaaaaataaatgggaatagaaatggaaatataaattttatagaaatacaaacaaaaaatata

SEQ ID NO: 86219 - DNA, 705 bp, Cannabis sativa
tgatatcctatttatttaacatatgaatcttattaaatgatccttcaacttctaacttctaccaatattactttcttcttaattaaattcccttatgaattggcccgagttacaaagtattgggaatatatattattaaagaaacaccgaacattacatttatatataaccctaaaatcattacgaaaagaaccgcctctctttttatctgtgtatcctctttcctatctcctatctttctttttcatttccgtagccatggctgatgtattcgaagaatatttgaaaactatagacacggttatttgtaaaactccaattccttttgtcatttgcctcacttatgccttcatctcccatttccgatcacgaaagtcggctgtcctaccggttttccaccaacataacacaatgtcgaaggggtctcactgttgcattcattcaatcgttgaatcaggagatacaaaagtggatgggtgaaaaggtaagtgtcaagaagttagatgaagacattaggaatggtttagatggttgtcacaaggaaaaagtcatgcaaatgctatgttgtctccgtgatactgaaaacctaaagatgatagagaatgaggattgcgacaagcatttgatcaagttgtgtaaatattaccttgcatacggaaccaaaaaaaaaattgaatgttcaagaaggctttgatatattatgtt

SEQ ID NO: 86220 - DNA, 518 bp, Cannabis sativa
tttttttatgtaaattgtcactagaaagttgtagtacaataatatatactatttgtcaataagtgttttgtaaaatagtcattataaaatttgttattattagtaaaaaataactttctaaaaaaaatttcagcaaaataactatgttaatttggtaacataagtaaccaaaaattacactatctgtaaccataaaactaccattatcgtcattgtgcaactataaatttacatgactttgttgcatagtataaatttaatgtggttatcttataatttttacaatttcatattgttagtttggccaattttttcttcttctagtctgtgcatgtatattgactctgaatagagatatccctttgtgtcactctttcggaggtaacaaattattaattagagaaataaaacatctcttatataacctttgcctcagttaatatttaaggtaaagatcaacaatatatcaaacaatttatatataatgtaaaaatataattaattattgactgtatata

SEQ ID NO: 86221 - DNA, 570 bp, Cannabis sativa
gaataattagtatttttactccctcaaattttaacactacttgattttacctctaaaatatacgacttgttaaaaattccctctaaaatatacgacttgttaaaaattccctctaaaatataataattataaacgacttaccttgaaaacattgggtatttcaaaaaagtcatcttcaagctcgaaattaaaattagaatcttccaaaataggttgaggtcatttagacttcttcttggaagaagattcaacaactgacttccgtttaggagcaactggagacgtatgactaggaaattctctttaaaattctttttcccaattgatgatcgaggtaagattgtttggggttttttctaagtttttttaactattggggaggaagaattagaatgggttacaactatagaaatgaaataagaagaatatttataaagcaacaatacttggggaggaggggaattagagggaaaatcatttttgaaaaataaataattaatcaataattaactaaaaccaacttacaactgcaatctacacataattgtggctgaaatttttaaaatctaa

SEQ ID NO: 86222 - DNA, 551 bp, Cannabis sativa
catagagttgtcggttctgttttcctaggcttaggtcttttatttctttacaataaaaggaagcaaataaatcaagactctaacaactttcagctctacaaggaaaatatcttaacagattacaaccaattttttctcagcacaaacaaacacagccagcaacaacaacagtatataaatatatgtacaaccttccactttccaataagtggtattttcggctcctgtagaggaaaaatggcagcagtgttttctttgtaaaatcacctcagaaacaagagagaaaatagagagagttagtgagagatattgtaagaaaaactaagagaaataaagtgaagagagagagattacctgctggctttgtagcatggaatctacataaacttgtaacccgattttgacattgatagtggagattcaagcaactttgagggtcgcttgacggagacgtacctctgatttagagggaactccgaaatcaattgttgtggtgttttttattcttttctttgctggttttttattttcgttggtatttctatggctgg

SEQ ID NO: 86223 - DNA, 685 bp, Cannabis sativa
aatgggcctatcttttgataaatatatataaccattatatatatatatatatatttatataataatatcatctatgttatcatcttttggttctttcctcccttctatatatataaccatttatatatacaccaatatgtgttgtgacttttaaatattatttcttcttctttgtcgtgtaatatatggatagaaaaagaaagaaaaaaagaccaaacccgcattatatatatatttatatattacttgatgatcatggagtggtactgttaaacaatcttaattaattaaatagtctttctttttccatgatcattgatcaagacctttgtaatataagatcaagatatacgtaaatacaatatatattcattattacataaatcacagttttgcatgcacttaattattatctacacattcatatagagaattgttccattaacatgttgagacacaaatgtagatatatatgatccaattaatactcaattagaatttgatttatatatatccaatgaaattggttgattagtttaattataggttatggctatagtttttccaaataattttgcactaatattaaattattaatcgtcttattaattaattaattaatcacaatttccttaataaatatatatatatatataatatatgtggacatatgtaattgtgatat

SEQ ID NO: 86224 - DNA, 548 bp, Cannabis sativa
tctccagcatttgcacagattgcctgcaactggtctacaaaatatttagtcgcaagagagagcgctctgctctggcggatgtcatctcagacatcaaaaattccttgtcacacctccctattgctgcggtctatcatattccaagggacagtaacattcatgcacatcatatggcgaaaggagctttagggcttgataaggaattggtttggaaagatgcttgtccaaatcttcttgttgtaacttgagtttcattgtcttatcctctcagttacaaccgtcaaaaaaaaaaaaaaacactttctttctttttctctctttccttttttgcttccactgtatctagctatattttgttatttttgtggtcgtcccaacaccaacatttattcggagagagaaaaaagtttataataatttcaaaatgtagcaaaaaaaaaatgtaatttttggttcatagttgttgtacatattataatattgtcgtttataataaatcagttataaaagaattttcatatatgctatatgatatatgtaatttatat

SEQ ID NO: 86225 - DNA, 696 bp, Cannabis sativa
  modified_base (45)..(64): a, c, t, g, unknown or other
cgttttagaaagttcatatctagggtgtttaaacaacatacttgnnnnnnnnnnnnnnnnnnnngtaaaataaattccaacatacacaccatcaaaaaatgattgacaaacaatcaagaacacaaagataacatgtaaataatggttagaaatacaaaattattttccatttccataaataattgagaacctaccgacaacctgttgagaaaagtcttccgtgacattgagacattaatgtcgagaacctttcaagaacgtattgaaaactcgtcgagaaaggtctcgcctgaccttgagacattagtgttaagaatctatcgagaatgtatcaaaaaacgatcgagaaaaatgaaaaacacacaaaatactccaaacaaggggatctcgcgatttcagcgaaatttatgtaaaaaaaaaaaaaagaaaactaataaaaaccacatagatctaacaaaaacatactatacttttacaattatttaacaaaatattttaaaaaatacttacctattactccaccatgagacggaggtagaggaggggcaacagttgggttgatgagagaaggttgagcggttgagtattcctagccaatgtaagcagcagagctaagggaggagggcttttcttcttctttttttttttgaagaaaggggaggcggctaatgctagaaaagagagagagagagagag

SEQ ID NO: 86226 - DNA, 1756 bp, Cannabis sativa
gtaatatataaacgcttaaataaagaaaaacaaaaaaaattgattgacttgtagctttgcaccaccattatttgtaataatgaaatttaactataataagttaactaaattttgttattagatcatccaagcatgtccatgtgctgaaatgtgtggcccaattgatatatggtgatgatgcacatgcatttgaagaaaatattacatctatacatatctcaatatatatattttgacttttggagagtttcacacttcatatatagctccaatattttttttaggtgtgagttagcttgcaatttggtaagacttgttggattaaaatgcttatatggggtactatgtatcagtttattgctatatgcagtttgatctaaataaagtggtgattttagtaaatggtaaatcattgagtattatagtattatagactaaatgtgtaaatattttaagtgaaatttttaatttattaaaaaattaaattaaaaatacttaaaattagtaatttaactatgaacttatattatatattggtagtagtctccaaaaaactaaccaacatgctttcttgctcaagctaaggataagtactctggtattatgtacatataatatatgtgtgtgtaagaagttttacgaaatgctgaaatttagtgataatagaagtgttgtgatggtaataattagattttttttttttttttgtcacacacaacaaaatagatttttgtatatgattagtacatgtagatatttattgtgacaaaagagtaggaagaactgggtatgtaggaatagatacagttaaagtgaataggattagttaggatttaggattgaaaagtaaaaaaggaaaagtcaatatcagatattgatcaagaagaagctggcttttcttccccaatatagctagttaccaattttggttagaaagatacaagagcaagtttgatatgggagataagatatggaagaaagccaaaataatggtcctacccataattttatttatgatttgtgtatgtatccaaaacgcaactaatacagttggacgtttttatattcagtactgttatttggtattttaaggtgcctaataaaattaatactaatgtaatactatgtaatagattagtaatttttcatattatttattaaattaaaatgtgtgagactcgatattaaaatgcaacaataataataattattattttttgtggtgcttggcgttttgttacttagcatttctagcatttatgtatctttgatataattcatattgtcataaatctttgaaaatattgaatataatgcattaagttccaattcttaagatttaagaaagcttttcactccaatgagatgacatgcttgaagagacttgcaagcccaaacaaatggaaaagaataattcatataaatatacatatatgatgaggaattattggatagcaagagaaaaaagaaaaaattaatagcaataatagatttaaaatatccccacaaaaaagaaaaatatctacaataaaatcaattgtatttacattacaatccgtatcgttaaaccaaaacactaatctagcttattttgtctccttccctataactaatacttaatcatagacaaaattagaagaaacatatatttacactagctagaattgatagacattaaaaaaaggacagctacgaaaactctcaaaccccaaactaaagtttgaattgtttgctatggtttagcttacgccacagt

SEQ ID NO: 86227 - DNA, 745 bp, Cannabis sativa
agccttgaatagcagcttttcctaatctgtaccgactaataatcttcccaaccaaaacttggttcgcttcttcaggttcatcaacttcgccgaggttgagtgcgaaggtgatatcatctggggagatttgaaccgcatcatgaaacaggtcactaacttgagcagggtccatggtgactttgaaaaaaactggttaatagaacaggagatgaacaacaagactgtatacttccaagaagttagctcctacagagcattcagagatgatcaaccagtttatgaaaaggagttaatatatatgaattatgaagcaaaggagaattattttcttttacaaaacctattacgtgtcaagcttttaagaatctttatcttttatttgagactttggacttaagtatatcatctatttatttatggtagtatgaaatgatatagatagaccaaaaagaaaaacttattctaagctactcaaaaagaagtaaaatgagattgattcttctatatatcatagtagatatatatttatttggaaaatttgcggcaaaagtctgtaaaaagattactgtgatgcagattagtccccaacctctaaaaataacagcaatagtcctcaaggtcacactttttatttgtccgttagtactaattttaactaagccgttttttttttaaattgtcacgtgtcaaaatattattggtccaaattattattttaatttaaaaaaataaaaataataaataa

SEQ ID NO: 86228 - DNA, 581 bp, Cannabis sativa
ttttaaccaattatgaagtagtgattttgagttttactgtaatacaataaacttgattgtaggaagttattttatttattttattattttaatgaatttttattttgctttttgtttaaagttcttttaaaacaaaattgttagagcagagacgataaaaaaaaaagaaacaaatcttaaatgtgcgcctcttgtacaattttttttttttttttcatattttgcttttaaacttaaacatttaaatctaaaaaagcatgttagtaattttttgaaaataataaaaaaaaggattattttataaacacccaaaaataacaaaaagttatatttttacatatctacaattatttttatatttttacaaatttcaattttctttttttaaatatggaatattgttgtgttcatccaaaacaatccgcactattttgctcatagtgcatctgagtcgcactaagtgcggatttcatatttggatccaatcaaattcatacaatagctcaaatctaatccaatccaatctataaaaatacagattggattggttactttttaatattaaaatatttaatatttat

SEQ ID NO: 86229 - DNA, 992 bp, Cannabis sativa
  modified_base (337)..(350): a, c, t, g, unknown or other
tgtcttgaacaaaatcaaattaaatattaattttctatttaattaaatatatcttgaaaaataccaaaagtctacctaaaaaatatctatgtagatatttcataaaccaattacttattttctaaataaaatataatatattttagtctatctattttaattaaatcattaatcaaaattatttgatttaagtttatctaaaattaattaataaattacttttcaactttaatctaattttcaaaattgaaaaatttcaaaatatctacatttaaaaataaatgtacttcgaaatgtatgtgggaaataattattaaaataaaatatattctgaaannnnnnnnnnnnnnagttgatctgaaattgaaaaattccaaatttaaatataattttttatttaatttaaacaattaaaatagaaacaaataattaagtatctttaataaaatcaacttaactattaattctaatttaatatctaagaaaatattccaatttaattttgtctaaaattaatagaaaaattaatttttaacttaaatatattttctaattaattaaatttcttaaaatagaaataattcagtatcttgattaaaatcaacttaattattaattttaatttaagttctaagaaaaatatcctaatttaagttggtctaaaattaattaataaattaattttcatcttaaataatttttctacttaattaaatattcgaaaacataaatttgttactagaaatcactgtctagatctttttctttaaactaagtgtatttttctaaattaatttttaaataatctaataaaaaattaatgtcatttatttcaaaattaattgtgttgttaattcaattttaattagcctaatagaattatttaaaaaaaggcaaatggaccttcacagttggggttgttcatgtaagggagggttgggtccagtatgtcgtacacactactaatgaccctctaactctcacacaaggcc

SEQ ID NO: 86230 - DNA, 1307 bp, Cannabis sativa
ttatcattatcattatataataaattttcagagagcttcccatctctcgtgatcttcatcgtcacgaggttcagacggcggcaacaacccaattggtagaaccggtttattgtgaagagtcttgagaagactcaacgattcaggttcgaactcaggacaagttcggatgagcataatatgacaacccttaaccacctcaatcacccgctgaaaatcagacacatctgagtccatgcagttccagtgattctccatttcgtgcaacttaaaagcaacgctgtaaggcatatccttccaccacttaggaaccactgtaaaatcctctggtttgctgcgataattactactagcagttttcgagggtggtatcataaacgccctcgacgtggcgttcattatggaaaggtaaaccaacttgattcccagccggctagcgagtggaggtagccagtaacaagcgaagtcgtagatgatccaagtaatgtcatagcaagagtcttgtagaaacttagtcaaacttggttggagtccatcgaaggctttcttgaggaaagggactttgtgaatgggtaagtcagcggttgattcagctccatccggtaagtcgtccactggtggcaaaggcaggtcaacgaaggttatgagatgggaaagatttgagggaattaagttttttgttagcctagtatgagtttttggggtggtgatgaaggaaacacggtgacccttttgaactaagaacatggagacttggaaaaatgggagtaaatggccttgtgctagccatgggaatactgctatatgaagttggttaacatcactatatagtttattgttcaccatatttcgttaatttgatttgtaggagaaagatgactctctcatatatgtatgcgcactgacaataataatttggacacaatgcaattattaagtgttatttcatcaaaagtgccactaaattattaaaggcatcatatatgtatgcgcactgacaataataatttggacacaatgcaattatgaagaaattaggtaattaagccgcgctttccgcagtcttataaatttttatttttattattattgtgattacaaaatattagtactgaatgagtggtatattatacgatatactattattattttctcaaaatcatgtattttttgaatgaaacaatttgcaataatagagacattatacaatatacatatattgttatacaatatactgttattatatatatatatatatatatattaaatttctttgttttaaatttattttacatcaatatataaatata

SEQ ID NO: 86231 - DNA, 1322 bp, Cannabis sativa
aaattttgcttgctgaattgtgtaccgttaaggttatttttattaaacgatctactaatgtagcagcttataactttgttagggcctccattttgtatcctgatcgtacttttctaatcctattaatttgttaccttgtttgatgactgagtttgttggttaataaaattaacattttccattaaaaaaaaaaaagtcatacttacactttaaatctgttttgaggtattaaattttcattaatttctttaaatatataatatagaagaatataaaaaaaataaaaattcaaaaaattcattcggatgctgaataattttccaatagcatatgtattttttttttttaattattattttagtaaggaagaaggaggggtctctctctgaatctgagaagagaagtcataaagtcccaaaaaaataaaatcattgcccatttccattttcttaatggacaagaaccactgctcatcattatcaatgccacccttctctcattgatttccttcttcttccccgccattcttttctgtgtttcagctctctttttcccacacacacattctcagtcagtctctctctctctctctctgtatctatatctatatatttatatgtgtgtgcgtgtttttggtttttgatattatttgatggcagcagatctagggttttaagaaccatggattcgtggaaattgtagttcaatttttgatcacatggcgtttttgtgtttgttcattgttttagtttggaccctgccttgcctgctgctgtgttgtgtaatttaccacgctcgagaatataatctttctttgtcttaatgaggtatgtagttttttttttctttaatcggtgattgttgaagatgttgttgatattgtgatgactgtgattggtgttgattgatccagatagaggttttggaaggaattattaaatcaagagtgaacatgggtgagagccagaagttccagttgggcactattggggctttgagtttgtcggtggtgtcttccgtttcaattgtgatttgcaacaaggccctcattagtactcttggtttcacttttggttagtatgagatacttttcagtgaccaatttttctttttgtgtttttgatttggttttggtttggatgttggtgctcaaatttccttgacttagtttagttcaaatatttgccgttttggttgcgaatttaatttggactatttggtttcaagacagaatttataatatgcctaattgcaaagtttcatttctgatttttaaaacaatacaccaagagatgcttcgcatgggagatgcattctgggta

SEQ ID NO: 86232 - DNA, 504 bp, Cannabis sativa
gtaaaatggtctgaaactataacccagcctaatcccaatatctaaaatgtcactaatgaatattcctctaaataaaaaggttttaattaacccatgcaactaatttggccattcgtcgcattttccatcgtcgctgggcaaaaattataaaaaatataaaatttgcatacaaaataaataatatacttagagtttaataaaatctctgaaattgagaaactataactttaactcccaattctaaagatgggacccacaataaatatgagtataaatattcatatataattaataaataacaataattaatgtttattgccctactatcccttaaataatccatgtggtcactacacaagcagtgttgaataaagtaaaataaaaaagcaaatatcagaatcaaagtttttattaagggtgcgtttggaaagccacaatgtaattagatttgtgtgtaattagaggtaattagacaatttggcatgtttgtctgaccatgtaatt

SEQ ID NO: 86233 - DNA, 721 bp, Cannabis sativa
cttgtctctcagcctccatcaaggaatgatgatccaaggaattcctcagcttaagcaactttctaaaataccagctaaagtcacttttgagagtaagacaccaatattcctgatccttcaagcagacattattaatccatctcaccaaagacagtcttgtttcgttgagagagcccaaatgtacttagccatgagagtcatattgaacttccttccttctctaaatccaagagcaccatactttttggataagtaaacatgctcccaagaagtaagatgaactttactacgatttccttgaacaccccaaaggtaatttttacaaagtttgttaatctcagtagtcaccttatgaaatgaatgagttgagctctaccagcaaacgaaagatttctactagcccaattatggagtttcttctaaatcttatcaataatcccttcataattaattactctccacttagtaggtcttaaatttacaccaaggtatctcaaaggaaaggtaccttcctccatctgaacaatgttcttgagatgaagcttactatcatgatatataccactaaaataaatatgagatttggatttgttaacagctaaaccagtagtggcacaaaaacaatcaatagcatcttgaacaatttggagagacttcatattacccttacaaaagatcaccaaatcatcaacaaaacagagattaactaacctcaaagact

SEQ ID NO: 86234 - DNA, 677 bp, Cannabis sativa
aaaaaaaagtgtttttaagattatatttcctttatatataagaaatgaatatacaattgatttattaagttttgaaatatatatgtattagattttttaattgttattatttttttcagtaaaatattagttgtatatataatttttttaaaatatacataaattggatcgattttttttttcatgtcaatcaacattcaatccccacacatgcggattttagattttccaatctgcacaagtgtaaatatccacactttacagatttaattggattagatcgtgcgaattgaattagactagattgagtattttataaacactccaaattttatattttcattggtattgttagatttggagataatactatttcaaatttgtcattatttcaatgctatttagcaaaaataaaataaaattccttaacatttgtttcttctttttgttgtggcatctattcttacataaataattttactgaaaattattaaaatttaattcaattatataataaattataaatatatttataaaaatattttagtaattttattaataacaataatggtaattataaaatcaagcaaagcttacacacctgggctagtagacatctgtcacatgcaggtagagcccaacttatacattcagttctgcttgggctccgaaactac

SEQ ID NO: 86235 - DNA, 1238 bp, Cannabis sativa
attcctctttttatttattttttttttagaaaattcggtagcatcataatggttgtattttgaataaacccaaaaataataatctgtataaatatttgtaaaaaaatatatttggcactccgtgccccagaatagtccagaaaaatgtgcagataaagtttttaatttttcaatcaatttgcaaatcataaaaattagaatttgtctaatgttattcaacacacataaaaattaagtccaataatcaagttgagtccatacctctcccaagtcgttaaactttgtccaaaagacaactttaagctcttaagtcttgagctccaattgtttagtccaatcttagatattcatctcacatataccatcaaatggctaaataattatcatcattgcattctgcattaaaaatcgattccaacaacatataatatgactatatttaaaatttggagtttcgaaacttcacctaagtggtgcacattaactatcggtagcagtaaaaatcggtgtaccagaaattttgccaaaaatagagattgtatatatcaaaataaccactttgacgagtagatcacacccatgccaaccatttgtcaaaatagtacacgatatcgccggaaagttgacggaaaggggcggagctacaaaattatcaccaaaaaaagtagcgagttgggagaaatggtttagtgtatgttgttctccatgatgagctgagtctagtggtgaagacgactcgtcaagcggacaacagaggtggccaaaaaatctgttcaaagtttgaacctccaaactttgacttgtgattccgagctaacgatagcgaaagggaggcaccgcttggcggttgacactactagaaaattgggttttggtgacatacattgagtaactctaaaagtgtatagtgacacttcaacgcgcgtcactaatgagggtgactggaaagacaatatttagtgacacttcacaagtgtcactgaaaccttttgcattcactttctgcgtgtcactataggcgtatagagtcgggttttgtcagactaaaaaggtaacagccacacacataaagtgtcacaatatcctttttttctttttcttttttcctttttattaacatttttaaagatatactgacacacaaaaagtaccactatattaaatatttttctaaaaagaataatatttaatttgatttattaagaatttaaataggtataattatcaatttaaattac

SEQ ID NO: 86236 - DNA, 1423 bp, Cannabis sativa
gaacgcgccctaaaaactgcgttaaggtgatcacgaagatcacctttatgaacctggtatcttcctccttgcggtgtttccaccaaacctgatctgatgtacctgctcgaggtgcgactttgcaaagacaaagagccggactcagtgtcattcgcctcattctgcggttaggttctactgtgagggttacatagttctagatcttcttctggttgtgcgtcgtggttgaagttctgtgtagactaatctctcgaggttggctgattcaaatcgagcccttcctgacctgtccttcattcccagcgagtacggttagttcgtcatctagacgtagttacctgtggattatccgagcgggtagtgggtactcgaggaggacgtcgagtactattttgcccgtcgattttggcctccaaagcccgcatttgatcatgtatcgccgtgtattgatcagtggttagttgaacaataccttcggataccacggcaggtgtaataggtggaaattgtcccactgtggcagctggtatggatgtttccccgatgtgagcagtcgtttcaaggaacaaattgagcggcgttatgttcgtctgtcccactttgccgttgatggtatcgacaggaggtactctgtttcttgggagtgggacgttcatcgtcccaatgtccattgttgacgtctccatttgtctgatttccagccattgtgattttccttctaaatcagcaaagtattactttcccacagatggcgttaaatattgttgaaggaatttttacaacacgaaaaaataaattttaataataataatatagagaatttatgcgagtactcaacccagaatggcgagtattcgaataagggacaaaaaatactttagaaaaaactcgaaatacaaagaacacaagagagtataatagttcagttagatcacagtctggttcgtccactgttgcaacgatttccgtctcgttcatttcacggcagatcactcatttatataaaaatcaagtgccctatcaattacacaaggattgaattcattatcaatccgttcatacaataaattacaccaattaaactaaaaaaaaatgtaaacacaataaattaagaatagtttccaccttaattcacaacatacagcaacgtatgcgacttttatagagcgagttggttgttcatattcttgcataagctcgcaggcttaggatatgttcgaggctagtcgagtctaggatgtctgcgtgctcttggagttgcttatatggacatcttataacaagctgatagaactaagacatgcgagtctatattgctttatcaaggcagtttggtccatgggaccagcttgtaacatagagaatcgatctctacgctttcgttggagaatcacggtgatactcgcatattccttgatgtgtg

SEQ ID NO: 86237 - DNA, 667 bp, Cannabis sativa
  modified_base (612)..(641): a, c, t, g, unknown or other
gaacggtggaagatccataggagacaagttgaaactaggcacaacccaaaagagatactcaaactaatctttaaatcgcttgaggtagagttgttgtgtttcatactgcggtctcgaatactgagtatcctgctgtgtctcctctacttttttcaataagacctcatacggttccatagtaacaattggtgggcagaagaagtcgtggcaagtgctcttttggccccaactaccttcaatgtcgagagatggccaaagcctcttagatgtcgagatctctcaccctgtacttgcgtcataacatgcaagtctcgtgggtactgggtgggatctatatcatcatcaacaggctaatccttagtgggaattgcttgatttgcagccaattcaaccaattgctcctaaaaaacaaaataagttaaagagttaatttgaatacaaaacaaattgaagaaatgttaacaaatcaataaatatcaatgtaaacttacataagtttgttgcgcgtattcgttacaccaagtattgtctctatgcatggtagaacttttaaaaagtgtccacagtagttagaagtgttagattatggttttaccaggatctagatttacnnnnnnnnnnnnnnnnnnnnnnnnnnnnnntgaatttctaaaacaatgtaatataa

SEQ ID NO: 86238 - DNA, 563 bp, Cannabis sativa
tttttttttttttttttatgatcgcatacgttgtagctatttaagactatttgtaaatttaaattttttttgaatagttcacagtgccaaaaataaagtttaaccaattacttactacaagtataagaaaaaacagtcgcgtgtgcaacaaaatatgtaaatcttatttttgatattataaactactcaaaattttctaaaaatttacaagtggtttaaataactataacatattatgaaaagaaaaaattagattaaaaaactctcataaatactgaaatagataagaggcctaccgaaacatcccatcagagatatcattagaaaaactatttaaaagacgtaatctattgactttaatctatttaaaagacttgttgccaatctattaaccaacaaaagagtgctatcatttaaaaactagaaaataaaacttgagaaacataaaaagccagcaatatatattaacatacaattcaaatataaataaattatagggtaagtctacagtacacccttttaaataggtgttttggtaaattttctatttgtttcggtattta

SEQ ID NO: 86239 - DNA, 772 bp, Cannabis sativa
taattgtgaataactatatattaatttaatagaactcatataataaacctataattatgtataaaacatgtgaatcaaagtatatgactaagtcatggtatattttctcatctttattaaaagtaaatacaattatattaaaattaagttttatttagagcataaatatcaacaataatatgataaaatattttcttttacaacataattatttaatctaaaaattatataacaactcatagaaggcgtgcctctcatatgttttatggtctaattaaacagttaattatgataagcttggtgtagagagttactattttgaatttaaatttactttgatgttttggagggtctaaaggaagatgtaagccgacatcgagcccatacgtgtcggtagatagatctaactttgttgctcaagtatgtccacgaactataaagtcaagctattatagctataatttacagtaccagaatttgttttatggtcgcctcatcaatatatatattcctaaccttggacgatgtactagtttaaacccattctccaacctccattctcgtcacttcacgttgatgagaaacggagaccatgacaattttgtcataaacaccatttttggacttttttttttttttttggtgagaacgcaacgaaggacatcactctctcgtcgattaatatataaaacttttttaattatgtaatccagataaagcaattgaaaattcatctgaaaattactcctctttatagagtgtatatatatat

SEQ ID NO: 86240 - DNA, 895 bp, Cannabis sativa
ttttttctcattttatatttacatctattttgaaaagaaaaatacctacatatttataataaattatatctcactatcatatttttagaacctaatttctaaatttgttttaatactctcgtatctcattctcaattttactttttatcttttaatagtaatatttaacatattaatatcatagaaaaatattaaatttgtaacaaaactattattataagacaaacgcaatcactaataataataaaaaaaatattataataaaactattagaattttaccttagaactgaaattgccaccaataccaatcgaaaattccaccaccgtaatcccaagaaactcacaataaaaataataataaaatttaagagaccaaaaataatacattgtacctcaataaaattattaaagattaaatttttacattgataaacgttgagatttaatatttttatgtctaaattcgtttgtcaaagctacaaccagcacactcactttgtgctgacaagactaaatattattattctaatactattaatatctttttgggtgttgaaaatgataaattttgcaaaaacatgaaagaaaattgtggataaattagaatttagggctgaatgggcggtggttggtgaagattttagttgggtattttttgaggagatggatgttggaggatacgaagtgattcattggggtttactgaaggaattttaaggtcatatgaagtcggttattatgtaataatctgctccataggagcacatatacacatgttccctatggagtcggttattacataataaccgactccgtaggtccttcaaaaatacatgtgtcctctataaagtcggttatttcataataagtatctccatagactttttcatgag

SEQ ID NO: 86241 - DNA, 646 bp, Cannabis sativa
tgaagaaacgaaagagatcgtataagactaatacaatctgaaacaattaaaccaagaggataaataactaaataacttgaattaatcgtggacaaacacactgatttggcacttataaagtattgaaaataagaatgagtgtaaaattacctctaattagaggtcattaattcttactatttttttaattaaggttttaatgcaaatttttattaactaaataaataatatgttttgcaataaatatattacagaattaaatgataattaataacaccagatattttacgtgattttgtagttaaaatttatatactccacgagtccttattatttaaaatattttctgggatacagaatacaaatcttaatatttaaaataataggatttctgtctattttttgatgtcccttttctcatggattctgcctctatttataagaataggtaggtagttattttatttgggactaattcatctataactagtaatgaaatgtggtcattccccatgttttatttattcacaaagggataatatctaataactacccaatcactccttatatttatccattagacggttatgctgactaggaagattgcatctcgtcaaacatgagttctccttcttatctatcttaa

SEQ ID NO: 86242 - DNA, 691 bp, Cannabis sativa
cttcaatatctaaaaattagtgataagtgatattttaaaattattattttgtaatgttgattctttttattttattgtttttttaattttttttattttgatttaaaaaatatactattaataatattaataatatattttctttcaaaataattaattttttgaaaaaaataaatatatctcttacgcacaagtgtcctaactagtataaataaacatgtcattcaggcatatgttcaattcactagtcacaaatgttttggtgtgggttgttttcactatcaccaaatacttcaattatcaaacaattttagtaaaagtttcagcaacacatcgaataagaatataacaaagttcaaactaacaaagtttcgacgacacaataatacaataaatatacaacaaacgaattccagccccatctttcagcaagctcttcaagattcaataattttaaatgtacttgttaagctatcttatgcgagacaattatactttgaaaaaaaaaatagaattaacaataataaataagttattcgcctgaatcaaaacctcataaaagtagaaatctccgaaatgcactcttctgccaaactcccagttgaaccaaagttctatttactcaatttatatctcatcatagctacacaattacatatttatagtgattcacactctgtagaaattacta

SEQ ID NO: 86243 - DNA, 1209 bp, Cannabis sativa
  modified_base (73)..(74): a, c, t, g, unknown or other
  modified_base (1112)..(1144): a, c, t, g, unknown or other
ctaaatcacatcgataacaacataaataagtgactcgctaaatcacaaccgggacttaggttttaaaccaaanncctatctacagcaactaaatatggaaatactctaaactagtagggaataaccaactaaaaacttgaaactagcacgaaacgacgagctgaatttttgggataccctgctacaaaattcgggtaaccggttttaccaagaaaacccaaaaacaatcaaagccaaaccaaatcgtttccaaacccaaccaaacttttcagacctgcatattataacccaacgaaccatttccaagcaacaaaacaactacccaagcttagaattgaaaaacaccattaatgagccaagcttgagttcaaaaagtcaaagcttgctcaatctacactacaggccctaaaaccgcttcaaatcaacacatacgaacatattttaacttcagaaacaaacttcaaacaacaaaaacaacaacaacaactaaaactttaattcatgcaaaaccattttcttaaaaaagtcaagaaaacaagagtagaggtttaaaggattatacctttgcttgatatcacaatcaactagatgagaattactagaattactgagagaaattcccaaccctagcagccctagaaatttcgagagagagagaggaaggaaagagagagagagaattgcttccttttccaattttcttattttttgtaaaaaatgaaataaaaacttgttttattaaatatctcagccaattaattaataaaaatctgattattacattaacataaagtccactaaaggacaaaaatacaaatgggcaaaaagatcattttgcccttgccacactaaaagtcataaaatggcattaaggggtactttgagaaattctaaaatcctgagtattcctgacattctcaatgtctaattttattgtcctgctatactaaaaatacttggatgtgattctaatagccaaacaccacgttccaatgttgccgggcacaaaacatgcaaaattatgaaatttctgtatataacttataaaatacattctgaattcaaataaatcatcataaacaagtaattcaatactaataaataattttcannnnnnnnnnnnnnnnnnnnnnnnnnnnnnnnnttaaagctaagcggtctttacacgatctttacacgtgtctgtagggttttatgccctaaataaaa

SEQ ID NO: 86244 - DNA, 790 bp, Cannabis sativa
taatgcaaaaagtaaatgtaacttgttatggaatacatttgcatgaggtcaatactttgtttatatttattcagaaaaaaaaaacaaaatctttgtttataattataccacttgtggtcgatttggtcaaaacccaaaatcattaaataaggtatttgccttagttgatttcttgtggcctaatctgatttagatatagattaatgagagtgttgtacgtacgcttcccataatctggtcaatatgtcacacgtttaaccgttcaaccaaattcttgttggtaatgtaaagcaatcagtatgaaatttcaactactacagttaatggtacagcaaaataaaatctggtgtatgccatcgttttttttttttggaaagaatctatacttggtggcatttcaattacgtattttgcttcaaagctgagtaattaataatactttgtatcgtgtcactttattcttcctcatatggaaccaaatcatttctctctgtattaatgatgaagagaattggtgatatgatgagatcacttttggtgtaaaaggagtgttatcgttaattttttattataattttttagttaatttttgtgcttgaaaataaatgttgatttttttttattttttttatagcagtatttgttatgcttacaacatcatccctgtaaatttttgaaaaatttcgaatagtttgccgtattaaaaatataattgaagttttttgaacacgcgtagtaaactagaatattaataattctattttcggcattgtaaactatttagaatttt

SEQ ID NO: 86245 - DNA, 984 bp, Cannabis sativa
tgctgattattctctgttcacttttgctaagggtgcaattcaaattaatgttttggtgtatgtagacgatcttattatttctggaaatgattccgctgctttatcactttttaagacctatttgagcacttgtttccatatgaaggatcttggggtccttaaatattttctcggtattgaggtggcacgtagtcctaagggtatttttctttgtcaaagaaaatattctcttgacatcatctctaagactagccttttgggtgccaagcccgtgtcctttccgattgaacaaaatcatcgtcttgctcatgctactggggatcctttgtctttcccagagtcttataggcgcttgattggttgcctaatttacttgtgggtcactcgtcctgatttggcatactctatacatattctatcataatttttccaagaaccaaggcaagaacattgggaggcagctttgcgagtggttcactatttgaagggctctcttggacaaggcatcatattacgaactgacaactctctttctctatcaggatggtgtgattcagattgggcagcatgtcctcttactcatcgttcactcactggtcggtttgtgtttcttggacattatccgatatccgaataccgctctatggcttctcttacatgtgagttaaaatggttgaagggtcttctcttcagtttgggtattcaacatactgctgctattggtctatattgtgacagtcaatcggctttacatattgctcagaatcccgtttttcatgaacgaacaaagcacattgaagcagattatcattttattcgtgatgctatccaggatggtaccattcttccttcttatgtttctacttcagttcagttggccgatatttttataaagcctttgggtacaagacaatttgagtttcttctcaccaagttatgctccaacttgaggggggtattaggatattctcatatattttcata

SEQ ID NO: 86246 - DNA, 750 bp, Cannabis sativa
  modified_base (424)..(432): a, c, t, g, unknown or other
tggtgcactagattttgcttatccagttctgattttgtctcgagcgctcatctagtttttcatggtaaatgagagttatgaactcagacaagtcaagtttacaacttcatattgtcactttttcggcaaagtgacttagtcgcaaatcgggcagttttgagtctctcaattttgcaaaacagcaacatctctgagagctggtgaaagactttacaataacacagaaacaagttaagtgatgtctaaatatcactttggcattaaaacgtacaccttcaacaaattttttccttggcctaacatctaggttgacgtcatatgtcaacctgggcgttgggagcagaaaaaccttcagtagaacgatcataacttactcaatattgatttgattgatgcaatttaacttgcattttgaagctatttnnnnnnnnnatcaagtcatgtctcacactccaatcaaaattctaaagttttcaactccaaattttatcctcaagagagattctacaacttacccgaagtgggtcccatggacgcggctcaagcttcaaaaattgacgcacgaccttcagagtcaatttcaccattagagcattataatggtcaaaactaacctaaatttatttttccatatttttttaaaatattttaatattatatatatgctaaaatgggatgaaactcactttttaattataaataattcatgtgaatagtaagtttcccatgttgtgtcaagttcgcattgaa

SEQ ID NO: 86247 - DNA, 676 bp, Cannabis sativa
  modified_base (229)..(234): a, c, t, g, unknown or other
  modified_base (463)..(467): a, c, t, g, unknown or other
tgtgtttttttcttaatttattgtatttctataatattgtgtattttataaattttagacaataatagcgtgttacatatttcatagtgtacgcatatttttcttttatccacaaatgtaataaagaatgttttacaaagtaatttattggtaacatttttattttttaaatttttaatcaaaaaataaaagtaaatttttttctgtaaccatttttattttttaattnnnnnnataaaaaataaaagtgtgttctatgatgatcattttcgtttttattttttaattttatttaaatcgagtctaggtgcacggtcgaattcaaattcgggtcagaggtcgggtaccgtggggagggatttttgggttcgggtttggtcggaacttaaaatattgattaagaaaaaaaagctgttttaaaaaaatattgaaattgaccttttttgtttttaaaattttaatnnnnnattaaaaaattaaaaagtaaaaacaattttatagaacatatttttaaaaaatatttttttttatttttctaattttaaaaataaaaaattaatttaacaaatattatcaaacacctctaatatatcttcttatggaaataattatgaattttatttacccgcatggtcgacatacccataatatagatgataatatataatgagcaatt

SEQ ID NO: 86248 - DNA, 589 bp, Cannabis sativa
cattccctgtgccgattgacatctgagtagtaggatttcgatttgttggtggtggagtgagaggagactgagattgtttggtggacatggaggagatctggtatccgctctgataccaagattgaaaacaaagtaattgtatttctcagctcaaattgagtctgagtattgagatttcattatatagcataaagtaattacaagataaccatttagacactgccacttggcattacagaaaactaggcataacaaactttataacaagagaatattctgaaatttgagagagatgacagctaatcatttggcaatgattgagtactgctgttgtaccagaaatacaatgcaccagttacataatattcctaacaaccctaacccaaaactagaccctggtcggggtccaggatctgggtccgagtgcaagctggggtctggggtccaggttggggttcgaggtctggggtcggggtcggggtccgggtctgggtccaagtttgggtccaagtctaagtccgagttggggtataggtttgggatctggggtccggagtccgcatccgctgtttgggggtattagggtcgg

SEQ ID NO: 86249 - DNA, 2702 bp, Cannabis sativa
  modified_base (1475)..(1481): a, c, t, g, unknown or other
taaaccataaacatgtaaaatacatgtttacataaatcacttcaaaattctaaattgataactaatcggattgtaatgggttttatttagagcacaaaacccaacatcaagagtgtgcggaatttagtttaatgcctcagaagtggtaattcttagtggctaagaaacgataggataatcattaataaaaattattattaatatattatattattattaacgtttatatatatataagttaagttatatataaaacttacaaaaagaaaagaaaatgaacgaactttcattctccaacgaaacccttacctccccttactcattttctttgaatttcaacccgaaacctagcgatctaagctctggtagtggcaggatagtgaattctcggagcgggaaagcttaaggtaaagtttaactccattttaagtttaaaacaattggtttcgtaaaggggttttgcgaattagaatagttatgaaggttctgaccttgtaggattgttctcgggtagtcatgggactagcagctggtttagggttgttgggtgatggatgctcaagtttgagtttgaaaactcaagcttggttcatccatggcatgttttgattatgtatgtttttttttatttttgtttattgggatatattgtggaagggtattgtaggtgttctggaaaatttggttgcatttggacatgttttgagcaggtttggaattgtttggggaaacctggtgcaaatcggttaacctattttccaggacctgtaaaatcagttaatcaattttggcagattccccgaacaattcattttcctcgattcatgtccatttcagtaccttggttggatgatttcctgtttcctagggtattgtagttctaattagtaatagcagaaccttaggttggaggtttgggtttcccggattagggttttggtgtgttatttatccagttttattatgtgattagggcatccatccagcacgagactttccgttcaggtcggccaactcacttgaactcggaaacgaggtaagaatagtgtagaacatgtgatatatatatgtgcgaatgtatgtatgtgtgaaatatatgtgcatgcttgttatgattcctacactaacaacacttgtacaaaaatggtacagtttgcactggtatagtgtatattgtttaaaaagtacattacgttgttaccagcacaagtacgggaaagtacagggtgtgtgtggtatatcactaagtggtactcagggtacgaaacaaaccctaccaacagtcgtacaatattagtatgaagtgtatgtggtacagtggttgtaccctagtatggaacgttcttactcatttgttaagccttgtacataggtgtatgggtgcctagatacaggtcgatattatgtgatatgttatatggttttccaactaagtctgtcaactcacagttttactttcatgtgtaggtaaaggnnnnnnnaaggctgaacaggagtgagcttgaactaggatgatgttgtacatgtcatggcggcgcgacctggagtgttcggtctcgggaaatctggggttttcattttgtatttggaatattttgtaaaatgtttaaataatggaatcccgacacttgtaaatatttatataaaatttataaagtttcacaattaattctaaaagttttaatttgacacgattttcaagaaaaaaaatttattagtaaagatagtgcttcgattgaaaaattactatagcgtgccttagtgttagggcgttacaattttggtatcaaagccgctaggtttgtctatcgaagatcgccaagacatggacaatcatcattagtgaaaagctcggctcacggttcaataagtctgttcttgtttagtattgtatatgattattaaagcatgttaggaagcagattagtttatggttaattattttattgcattgccttaaaatccataagagcggtattaagttttgtgatcgttgtctgacctacctggcttatggattcgcagtctaagtcctgttaaatggactcccaatgaaatacaaggagtcagggaaatagggttgagaccggaggcggtcaggcaaatcaaattctgcagaatcctcgtggtcgcagcagaggccgtggcatgtttcagggtgatcgacacgtgaatccaccacaagctcctgcgaattgggagcagagattggcagaaaggcaagatcatatctgccagcaagatgaagaaattttaaggttaaggcagtagggacctcctgcggtgcctccaccgcaagctcaggttgttttagttcctgcggtgcgagcaaaataacttgttgctagcaaccgtatggagccgctatatgagaggtttcgcaagcaagcacctccagtgttctagggaggcccggatgtgatgaaggctcaggagtggctcacggtgatagaaataattttgaatttcatgggggtcattggaaatgatcgggtgacctgtgctacttttcagttccaggaagatgcccttgtctggtgggaattggtgtccctcacctgagacatcactattatgacctgggaggagttctgagatttattcaatgccatgtattataatgaggcagtctgcagtggtaagcgaaaagaatttatagaattggtgtagtgtaacgccctaatgctaaggcacgctacagt

SEQ ID NO: 86250 - DNA, 686 bp, Cannabis sativa
ttgctggtagatgaatgcaaaaatgttcttaattgtttgtcgaatgtctctattgtttttgttaaacgttcagcgaatcgtgctgcgcattttgttgcccggcactttgtttctctagctgatcgtatgttccctattaacagtgttccttcagacttattgtttattcttgcgagcgattgctcgatttaataaagagcacttattcaaaaaaaaaaaattataacactagtgaacataaatataatataatagccttttttataacacttgtgacttaccttttgtcagacaagtagaattaaaaggagagctattatattatatataaaaatttcaaaattttcttagtttttctcctcaaaatttcgtgctctttaatattgagtgattgctcacacatatcaaaataatactcagaacagtgaggaaggttgtgttgctcgtttgtcgtctgaaggagaatccagattcagatcttgatcatactagatctgcgacagaaaggatcaaggattagaaatctgaacggatagaaaaaaatcatttcactgtaatcaatataaggttttcttaactttatatgtgtttatttatcattttaggattgctcatatttaggatgttaaattatagtttataatcaaacatgcatgaatagtaatactacaaaaaatcttattttt

SEQ ID NO: 86251 - DNA, 603 bp, Cannabis sativa
tgatcttattgcagacaaggaggatttgttcatgggagatacatagcacataacatattggtttgccaggatttagtcagattatatggaaggaaaaattgcaagcctagttgcatgatcaagattgatctaaggaaggcatatgatactattgattgggactttttggaggagatgttaactgctttggagtttcctatgcaattcatacacttaattatgaattgcattaggactcctaagttttctcttctccttaatggctccatgtgtgggttttttgaagcaaaaagagggttacgacaaggagatcccatgtcccctcttctttgtgttcttggcatggaatatttgtctcggatatttaggaagattggggaatggccaagtttcaagttccataatagatgttcatctctcaaattgaaccacctctgctttgctgatgatttgttggtcttttgccatggggatttcatttcaacaatgcttatgcttaaaggtctaaagctattctcttcaacatccggtttggaaccaaatgttcagaagacttcagtgtattgctctgggatgcctgaattggaggtgcaaaggatttta

SEQ ID NO: 86252 - DNA, 632 bp, Cannabis sativa
cttacatttttgttataggacaaagggagtgactcttccaatgatgacggtggcagtgataatgaagaagatattgattcagagagcaatgaagaagcaggtgataatgaagaggaagatgttgaaggtgtagatttggatgaaggtagtggtgatgaggaggaggagggtagtgacgcagaggaaaaatatgaggatcataatgaagattccaagtccaaacgaaaagatgataagggcagtgatgatgaatgcgataatagttagaagaaggtagataattagacaatgtaactaggttttagttacttttaatgttttattttgttgtaattccatttggttcatggattagtattttcatgttgttgttatgttgttttatcttttggagtcttttttctgtattaatttgccactaatattcatactcttactatgtatttcttatatttttgtaatagttatattattgattattgtgtttgcatttaatcatgttctatattttttttcttactgtttgttttttcttattttttaatttatttaaagttgtttttaggttttctaaatctttcaaaaaaataataactttgttttttttccttttttgtttgtattttattatt

SEQ ID NO: 86253 - DNA, 2769 bp, Cannabis sativa
cataaaacccaacagttatttgttcagaatgttttttatgttctccataagtcattttatttctctctgtccatattgcccacgaaataataatcagtctttcaaaagaatttttctccacaatttcagatgcataaagtattatctgcttaaaagataaatctttcttagccaggtgaaggaaatagtaatctaataaaatctaaattttttgagcccaacaacactaaaaaattgcatgtgaatttgaattacccccataaacaacaaataggacaattattatgcggaacaaccttacgctgaaataagccattactcgagggtaaaatctcatggaaacctcaccatgcaaaatgtaaaattttctacagaattttgaaaccccgaaatttcctccaccatattgagaacacctcactagaagaaggcaaccctttataattggtcattgccaaattataatcacttttgactgaatagttgccatgttccgtgtaatgcaaactagttatcctcatgctcaaagggacttaatgggatcgataagatgagttcgacattaggtgaattgaaatcactcttaattttgcaaatgtcccaacctcctaaaggatcaatgagtattgaaattgtgatcacattaaaggagagtttggaactggaaagaaaagatggcgatcgtggtaaccaaggatcattaaatacccttgtagaaatactgttaccaatacatcgccttaatcctttcagtaacaaatctcttccccatacaatctctctccatgacatgaatagataatcactctcacttgcctccaaaatagaagagtctctaacatataataaagaagacgatttaattacaattttccatgcttgttttgctagaagggctgattatattgattgaaccttcgaaaaccaaatccaccatcactcttggatcgacacaatttatgccaagctctccaatggatactcgctcctgtattcaatgaacccaccaatatcagtctatcaaactttcaatctcttcatttagcccttctagaattcagaaacatgacaccaaatatgttagcattgcttggaatactgctttttactaaaatctctttatccccttgcaagaacagctttatttgataatcatgtagtcgaagataagggtaacaccacacaacactacgagacaccgaaatagcatatttaactaagatttgagcttcctcgttaatagatttgaaacaatgaataaaatgagcatcctaaaaactagaaagactaataaaattatcttgcaaaaccaggcctaaagaatattattaatcttctgcaatatcgtgttcaaaagtagcatcaacaaaccatgttgcagtacagttcctaatataaagcatccctagccaccattccaaggccacatgaaccattatcagcattaagagcagaatccgtattaatcttaataacactaagtcaattgccctcgatcggaaggcactgccacccctccaaacacccaaggcggcattgaagactcttgctcgaaataccctaagaaattgagagccacattatcatgcaccttttcttttcttcgatgccaaatacgctacatcactactaggataatctcaaattacacttattattattgaaaggaattatggattttttttttatgttgctaatctatataattttatgtttttcatatttttgatatttaaatagatttaattttattttttttgtaccatggcgatggtgtacaatataattatttaaaaagtcttataaaaatttgatgcaccaaaaataaaattcaaataattagttgtaggtgtcaatattcatttaagaagcacaatattcttgcaaataattctcttttcttcatcagtttcagcttattctttataatgtcatattgtatgagttttgatgaaatgaaattagtggtatgtagaaaaatctatgagaaaaaaaaaacaaaaaagataaaataattgaaagtgaacaaaaattaattaattaaataattaaatacaataatatggatcccaaaaaagaatacaaaatttagaaagaagattattatgagtatgaagatgaattaatggaaaggaaggaaggatcaatcccaaggactcaaagagcattcctcaggcaaagttgggaaacgttctttatctttgcaataatcataaataacaaggttcctctggacccaagcatagtcgagtttttgtgaatcggataagtgccaagctgggtattggtcccaccaattttttgttgtggtggacacacaagcagggaatgggtcctcccactggcatgcatctacgctgaattccttataagacgaaacgaatggggccttcttccagtccgttttctcaagcccacctcttgtggcccaatcatcagcattccatatgcttgagaacaagtacatgggctttgaatctgggaaaaaattgttctctttaccattgttcttgaaaactctcacagcaattttatccacaaagaacctgtagttttccataagtatatgtagactttcataaatactcaaaaataaaaaaattatttataaaaatactagttttctcttatatatttttttttatggattttaacagtttttttttttaacaaaaatatagataattatgttttcattattttcacgtttctactacataaaaacaatatgaaaatagtgttttctctgaaaaaatacaagtgaaaaat

SEQ ID NO: 86254 - DNA, 551 bp, Cannabis sativa
gacccaaataagaattgtgaatatcactatgaaatcaaacacaatattaacgagtgcaaatacctaaagatgaaatcaaaaatttgatacaactaggacacctccacgactgagcacgagaccagttaccacacatacaagaaagacacgttgtaggtcaaatacctcaaggatgtatacctcaagctcctagagcacaaattcccttgatagcataaacctcggtgcaaccaagaatgcctctaaattccccttgacctaataggagagtagcgatgatatatagaggattgcatgttgaaggaaggacctacaatgagctaagtaatatgtagaagagttggataatcatgaaaagtatggaaagtgactcaattaccttgcggaatgcctaggctcattgattaacccattaccttcactaaagaggacgtcagaccagtgcacttctcgcataacgattctctagtcattgaagcaccaactacaaacaaaatagtagcccgcaacctgatagagaatggtacttcagcaaacctactattcaagga

SEQ ID NO: 86255 - DNA, 953 bp, Cannabis sativa
  modified_base (927)..(927): a, c, t, g, unknown or other
atgaagtattgatttaaaagctcagtgttccactgccggtcttcagttattagattagctacaaccgcatcatcaggtcccttataaaggaaagggagaaaaaattattaccaggtatccatggatccgtcccacaatgaatattccttccctctcctatcttccatcgcagaccagataaaagcaatttccgaccatataagatcccctgccaagataaagaatgggagtgtccatgagaggcctcttgaaaggagttgaaaggaaagtatcggctctttaaaattctgttgagcatagaggaggggttatcaataagtctccaggcttgtttagcaagtagggcttgattgaattgctcaaaagatcgaaaacccattccaccttcagctttggttttgcagatcatttccagtttctccagtgaatgcaagaaccattttcaattcaaccccaccaaaagtttgacatcatcgattctaaattttgacaaaccattaggggtaagcggaagcagctcatggcaacgttgggattgattttacaaccgctttgagaagtatttctttgcccccagccgagaaaatcttttcattccaagtgttcattaacctccaaacattttcctttacattgctgaacatttgttgctggtctcgcctagagtatgccgataacccaaggtatttttcatgacactccgtgattggcatcgagagcgttctgtggaagaaaatttgggctgctagagttgtatttggagagaatgacatgatcggtttgtcagcgttgagagcttgaccagaagcacggtgataaatgtccaaaacacgcttaatagagaggcatgaactctcattgccatagcagaaaagcaaactatcatcagcaaagagtaagtgtgatatgttgggttttatgccctanataaaactctttacaatctgattagt

SEQ ID NO: 86256 - DNA, 1028 bp, Cannabis sativa
ttcatcaaccatgatatataaatattttctctatagttggtccccacaaacatgtatcatcatctataaataaaacaaacaaggttgtttgatatacatttatgtaactcaattcaccaaaatgaaatatttctacatttctccttccattaaaaaaggaatgaaaatatcttttattggagacaagaagagtcaaatttcattgaaaaatccatatatcacatttcggttcagtcaataaagattatgggtttatatatacacataatacacctatataataaatcctatcgaacagaatttccagaggcttaccagaatatattttaaaaattctggtctattagaagtttatgatgcagtaaatgaaaccatattgatctcctaacttgagattccttgccttagaacggcaagagtataatgtgaaccaagatgagacaccagcacaagacactaaaattgaactttgtttataagtcagctgtttcgtttctatggtgttcctaactttgtttcgggactccaagagagaaacttttgtctatgtttgctctatattttaacatatgtaagattttttattggaaaatgttaggaaggttaaaagtagttttctattatgtaatatatttaccaagttcttgatttgttttagacactaaacttgtctaaccttcaaatggtataatctgattgtaacattgaaatctagtttactctatttatagtattttaatgattgtaaaataggaaaaaaagaaaagaataaaaacccttcatattttccttttttactttgagaaaatacaactaatttccaagtgattaacaaacataattctattagactacaagttgattacattgaaattgcacatcccagaaaattattttgtccatctttggcacaatgcatcataaacttctaatagaccatttaaccgattattatagtttgttactcattttactaatatgtatgcatcaatagcaggagcactaatggaagggctcaaaacattcca

SEQ ID NO: 86257 - DNA, 608 bp, Cannabis sativa
aataataaactacaagaaatcatcttaaactaaaaatcgctaacaaaaataattcaataaaaatgataacgagaaataaaaactgtaaaccgaccaaaaagaaacaaacaccaagtccgaaacaagatttagaacagaggaagagttagcatactgggactttcgaacataaatgtgacagtgtcacttccatcgtcggccttaatagtgatgatgtcatcatttccggcacacttaagcatcttggacatgttgttgaggttcatacccatggaaagattcctatcgcatcggtagtgctcgaagccctccgatctgagcagcagcgctaccaaggccacatggctcgaatccatggcctggagagagaacccggtcgccgaacaatcgaagttggcatcagtaacgaggtccttgagagcctccatcaccttcttcagtagcgaaccctgaaccaaccgcaactccaacatcttcagacctcactgatttcttcgattgggagattttctcaagttttagggttagggttttaaaatgaagaaaaaaaaatggagggaaagtgtgaatgggttggttcggtcggttcggatcggattttattatgt

SEQ ID NO: 86258 - DNA, 600 bp, Cannabis sativa
aaactaagaaaaagggaaactaaagaaaaaaagaatgttgattacaattcatggtaataaataaaaaatttggacatctacataattattaatatttataacatataattaatagtagtcgtaaaattatcttcttttttttgtaaatgagccgctattgcacttctccaaactttacaaaagtgggactttacaatacaaaggcttataacaaactccaaacaaacacaatctcagttaatagactatgaaaccaactcattttatttacattgattcctttcaacccactataaaaaattctattgtacatcaattttaatttttttttgaaagtaaactcaatcatacacacccaaccctcccaataagctacattccgcgcacgccatgtgttgtaactttatgaaattttacaaaataaaaagtaaaatgtgtgagtgaatggagtctcaaaaacgattttttttagagattgtcagctaaaacaattaagtaattatttaaaattgttggaaaaaattagtattctccatagtttataatagtgcctaaaaaattagacgacgtttttcattagaaatacaaaaaaaaaaaaaa

SEQ ID NO: 86259 - DNA, 1048 bp, Cannabis sativa
ttttttttttcttttctttccaaaattaatataaacaaaacaataataataaattaagatactttcaacaaagcaataataatacaacaaaaataataatcaaaagattaagttcacttggatatgaatctacataaacaagtaggtacaagtcaaaattcaaattatttgataataaattataggagtttttagaccacagaaatttttaattttttttaactgtagggtggaatttttttaaaaatacttatactgtgtactgtgttatgttttttatggttgttctacagttgttttttaattgtcccactgttgttttaattgttctgttttgttttagttgtgtgatagtaaaattgtaaatttttacttaaaattcaatatttttgtaaaaactcctaaattaaactaacaaatagagagaacatttgggttgggcttgaaaagagataaaaataatattaggctaaattcaataattgccaatacatttacattgtataccacttcactttactcactaaaataaataaatgaactaacttttgagttaggaattggacaaagaattgttctgttactttctttattcatgtgaagtttgaagtgtaaacgtgcctttcttttggccttggtgaatatttataagaaattaagacttaaacatatgctctcaagtggttttctaatgatcactgcactttttagtgtaatgatgtagttaggcatcgacttgaaaattactatcacgaattgagattcaacgtgatatgttttgcactaaaattttggggatttaaaaaaatttaacatgccgtaaaatagaactcaaactatttgttacacacaagacttttatttatacgctttttaatcttattttcggcgtgttaaattttataatttttttaaaattttaacgaatgttcttaataactacaacatagacaataagaaaaaaaaaattggacttaaaaattctctcaaatatcaaaatagatagagatacatcagtggaccgtttttaaggcattccatggtagaa

SEQ ID NO: 86260 - DNA, 2637 bp, Cannabis sativa
accaaacagagcatctcttacttctaaagaagctttcttttctcaagagataatgaaatgaaatgtttactcaagcacaaggctatatagctatagactttagcaatatccctatcacgtggcatactacccaaatgagtcgtccttaaactacaagacacagtagcataacaaaaatcctaggattcaaagatcgcaaaagatgaaaaaaaaatgggtttttgatcaactataaaataaaattgaataatcaatagaaagtccaaaattcgaagagcatagaatacaaaagagaccgcaactaaccttgatctgaagatcaccgcagcaggccccgaacatatcaagcagtcgagtaccgttaacggattacaaacaccatacctgagatttgtaggggacgatcatggtcgggatcctttttttatcaagcagtcgagtgcccttaacggattacagacaccataccggagatttgtaggggacgatcatggtcggggcccttttttccagaaatggatggatcgggctcttttgttgtgccaaaattaaataacagaaatattcaaaagaaaaaaaaaatacgaatgacataattgccacagccggtggccaattttaagtattttattacccctcatcgactgttcgaatctaagccattgcattccaaaaattatccattctataacctccaagggttaataccctttagaggttttaaaaacctcaaaccaaactgaggttttacataaaaggccataaatattattattatttagatgaaatagcaatttcattaaatttaatattcacaatacaaaatattcaacatagtagctggagtgttagactcataaatgctattgttatcccaatttctgtacaaagtgatgtggcatctatttgtgtgacacgtggagaggatttcataacttggacgggcattttgattcatgatgtaccgtccatggtgatttatgacacaagcaactagtttgcagtcagctcacatgtaccgaccagagaaaatgcagctggaatatcttcaaggatactctccctaaatgttcaagcaatataagtctcgatcaagtccatgattttgtggagtgacaacccttctggctgggttcacttcaggtgcgcaagaaactagaaccaccaatacctaggctaagcaaactgctcctagtactaaaaatccgtctattggagatcctcaaaggacaattggtgatgacaccaaactgcaaaatttgtgagccgctctagagcaggtgcaagagcataccaacactcttcaccactattagcatgtaaattttgctttcgaatagtagagacgccaattccaagaatggatggatcaataaatggaaatcatgagagcccagcaagaggtaattgacaaccgttccaggaaggctaccgtgttgattaggcaaacctatcagataactagacagcaatcagtgataaatactttgattatacaggattcgaacaaaaggatagatgtctatatccccactgaacctcagtacgagccataagaacgtctagctagaaacaatcagctaacccaaggaaatgagctatccaatctaaagtcacagagtcaaattgtgggtcgttatgttagacgagcaagttttgcatgttcattacttagggaatgatcagcataatatccgtcctcaaacggatatactcaaccaatccattgctaataatagttagacaagaaacgattaactagtttcctaggcataccaggaaaatcaattaaccagattccaaactggttaattagttttcctagaataccagaaaactcgagttttcaaactcaagttgccccaaaccttccagaatagttcaaagataagttctaaacataacctaccattcagaaactaaaaatacccaaagaataaagattcaccatgggagagccaagctttgagctcaaaagctccaagctttctctttcaaaacaagacaacaaccccacaacctcaaacaacttaaaaaccaagttcaaatagccaacaaaactattccaaactaaacaaaataccccagacccaaaatcacaatattcccacaaaaatttctaattaaaagtcttagtttcaccaagagattcaagaaaacttaccccaatctttgaaaagctcctaaggttgatcaaaagatagaaattgaagaataattggatgagaatgtctgagttttcgagctggttctcccctgttttgtttgggctaaacatagaagaagaaagagagaaggagatgaagttttggtgttgtcttgatttttttagagaattctattctatccctagtattaatctataataatactaataataagaaatgataataataaagaattattccattaaaaattattttaacttaaaccttgacaaattatcaattttccctacccacactaaaacctctaactcaaactttaggtgtaaattgatcatctatatatctatataattgtgatgttggagtaggtgatgtggcgctctgatctttcttctttgtatattatctattttttccattttctaagtttttttatttatttatattcttttcaacattaatatagagc

SEQ ID NO: 86261 - DNA, 1031 bp, Cannabis sativa
attatttgtcataccagtttgttgtcccgcaagtaagttgagtagttgttggtactgaacagcactcaattgaggcaaaagagcttgattatcaccaggaggcttgttttcgttgctggtttgaaattggttgacagcagaatctttgttatttttgccatacccaggagggtatccataaattttgtagcacttctcaatggtatgtccaagaatgttgcaatgagtgcaaaaaggcctattatttctaggaggtttatttccttgggtatctttcttattgctactggttttatcaccttggaaagcaaaggcaagttgctggttttgttcagtattgctgctggtatggcccttctggttttcttcctgagtaactaagtggaagaccctgttaacttcgggtaaaggctccattaagagaatgctacttctgacttgggaaaaagagtcagatagacccataaggaaggacatgatgtattccatatggtggtgttcttgaaatttcttaacaccaccacaagtacatccattacaaacacaagtaggtctataattggacaattgctcccatatagtttttaattttgtgaaatacatgctaacagattgattttcttgtttcagattcatcaatccttttagcaaattgtatatatggggtccatttctttgttgaaatctgatcttaagatcaatccaaatggctgcagctgattcatcatacaatatgctagaagaaatttctttggacacagaatttaatatccaagaaataacaatattgttgtttctaagccaagcattatacatgacagaatcagaaggcatgggtttagggattgtaccatctaagaatccgagtttgttcttaactgaaatggctaattgcatagctctactccaagacatgtagttgtcttgtcccgtgagaagctgagatacaagaacattgcccggattgtctccatggtgaagatagtaagggtctgtggggtcttcaagaggattcctctgttgagtcattt

SEQ ID NO: 86262 - DNA, 663 bp, Cannabis sativa
atatttaaaaaaaataaaaaattagaaaaaacaattttaaatattttttttctttttctttttttgtttttttcttttctttttgttttttttctattcttctcctttttcaataccctaaaattaattattattcttaaattttttttcttcttccttcttcaaccttatcactctaatcattatcaccttaaccactacatcaccaccattaacaccaccaccgtcacaccacagccaccactaccaccacactaccaatagcaccaccaataccaccaccactctatcattaccaccaccattaaccttttccctaattaaaaaaagcccacagatccaaatctaaaaaatagagaaagtggtgctaatcgtttaggttttaagaaccattttaatacatcaatactaatactataatcacaataatcacaacaacccttttcctgaactacaaagaacaattttaagaaagtgttgctaatcgtttggcgcctccattgcgacgacagagacaccataaaaaatcttttgctctcttgtgatctcaacgaagacgctatcaacctagtggagatcgatgttaattctttcgtcctcaacgacgagttcaatgcccaccggcttcaacgattgaagggctgagatggggccttttggctc

SEQ ID NO: 86263 - DNA, 1512 bp, Cannabis sativa
ttgagctttagagctcaaactttggtctctaatggtgctttgagtttctgtggttgattcttgtttttactacctggagtatgtttgttgtgatctaattaggaggtctggcaggtttggtggcatttggaattgatttgaggtgttggtggtgttttgggtgtttcctgcactgaaccggttgagtgggacctgtaggaatcgaaatttgggttggtccctaggaaaccccacggaactggacttccggttagggaacctgtctaccggttgggaaagtttagggaactctagttttcccatttttgctatatttagggtattgccatgttgtctatcgataggaaaacttctagtttcaattttaagtcctgaaaaagtgaattagcgtgtcactcatcagttttacgaatattgtgatttaggggcatgtaaatcgtcgaggagcgattccacttaggttgatcgacacacctgaactaaaaaatgaggtaagattagtataatgatatgcatatgtatatacatatttaacgtacatatttattaagcctattacattatattgatagcggtatcagtatacgtagagttgtactggataccaatagatgtatgtttggctcaagtacaagatcaactctatcacatcggtagactatatgactagagtaccgagtataggctgatcttatggtcaatagtattgtcgtataaaaattctagactcagtactgtgttggacatggggatatggttatagttgggtgtatgggcacctaattataatccaggatatatatatatatgattatcattatgcttttaatactgagtctgtcgactcacagatattgtttacatgtgtatgtaagggcaaggctaaggttgagcaaccctgagagcgagcagatgaagattgtacatgtcagggcggttagacgtggagcgtacaatctttgggaaagctggttacattttgtatagtcgctaggcgacacttttgtattacatactttgtaactgttgtagatattttatacttgggagcccacttatatatatatatgttatttatttgatatttataagtgtttaagcaaaagctttaattactcacaatttttaataaactcattgattagcaacgagctgcaaagttaatataaaatcacgataacacacctaaactagtagggtgttactgtttaatgttatcttaatttttacctacatgatgtggcatgctcacgtgggcgagattaatgccacgtgaattacaacttgttaacaagaaagtcaactcatcgtacacaacatgtcagttgataagaagtctaaatacttaagtgtgacgaagagacaatgaactaaccacctagaggggtctatcctgatcccctagtcggccctatggccagcatgcgtttgccagcctccagcaaaggaagggccagccagcctatatcctggcacgtacttggccgaccagcttgcaccctggcaggcact

SEQ ID NO: 86264 - DNA, 1023 bp, Cannabis sativa
catggtgcttgagatcgaagaaggacaaatatacagtgacaagaacatactgaaaacaacaatcggattctatgcaatgataaagaactttcaaatcacaacgaagagatccgaactgagggaatacatggttacatgtgttgacgaaaattgtaactggtttctgcgcgcttcaaagttgaaacaaacacaaacattcaagattagaaaatatgtcaacaaccacacctgctcattggatgtcataatggaagatcataggcaagcaacatacaatactattgctcaaatagtaaagaagaaatacgactcaataaacaggaaacatgcaccgaatgacatcatgaaagggccttgcttacatggagtttggggtttcgatgggatatcaaaaggcttggagaataaaagagaaaaggctctagaattgtcaagaggaaagccagaagactcatactagcaactaccaatgtaccttcatatgctaaaaaaaaagcaaatctagcgagacagtaactgaattgattacagacaaaaagaaccaattcaagtacatgttcttagcattgtcaaattcaattagaagatggattcattgcagaccagtgattgtggtaaatgcacattcttgaaaatattatatggagggacgttgtttacaacatcaacaatggatgctaataaccacatattcataatggcatttggaataggagactcaaagaatgattcatcatgggagtggtttttcaacaaacaaagagaaacattcggagaaagagaaggtaagaaactggttcaagcagaaatttacaacaaatacatcatctttagtgtaagattttttctattattgttagacttacttaacataaataaccggtttcaaaaaaagtaacaaagaaaccagttaaaacagacataaactaatatttgacaaatattgacttgcaggcacgacaatcatctcagactagcacaaaagtatagagaaagcagtagcaacagtctacccaaacatat

SEQ ID NO: 86265 - DNA, 650 bp, Cannabis sativa
ctctctctctctctctcacattttctggttgtgtggttgtgtgagttaattggggacgaaaattttgggaagggattggaggtttagggcatgtattctttatctttctaattcttcttcctctacctttgtttgctacagctcccagtttcctatacatttccatagaggttcgttctctctctctctacacccaactcatggtcaccttcaatagctttttgcttttgtttttttttttttttttttgaaattaggttttcgtgttctttttttttttttttgaagaaagaggagaggtcgatgtcttagactgaccaccctctgcaatatattcaatccctcacttatggcggaggaaaaccgattaagacaaagtaaaggagagtttaaaaaccaaaaaactaaaaaacaaaatgcagaaaaataaaagttacagttcataaacaaaattataagaggactctccactctctactcaaatctagaaaagagaggtcttcaaaatgctttgttctgaaaacccatgttgttgtcgagaattttattttgtcccaaaccactactgcagagttctctacatcttcaaaaatcctggtatttctctctagccaaatagcccaaattgttgctaggacagccgtcttcca

SEQ ID NO: 86266 - DNA, 698 bp, Cannabis sativa
ctttgtcacattagattttacttgattttaagccacaaaattaaagccaaaacacttcacattatcaaacgtagttgtatcaatattaaccttgatcatatatcttcttcaggtttggtccattactcatttccatcctcaatttccttagaccttttgacaaaactttattgcaaccaagatgcaaaaataacccaagactatgggtagtctacaaaaagtatatgcaatttaaggatgtattgttgaaatataactcattttgtaaaaatttgctgcaatggtttctgaaaaattatccaaatttatcacaataaaaattaattcaaatttatatcacaatattgcatgaagtaaaatttgtatcacaatcaatatacttatttttatatttatttttatgttatttttaatattttattattaaatttagttattgtaataaattataaacgttttacatttattttttacgagtattgctattggataccaatgtccaacactttttataggtgacatcttacgatttattagcgatattccaaaagttatttttttaaattatataaaattcataattaaattacactaatagcagtataacactaaagaaaataataggtacatgcagtgccttttaacaatttttattttttattattttaatgataaatttattattattttattttttt

SEQ ID NO: 86267 - DNA, 1151 bp, Cannabis sativa
  modified_base (288)..(291): a, c, t, g, unknown or other
gtgcctgcctcacttttttgtaattacttactgatgtcgtccttatgatcgtgtcttcatatataaaatggtttcttgtcgatatatgaattaatagtttgtacatctatgtctcactcaagactattcagtcaacgagctatagatatactgtaccagtccaacatttaatgagttattccattttaatatctttaaatataattattattatgtttgttgattcgtattcttccagtttgacatatgtcttcctctgaagtgccagccaaattttgggtataacannnnccccttaaaaagttctttttaatgaaaagtgattttttaaatgattacggagggtatatctgtcataattctcttttgaaaaaacgcatgtcctctgattttggcagttttgtggttttgaggtgtatcagcatttaatgaccatattttctacttctttttcaaatttgacccattggataaattgtttccctgaaccaacggagattgacccaatagtataaaatgaaaaaaggaaccaccttttcactactttcgccattttagagactctagagatttttcaagcttttttgctgaaaaaccattcccaggtttgccctaaaccttgcatgcaatctttgtcattaatgtttttcctgcgagtttcatccgatttaattttcgacttcaagcattcaaagggatcttcatgtcgttcgttgattcgctgattgcagaggtgttcgtcatccaaaacactaatttcaaacagtaagtgacttttcttcctattttattacatgcttttgatgttgtgtttctgggtttgatttctaatttcttagtgagcacctttgttacctcattcgattttagaacttttaggccagaactgattctgggtaaatattagggtttaggtagaatgtaggtttttttaaaattctccaatttactaacttctgctttgataaatttctttcaggaattgggattgcttcctccttccatcaatgtctcaatctggctcagaagtttatcgtccggaaggattagaaatagagtgtcctactgaactttccgtcccatataaacccagaactctaggacccaaatccaaattagaggtaaataccgaaagaattagagaacactta

SEQ ID NO: 86268 - DNA, 554 bp, Cannabis sativa
ttaaaaaaaataataataataatcagaaagagaagagatagatgtcattattgactaaaattaaggtaaataaatgtataaatactttaacattttaagtttgtaagtggcataaattaaatatttttttaacagcataaataaataataattataattttttttttaattttatttgtagaggttcaattttgaatttattaaaaaaaatttagaggtaactaatactatatatttccaatttagattctggactttatatatatcatatttaagataataacagagtttgtgttgacgaaattagaaaaaaaaaattacaattttataaatattcggtacctattccactaaaaaatcattaagtttatgaagaaatttaacactcgctttctctaaaggtatatttcgtagtgtggagaatttttttttaaaaaaaaatattacaagttaattttcaacacgaataaattgaaaaaaaaaaaaaagtaattagactagtaataacatcttcaacttaggatgttagtaaattttattttgatgaaaattga

SEQ ID NO: 86269 - DNA, 882 bp, Cannabis sativa
  modified_base (213)..(215): a, c, t, g, unknown or other
tttttgcacatattttgtaattaattaaaacaatgtatacaaaattgtaaaatgccctagatacaattagagtagtcaggccaccaaatatagtcatcactaaaagataaagttggcttggccaaagagcgtgcaacgctattagccatcttaggacaaaatttaaaagagataatagtaaaattattttaatttttacttttattttcatannntttaagatatatccacttttataaataatttccctactatatccaagttaatataaattatgtagtaagagtatattgcgcttacattttaatgaaatataatataagattatttttcattaaaaaaaaaaggctaattaagaattttgctccctgaactttgacatgtatcaaatcatgcctcctgaacttttaaggtcgttaaaaatgttacttgaactattaagattgttggatttaagaacttttgtctaattttagtaaaaaagtctaacatagatgaaagttcaggggacatgatttagtacatttcaaagttcgagaggtatgatttgatatatatatatcaaagtttggggagcatagtttagtacataaataatcattgaaatagtaaaattgaatgaaattagacaaaagttcttaaattcaacaatctcaatagttcatgaagtatttttaacgaccttaaaagtttaaaaaagtataatttagtacgtgtcaaagttcagaggtaaaaatcgcctagaaaaaatatatattagtcaacttatcccctagcttacccttaaaactggtgcccacgctgtcttatctttggtggtcggtttttcaattaataatccatcagagtttctaggaaatgggcaaaaaggttcatccacaa

SEQ ID NO: 86270 - DNA, 841 bp, Cannabis sativa
atatatatataaagataataatattttacaaacaaattagtattttcgtgtcttattttttttaataacatgttatagtaatttttaaatatatatttttaggggatttttttatttttacattttaaagtagttttttttcacatttttatggaaatccatatagcaacctacatatcaactaatggagcaatctaaatcacaacttaaatttaaataacaactaccgaaacaactgaaatcataaaaataaaaacaaaaagttaaaaaaatattatatgagatgattcccttctttttattaacaacaatgaaaaaaataaattaaaaggtttattaggaaaaaaaaaactaaaaagttatttttgattttgaatatatgttttacacattttaaaatgatgacattcaaaaataatattgtagttagaaaaaatgataaaagttaaaaattaaaaaaggaaaaaataaataatttgttgttaaaaaaacagaaagggaaaaaaaaaggtcagcaaaagtgacgctgacaatgaattaataatgcagtgcattatttcttattcggtattactaaccttatttttaataattaaaattatttttgttatttttataaataattatctaatcatgtataaatataaaaaatcccaaaaaagaataggaaggagatgaattgatgtttaggaaaaagaagaaagaaatataaaataaaaaataaagtagtgtgtacatacaaagaaagagaaaaagaaataaaaaaaaaagcaaaataataagtacaaacctacgtatataattgttcaagaaactaactatatatttcacaattaattaa

SEQ ID NO: 86271 - DNA, 843 bp, Cannabis sativa
aatatatctttatcaaatatttctctgagacattttgtatttatttttatagccccaaccaagaaaagaactcgtggccaaaatagaagtaaaggcacaagtaaagtagttgcggatacaaaaagtaagttgccagtaacagctagaaagggagaacttcacccggtaggagacaatgcttcaaaattagcatcagaaattggttttatagtaagaaatcatgcacctcttaaatataaagggtggaagaatgtcccaccagaggataaggcacttattcatactcgtattaaggttacttaacttattcaaaaataattttttttctacataattctttttattatttcttttacataacatttatctttcaataaatattgaaattattttaatctatttatgtaggacaaattcaaaattgatccgaaggaagaaagacacatgcatgacgtcattgaacgacattgttcaaatcgttacaaaaattatagaaaccaacttcatgctcattataaagatgttgtcaaagaaggaaaggatccactggctaatcgacctttaaatcatagaatgacggaccaagattggcactggctgtgtgacaatatctttggtaatcctaactggcaggtataatttatactttctatatgtttattaatgatatagtattaacatcatatgatgtcatttatttttactttatttagaaacgttcggttgcggcagctaaaaataaagctaaagtaccatataatcatcgaggcggatcaaaatcttttattcaacatcgaacaaaaggagtaagagtatttacataagaataataatgtttttttt

SEQ ID NO: 86272 - DNA, 839 bp, Cannabis sativa
ttttaagtcaatatcacttagttgagttgatcttagatcaatagatcttcttagatcaatagatcttaatcttgtagatcaatagatcttaatcttgagatggttaggttctagcttaactatattattagtgttcttttacttgttcgttaaagttgaccaaatggattttcccaatacttccatcttagaaacattgtagtataattgagtgggaacgctaattatagatacagaatgtatagcttctataatgatgtagaagtgaaatgatgattttctttgagcttggcttaatttagataaatggaagagctcttattttagcaattatattattttactaatcatttataggtcttaaggataaaatacattgagaggtagaatggtaaatttgtccttactcgttgtaaatcgtctatggaggatctttattatttagactgaaacaatcattaattaatagcgtatctatatttggaatatataaatcattctatgtaatcagtgtaattctgaatctattgtggagttaggagaaattaataagatagagaatttactcggtaaatttcaaaactacttattgggagcttgattatataggcccatgatccccgcactagtaaagataatattggcttgttcactcagttaattggttttagttaatcaattagaactctaaattagactatgtctttgttaacgcagattttcgttaactatatttgagcttaagtaatgataagcgtgcacaaaaattaaaagctggtaaagaaaagataacaacacaaaggtttttacgtagttttgtagttaaaattctacatagt

SEQ ID NO: 86273 - DNA, 541 bp, Cannabis sativa
caagatatcccaagtcaattaggcatgtacgaagcaccattctcctaaggttaaaagagtatcaagcaatgttgcttgatttggaataggtaaggcattcgttgtcccttaaggtgtcgttaaggtctccaatcaaaatcatggcaacttacactgacaaataaagtcaccaattccatcccaaaatgcttctttctcccgtgatgtaggcggaccataggtaccgatgaggatccaaggtgtgtttggaggatcggaagtgatttgagcaataattttatttttgtctgcaacttcaacattacaatccacaccgcgtttccaacacaatacgagacctcccgctgaacccaacagagacatataatacaaattcatgaaatgcaacttagacattaagcaagtaaacttagcttgagagagtctgactttagagagaactaagattttgggatccgactttcgaataagatccttcagttgtcaaattgttgctgtattcctgagtacgcgatagttccaagccatggccctcatttta

SEQ ID NO: 86274 - DNA, 539 bp, Cannabis sativa
tattttattctttaaaatacattattagaatattgaaatgtcactttatttattttattatcttttctccacatcatttaaatattaattttacttttaatatattaaatatgatttatactattttaaatcatgtcttgaaaatgatgaattaagtacataaccgattaagtagtttactcttctacactctctatcttccattccaaagcctccacaccatctctaggccatatccttaacactccattaaccatcattttttggttgatgtgtacttcttgaaatgaattgatgtaatcatcatttaaatgcagacattaattggaattcaataaactttcaaaatcatcatatatagtttgttaatattttttattggagtattgctattagatactatatagtgcataatatcgatgtagtacgttacgagtggttagcagtttcttaatattattaattaaatcaaatgtgtgtgacttgttattaatttgcaccaatagcagtatgatattttttgtagtgtttggcactaa

SEQ ID NO: 86275 - DNA, 566 bp, Cannabis sativa
caacatttgcaaataacatttcaatctgaacgactatttttgtctgtcaaatcaactattttgaagcatacaatagttaataagaataagttcaacatttcttgtttgcagatcccaaacaacaattattttactggaaaacaacttataaacaactgtttacagattaaaaccctgtagcatctaattatatgcattaatatttttttgatgcaatctgttgttgattttttgttcaaatttaccaaatttccttatcattttaattatttcctgttttcctcaatttttaacacattcccaattatgtagaataaaagataggaagaggttcatgaagaaattgtattaccttcaattctttctctgattcaattatgggtgagtttcaatgatttaccgatgtctttctcttcgattcctctcctctgaacgcggtgagtttttttattggaggctttttttgcattttttgtacagcaatggaggttgattacctttttttccccctttttgtatttggatttttcgagttttgattggttttttgttgagatctacatctt

SEQ ID NO: 86276 - DNA, 1087 bp, Cannabis sativa
atatatatatatatcaaaagaagaaaagatggaagtggcctctgtttggattgtcggtggcctaaaagagccctgggctggtaagaagttaggcgagagggaagtcgagaaggagaaaattgaagagacggagaagagagagaagaaagaaaaaaaaaattattttatttaatacttattttaaatttattttaataatttttaataataatataccaattgaaaatcgccacgtggcattcttggaggacttactagaactgttaaaataagtactaacggaaataatagaaattgaggatttgagtacttttgccgccattttttgattttgggtatttaatagcaataaattgaacaaaataggtatttatgctacaaatttacctttaaaatatagtgaagcaataacttttcatttgaatattatttattaatgcatgtattattttattgttcactattataattataactttgaaatttttatagtataattgttccatacattattgtttaaaacataaattttaaattattaaattaatttaaaagttaaattaataataaataataataaaaaaaaattatgtctttacaagggtagcaatttgatcatttataatacgtttgaagcacctcataattatccaaagttatccaagcatatgtgaagaggaagaaatcgagatgatagatactttgccaacatggatgacaccaattgtcaagtatctagtaagtggagaacttcctatagacaaaactaaggcacataaaatcttatactcaatacctcattatacgatggtcgaggggaaattgtacatgagaggttattccatgtctctctaacgatgagtgttaccatcagaagcaaataaaataattagagagatccatgaaggattttgtggagatcatgcaggtttgtagagcctatccaaaaagattatccgtcaagaatattattggccaacaattaataaagacacacatgaattcttcttctttgacttcatcctcagcatttcctgtttctttcttcttggtttgctcgtattatgctaacatctctccagccttg

SEQ ID NO: 86277 - DNA, 758 bp, Cannabis sativa
tgttagttagggtgttacatttcaagagagattactctcaggtgaagaaagaagagcagaagttagagattacactcaagctgatgctgcagcagtctgtttgtggtgacaggtcagcttcttatcaataaatccttgtatactatgttatttgattcgggagctacacgctcatatgtggctacacgggtaattgatcttttggctacgccttgtgattttcttgaaagagggtttagaaccctgatgcctaacggggagttggttatctccattaggtgctttaggtctattccaattaggatcgaggatagggagttgagtgctgaccttatagaattagaattaactgagtttgacatcatactggggatagattttttatccaagtattcggccagtatagactgtaagcggaaaatggtgacttttcagccagaaggtgatgatccatttgtttatgttggatcaattcaggggtcttgaaccccgattattttagtattaaggcctaggaatctaatacacagtggatgtgtaggatttttagcggttgtgattgactccaacagacccgaaacatttgggcctgaggtagtccgggtggctaaagattttcttgatgtatttcctgagcagttgcctggattaccgccacaacgagaaattgactttgtgattagtttgacacctagaggcgaacctatttttaaagatctgtataggatggctccagcagaactcaaggagcttaagtt

SEQ ID NO: 86278 - DNA, 1740 bp, Cannabis sativa
tgtttggctatttaaaagaggggactttcatactttttggcaggcaattagagagtacctaaattagaggaacaaagtgacctagaagacttttcaacagagcttttcaacgatttcttcttatattcttaattgatttgtatcgaattgttgtaatgaacaagagtagctaagcaattattatggtattaatggagattgtttgacatcttttaatggttttaatatgatttgattcttccccaacattcattattaattattttaattgcctggtcatcaattaaatatttatgatatcgatacgagatctgacaagtaagtgtcgattatgctatagtgaaatagagatacattttgatataggacgacgagaggtacctatgtggtttgggtttggataacaaataggatttttgtgtttaatgccttttacatatttcaatttttcatgagtataaaatttagttgtaattaagatttatatatcttaggcgactataaattacttgagtaaacctgctattgcataaaattgataaatagaaattaaattatattatgccatattagatagatacaattaaaattaataaccttaattctaatcattgtccatttttattgtaatttacttattttatgcttttattacttttagttgtaatttctctttaaaagtttaattttttagtacttaacaacaattcttgggttcgacctcaatcgtgtgagtaattacttacaatcgatatgtacacttgcgtgttaaaaatcaacaccaacaaggcattaaatatataaagactttttctctagtttcatcgaaagactctttcaggattataatgaaacttgttgctcactttgatcttcagttacatcagatggatgttaaaacaatgtttctcaatggcgacattgatgagacaatttatgtggagcaatcagaaaactttatgtctggtgaccaaaagaatatggtttgtaaattaaaaaatccatctatatggactcaagcaagcttctcgtcaatggtatcataagtttcatgaagtaattgtctcatttcatttttagatgaatatcattgataattgtgtatatcacaagttcagtgagagtaactacatttttggttttatatgtcgatgacatattgcttgccactaatgatataggctaactacataaaaccaagagatttctttctaatcattttaggatgaaagctcttggtgatgcctcttttattttagaaatttagatacatagagattgttctcgcggtattctcaaattatcacaaaagagctatatcgataaagtactcaaatatttggcatgtaagattgtagaccaggtgatacccctgttgctaaaggagataaattcaatcttagtcaatgtcctaaaagtaaccttgaaagttaggaaatgcaaaagattccctatgaatcagctgttaggagtctaatgtatcttgaggtatgtacatgtccagatattgcgtacactgttaggatattagatagatacttaagcaaccctagtatgcaccactagatagcagcaaagagggttatgaggtatcttcaaagaacaaaagactacattctcacatacagaaagtcagatattttgtgattgtagactattctcattttgatttcgttggatgccaagataacagaaggtcgacatcaggctacatttttctgttagttggaggagctatat

SEQ ID NO: 86279 - DNA, 1359 bp, Cannabis sativa
taataggatgataaaccttcagcagaatccgaatgcatatcagaaacatactgagaagaatgatcatcagcacttgactcttccttcttgttattacggcacctctttaacacactcctaaggttgtcagggtcgacttgcctcttataagtcttactgaatattgcagcttcatctactagatcatcaataatcacagctttcccttttaacttagtagtggccgaagggtcagtggatggtggactaaaattagatttagcttcagagggagttagtgaagtggggggaaagtatggtggttttgaagttgttatgggagaggtagtggccatagggaaactactggggacataggatgggtaaggtaaaggtaactctgggcatttaaccttagtgctactttctgttggatttttgtgggctaactcggcagaggttaaagagtttggttggggcaaactgcccaaagtcaaatttttgtggttgaaggcagtgggtatagaggaagtaatggtctttctggccaatctagtaaggaaagggtaggcactggctttggagaaatcggtacgatagcggtcatatcctgaaattggaagtttatctccaatcatttggggtccatataacaagtccggatcaactcccatgtccacaagttccataaaagcaatacacttatcaaaaggatgaccaatcttgccacaatgaaaataaaatactgggagattttcatatctgaattccaaccagtgttcatccatcacccgaggcagagacaccatctttccacgcatcagaggttgagttacatcaagacgaactctagtccgcagaaaaaaaaaccccatccttcatgaggcgagtcttcgtaaacctcaataaactcccccacccattcacccactttcttagctaaagcacgggacttgctaagaaaagggaggcgatgagtttgaacccaaaattgagcaaattgaaagtcctccttggaaatattctgtaaggaagttggggaatgcaataggataagtttattgaagaagtgccatggttcaccagaggaaattctttgcttatcacctacacaagccaaagtcaaaaggaaaatatcagaatgcatctccgacactacaacttcaaaacgacatttattgctccagaactctcccatttttttgataaaagtcttcgggttaacagtattagagaggcatcgagcgacgaggaataatttgggaggctgatttggatcatgaagatcggattcagaaagggaatgaacattcctttctttctcagacaaacagagagtggaattcatgtcttctaagatggattccatacaaatatcag

SEQ ID NO: 86280 - DNA, 528 bp, Cannabis sativa
  modified_base (34)..(36): a, c, t, g, unknown or other
gctgcttcctagattgacgactgaccctacagannnacacgagtgtttccagcgtgctttctcctcactcgcatgcttcctgggaaaacttcccaggaggtcacccatcttggaagtaccctaggttaagcaccttaactgtggagttctttcgtgatgggctaccagaaaacaagatgcatcttgttaatataggtagtaccaatcaatccatttaagtcctcttcaagtgtgcagtcccatacctacacagtctcagaatcatcccacttgaccttccccaggcagtgtggaattgcacagcttaccagatatttccccttacggataatgggactactgactttcacaaaaaccccccttacggggtctaacgtcctcgtcagccacacttctggctgcgtcaaggctctgataccatttgtaacgtccccatttcaagcctccattacgcccttacacccgcaaactcatggctcttatacatgagtacgccactctggctgcttcctggattgacaactgacc

SEQ ID NO: 86281 - DNA, 518 bp, Cannabis sativa
cgtcgatgctcaccaggagctattctcggccacaccgtgaggaatgagagagagaagcgaggaagggagaggtctcatggggttcttaggcatggattttctagggataccgcacgaagaagatagaagcaaggaagggagaggtctttgggggtacttggcctctggtgccacacaaagtggagtggagaagagagagatctagtgagagagggaaaatagggtttgcttagattagggttttcaaaaaatagggtttcacactttctattcatacccaatttattttaaaagaaataaaaataataaaaaatttgatatctatttatataagtaaattttgaatcccgttggttttaagaggtttaaaaaaagttatttatttgtttatttttttattctgaaacttttttagttttacctttttctaaaataaagtgtttatttgtgtcagtttataaccgagactaaaagatcttttagtgtctattaaacgacactaaaagtcattataggtg

SEQ ID NO: 86282 - DNA, 503 bp, Cannabis sativa
  modified_base (457)..(463): a, c, t, g, unknown or other
agttaggtacctataaaagttctagaattttaacttaagtattattactgctaaaaattaaacttagatatttatttacaactggagttaaacttaattatttatgctgcatattactattttttttatatttattaattatttaacaatatttaatataatcatttataatatatttttattttatatatattcaataatatattactcattaattacttatttttaggtataaatcctactagtagtttttaggactacctttaaatttttagaaaattctaaataatttatattgtcaaaaataaagttcaaacaattacttaactcgtgtataagaaaaattaatcactagcaccataaaattttaaatcttacttttaacatatcaattttcttaaaaaaattactggtagttctaaataattatatgcaatcttaaaaaaaaaaaaaaaannnnnnnaaaaaaaaaaaaattaaaagaacaaagttgtaacaacaaa

SEQ ID NO: 86283 - DNA, 871 bp, Cannabis sativa
  modified_base (31)..(70): a, c, t, g, unknown or other
atgcaacataaaatattatttctgatctttnnnnnnnnnnnnnnnnnnnnnnnnnnnnnnnnnnnnnnnntagggcacaaaacccaacatggtattccttaacctcccaatgaaagtttgacaatactcgtctgcaatccatttttgtttatttttataatttcatagaaccattgattgtaatatcttgatatggtcactgcaaaacatgtaaagttaatcaagttattgttcatcgtgactaattaaatgttaatcaaaggaaaagttatctataacttacgttatatatggctgaacctctgcataattgttcatcacgactaattgagcttgatctagttcaaacttagatactgtcaccattgttcctttcccccttaatcctctatcaacctcatctaggtcagttcttggtttgctaattctaattgcctcaactccagccatgtactctgaataaaatttcacagcctcttaaggaatgtagcactcaaccatagatgcttttggtcgatagtggttatgcacataacttttaagtaccttcatatttcttttaaatggatacatctatcttgcctaaattggcccacacaaccttacttctctcaatatatgaaccattaaatgtatcatgacgtggaaaaaaaaaaggcagaaaaaactttttgaggttgcacaatggtttgactacatgttcatgtaatgcatctaatttatccatttctaattcctttctgcataagatactgaagaaaattcaaacatgtgtcaaacactctcgaacattttttggcaagactgatctaatggcgattgaaagcagattaacgcatgacaatcatgtgattttatatccattagcttc

SEQ ID NO: 86284 - DNA, 807 bp, Cannabis sativa
aaaattctttgaaagaaagtcatagtactttaaagtagtgggaggtttgtgaaaactcatctcactattacttagagaataatagtgatgacaatcctttgatcaccaagagaatttgaaaggattatgaaactaagtctagaaggccatggtctaaatattcacatgattagacctaaaactttataaaatgcaaagacaaaaatagattttccatgacaaatctattcaaaaggcttgagaaaattatcaattgtagcataatagactaagcggtgtacctgataatttacatagatggtatttaaacatttggtacaatgttaaatatgaatcatcataagagaaaagatctcatcatcctctccacatgcatcttattctgtaaaatgcatgcaaagaatttttttggtaaagcctaaaggaaatctttagatttctagacctagagtttaattattttgggattagttgcaaccatttcagaaaagataaaaaccataaaaaaaaattcttaagaaaatcaacagtaagaggtcttgaatgtgcttaggcatacttaaaccagacacttgatgttgagtgaggtacataaagataaatagatttaattcgggaaagaaacatcatgaaacaaccagataattcttcataattttgtgactaacttgctattccaacttagatttctagatttgcattcaatgcaagatgatctataactaagaaggtgattattctaggggtagagtaattattcaagaagagtgtaaaatcctatcgaaaatttataaagtccatcagttt

SEQ ID NO: 86285 - DNA, 1242 bp, Cannabis sativa
cctacggtgataggtcatgatcttattgatcttctctttggtgattcagctcctcctgcgaaactcctcaacggcaatgacaatcctttgtatcagcaatggcgtcgcaaggatcaattgttgctgtcttggctccgatcttcaatgacagagggaatcttggccactgttgcatgttactccacttcgcatttggaaggcccttgaacagaagttttctagtcaatctaaggcaagattacttcaactcaaatgtcaattaaccaatcttcagaaaggtaacttgtccatttctgattatgttgacaaaatcaagtccatatgtgattctttggccattgctggacatcctgttcatgattttgatttaatcttgcacttgcttaatggacttggtcccaagtttgattctgtggtgtctagcattacttctcgaagtgaaaatctgtggaagaagttcaagctctcttgatgtcccatgaatcaagacttgaaagacactcctcggtcttggatatctcaacaaaaatggctgcaaatttgactttgggggcaagaactgggggtaacagatacttcaacaatgctggaaaaggccaaaactcagaacatgctaacaaacctggtacccgtggctatggattcagatctgtcaaccataataggcctttgtgtcaagtgtgcatgcggtttggacacacagcagccacctgtcactataggtttgacagaaattgggtcactcccaaggcttcccaccctcaaccccaagctaatcttgctgagaaaactattgactatgatcctcaagctttcattgctcaaacagttcctgactttggtgatgatgatggttggtatgtggatacgggtgcaacaaatcacattgctcaatctactgataatcttgagtctgtcatcccttattttggccaagaaactgtagatgttgctaatggtaagagattacttatttccaacattggtacagctactcttccatccaaatcttgtcctttaaatcttaattctgttttacaaattcctactatcactaaaaatttagttagtgtttccaaactcactaatgataataatattttcttggaatttcataaatcttgttgttttgtaaaggacaaggaaacgggggctgtcttgctcaagggaaaaattaaagatggtctctatctcttaggagatgataactcaagtctctctcaaaaggctcttcaggtgcat

SEQ ID NO: 86286 - DNA, 938 bp, Cannabis sativa
tttgctttgatttttaataaaaaccttaattgcatgctagctatctatttatggcagaagaaagatagaaatttacgtagaatataatataagcatatttggtgtccatagttcattggtggacatggaatagtactttaattttgttttcaaatgtgtacatctgctttatcagatcctttaacaaattgtgttatataactaacttgttacataattaatatatcaatagcaatatgaactttaattacggcaagaacaatgactaaaaaatattttagttataatataatttttttaattaaatattaattttagttgcactaaaagttacttgtcgcttacatgtcataatttttggacttgtggtgtcatgtcgtgcttaaacatatatttttcatctcgtgtcgtatttaattttttttttatgtcgtgtccactaatttgtagcatcatatcgtatcgtgttcaaactaatatgttttttcatacatgatcgtattcatgcctccaaccgcatattactcattgtaaaaatattttgtatttgctacttagtgtattagtcacaaaataaatattttgcaattaaattaaaatgttatataataaaaaattagttatttatctaatgttgcactagattatttttctttttcaaaagcagtttgaaattctgtattttaatattactaatttattatttaattaatcaattaattaaatacgaaataataaatatggaattaaaatagttattttgtaactatagaacacaacactgtatgtgagaataaaactagaaaacaaacagtataaaaaaaataaaaatacaagcttacggggccatgcccagagataagatacgttatataggtttcaaaaatacaaaataaataacttatgcataaataaactccctcttattgtatgccgca

SEQ ID NO: 86287 - DNA, 793 bp, Cannabis sativa
ggtgatgaattccagtcaaagatcgacaagacccctgctgaacagctgttgcctcgctctgctgagttggcttcgcagttcattgccatgttttcgaaggcctttgttactgaatccaagaaggtcgaacttgtgaagagacagaacgttcagcttaaggaggacattaagaagctgaaacaagatgcgacttccaaggataaagagctcgaggaactttgcaaggccaagggccaggttgagctcgaagccaagagtgctcagatgaaggtcgaggagatgtctcgcgacttggaggtcgagaaggagaatgggaagagggagtatgaccaggcggtctcagactacatttacaccaccctctccaaaattctggattttgacttctcaatcctcggagcagaagccgcttaaatggctgaggctttctgcgccatgtcgcctacgcagactcaaggcggttgagggaatctgtttcccgaggaggctgaggctacaaatgtcgaggaagtcgagaacgaagctatcagcaaagtcgcggatggatctgcccctgctgctcccaatgcttgactttttctttaatatttacttgtgttaaactctatccttttttttatctatgcggtacaagggtactcgcgccttgtacttgaacaaatttatatttatgtttcttttggccgactttatatcctctcggggatatctatttataatatttttgcagtacacgggtactcgcgttttttgtcatttataatatctcgattgcgactttaattacagcttg

SEQ ID NO: 86288 - DNA, 758 bp, Cannabis sativa
gacatgaaagtctctttgttcttgtcttaacatcttgtacatggttgctattctgaaatctgatgaagagaactgatttggagttgatagcagcttcacttcatccttcactttaacaactctagaccagtaccagctgctatgggcaggggcattgtgctcccaccaatccccctgaccaatgtatactccattcacccacttcacccataggctatccttcttattagcaattgcccatacatgttttgctattgcagccttgttccattttgctatgtcatgaaaacccattccaccagttttctctttgatttgcaaagagtgtcccatgcgcaacactacctgagccagtcatactgctctttcctgtccataagaagctcctgcaaatgctttctatctccttgataactttctttggaaggatgagtatttggcttcagtatgtatgaattgtcaagagtactgaattaatcaatactactctccctgcaaaagacaaattcctggaactccacactttaattcttgaaggcatcttctcaactaacacagaacattcagctgaggatattcttttagcacatattggaactccaaggtatttaaaaggcacaatgctcctttgaaaccctgaagcatctaggatcctctgtatttcacttgctgccatcccactacaatacatggttgtcttctgttgatttgggtgaaggcctgatgataaggagaataacttgagacctttaagcatc

SEQ ID NO: 86289 - DNA, 565 bp, Cannabis sativa
cctcaacttttagttatttgttggtgtaaacactagcccatgtccaataattccctttacgtgttttgtatttatttgcgagctgaccaatagttttcagttggagcatgattaaattgactcaatatgtttcactacaaatgctctggcaaaatagctaagggcgtgtttgtaaaatcattgtgtaactataattgagtaattcagagttattacaagatttaatgtgtttgttcaactatataattataaagtaaccgtgtaatttaaagtaactgaaggatctcattacacttttcaattcttatgattcccatgaaaattgtgagtaattacacaaaattaccatttttatataattaatattattaaaatgtgtaatactaactcatttaccaaacatgaaaataaggattcatatacaattattacttgacatctaaacacacattgtattttaaaataaagtgtaagtgctctcatgtataattactaccttaataattacactacctaataattacacacttgcttccaaacgcacttaggtggtgtttggttggag

SEQ ID NO: 86290 - DNA, 4631 bp, Cannabis sativa
taaagtgaattactccaacctccctcacacgagtttgagaattcgcagacattcctcaagcatttgatttttagtgcttttatttcagctttctttactgtttttcctctctggctttaaatttctctgttcatgtgattgtcactgacagtctaggaaccgttgtttgtaaaattatattgtaaatgtgtaatgatctgcagatagatacgaaagatattctttttgtatgtggtggggcctttgttgatcttgacaaaacaatttcagaaaggtaacactccttgaaaaattatcagtagttttttccaggttcttttttatgtttatgttttccaccttaattgtaacataagatagtgtaaacaaagcagaaggcaggattcctctattgggtttggtgctcctgtccgtgctaacatgagaggtaccagtgtaactagtgccgcaatcacgtcaactttacttgaatcggtaagaatgtgttcctgcagtaacagacaaatggggccttatattcttccatttcattgtgcatttaatatacaaaagtcacaaaagaaacgaggtgaagaaagttagaaattgaagaaaatttttggtttatcaatgatgaatatctacaaacaacaaaaagaaatcaaaattctaaaaaatgagagtagcaactaatacatgttaattttacctttcaggttgaaagttctgaccttattgcatatggtctcataccggagtttattggacgttttccaatattagttagtttatcagctttgactgaggatcaacttgttcaggtatttcattaatttgtctccattctatatctgctcttttaattttttttttctgagagtggatgaacaacaattgtctacttggtattcacccacaaggttatgagaaaaatcccaggatatttggattgtttttccttttcgtctctttctggtatagttgtagttggggtatacataaatcgatccaatccaattataaccgaccattaaaaactgaatatgtaattatgatcgaattggatgtaatttttgaatatccagttagatatccaatagaaactggatcaaaaacattgaatagatttgattctatgcaaaaaatactagatcaaaaacatttgataaacttgaaccaatggatagaatcgattcaatctaaaattcgtttcgggtgattgaaattaattggattggattggttgttaaaattcaacattcaatgtataatttgatcggatctaaacaagtctgaaaacattggatgtggtccaataaattctttcatgaaatccccaaatttgattttcatgattataggacatacatcttctccgtttgttattgcttttatttatttatttttctttcttttttttttgttgagaaatagaagcttaagaattcacatttggaagcatttattgaatattttttcatatcctgcaggtcctcatggagcctaaaaatgctcttggtaagcagtacaagaaactttttagcatgaacaatgtaagcatttaaactgaattgtgctctcgttcacctggacacatatattgttacacccacacatggattcaagtgcttattttaattataatgggttttttttatacattataggtaaagctacactttactgagaaagcaatgagaatgattgcaaataaggcaatgtctaagaatacaggtgccaggggtctgagagcgatactcgaaagtactctgactgaggcgatgtacgaggtatatcttgcaaatacagtttggctggctccagcatggattttactttggagaaacaaaaataaaatacatctaattgaactgtattcttgacgtaattacattactggtatgtcagattcccgatgtcaagacaggaaatgaaaggatagatgctgtagtagtcgatgaagagtcagtagggtcagttgatgctcctggatgtggagggaagattctttgtggtgaaggcgcattagaaagatacctagcagaaaacaagttaaagaattcagtggtatgatttttaataaaagaaatggtgggaataatgcacatgcatctaattgtccaaatttgttcctggggttcttttgttgttaacctttagtagactttaaatggtatttacatcgaagactggtaactttcaacttctggctgtggatatttgcaggaaaaggtagaggggggtgacggcgatttgcaagatacagattctgaacttccctcaagagccatgagcatgtaacactaataccatctcattcattcttatcatttgtttgtcattgttatttgtaaaaatctcatttatgattctgtgtaattatccccttgtaaaacagcgtaggttctcattcaaattcttcaaagaaatataggatagattttttttttttacagaatttcataaaccagaataatgtatgaattatttaactaataacaaatgaaggggcaccagtttacacaggcgtttcatttgttgataaagcatgtactgtattacaaaagacctgattgaaaatgataccatgtatttcattattggtgaagttaaagatttacaccagctttatatacaaagaaatctaataacagcatttaacaaattgggtagcgaaaacctgttacactgtcgtaacatattaatcaaactactctttaactactctacttctaaatagatactttgtagtcccatcttgtatttcagcagtttaaacttgtttggtagatattcgatcttgggtagatattccagctttaatcttctctcttgactaagtggcagtcaaatgttgcaatatgttgtgctgcgtgattatcccagtgcaaaatatcagtcgctgattgtcatataacgtaataaatttaacaatttttaatattaaactaaaccaattactttagtatggtggtatagtataagtccatcccacaaaaactacgatttaatttattatttacaaaataaaaagcgaagtaaataaaggagggtttgtgaaagaacaaattaaaaggtgataactatgttaaaattctggtgtatccaatagcaatcttgtttactatttaaaacaagatttgtttattagttatgttttattttctgttaagcaccttatgtaaacattcattcattagttgcaactgtataaaagcgtacttaatctctcattttgggattaagcttttccttagatatttcttcagagattcactcaagaagttcttctataaaacttttcatggtattagagactatctaaagtcaatgacttcttcgacatctaatgtgactattgctctagagaccactactattgcagcttcggcggcgacctccactcaatcatagaatattttctccaattttctccctcacaataaaacttgatcgagttaattttcttgcctagaaatcccaggttgttctcacaatcattgggcatgacctagacacaatcctcttcagtaatgtttcccctccaaagaaattggtctcttgtgattctggccctgcttatgcgcaatggaaatgcaaagatcaacctttcctttcttggctcaagtcgtccatgtttgaagttgaagaagtccttgcctcagttactacctattgcaccttgtatgatgtttggtgagctctcgagcaacgattttctagtcaatccaaggctcgactcttgcaacttaagggtcaattatcacacatccagaatgtaccttgtccattttttattataatgaaaatattaggtcgttgtctgatagtcatgaattacaacttctcaatggttttctcatcatcacttatacataatcatgaatattttttcctcaacataattgaaacactattttttttactacaagcgtacagtgttgttataacaaggttgtcgaacccacagggattgattattaaattttactaattattatactttttaattttatactttaattagataacacaaattaaattataattaagaaaaaataataagataaatagaaaaacaacgattttttatcataaagtaaaaacttagagcattgatttctctatatttcaaactatgaatctaaatttaatgattatctcaatttattctataatttgtagtttcaaaagtcttaaagtaacctattaacctctctcaagcgatgatagatttaacttaaattaactaacatgatatctctattcaatataattaaataagcactcataaaacaatatgattccctttcaatgaaactcatagaaatagtggaatctctcaatctcacacttttcctatgtcatgcgattctaaatccgattttaaatcacttctctcaagtgtaaagcctaaaatttctatactaattgatggtgatcaagcattaagaagatgataattagcacaaaattacataaacaaataataagaacaaatatgggaatactctaaaaacttaaattcataatctaacataattccatcaacactttagaatgagtgtttagttcataatcacaaacataataaccacaataatcatattcataattaaataactaagtaaaagaataaagaagaagaagaa

SEQ ID NO: 86291 - DNA, 907 bp, Cannabis sativa
aacaaacacatttttactactcttgtcacaataattccagtttaaaagcataaaaaataactctatatcatagagttatcagtatttttgtaggtgctctctgtttcaatggcaagacagtagtactaactttgtgttagcaccgtaaagtgccaacttgtatattccaggtgggatgacgtcaactactccgtactcagtggtaagtcatcctttggtgggatgatggcttatcatacccataggggccaggagaaggggaatgtcacatgtggctgaaaatattgcatcaattaggaggacatagtcattaatgatgatgctttatttggctttttgttgttaataaagttgtttcttccattatcgttgttggtcctctttccattattaaagccactattattggtgctcccctgactctgggagccttggccactagtgcttgctccgttcttgtttccattatcatggttgaggcctttggcgttccaagcctcttccagtttaataaattcactagctctgtcgaggaagtctttcatagaatgagttgagttcctctttgtatctttccatagtcgacctcccaccgtggtgccccccattatggtggctcgcttaccatcctcacttaggttctttaccttggtggcttcatgcatgaagcattggatatagtcttttagtgactcctcgagcctttgcttaatagaaactaagtcacatagctctatcgatatttgcggggctaaaaaaaattggtatacaataacccttcaaactcatcctaggaggtggtcctccctaggggtagtttggtgaaccactgttgggccgtgtctgtgggggttgtagggaagattcgacatcggaggtcaaacctgatcccataatgatccatctg

SEQ ID NO: 86292 - DNA, 1113 bp, Cannabis sativa
tgcttctcgaatgagtaatagccatatcacttagctgaaatgtctacagtagtcaaaaatatcgagaaagtggccaaaccgagattctttaaacaattttaagtgagtcaggtcattttttagtacatcattaatgtgcattgtgatctcgtccatccgacttttcatacttattttgccctcaaaatgtttattttcctttaatataggcaccaatcgagaaatttttttcacctacaataaattaaacataatctttctactatctaaataacataaaacaaataataatagaataaagtgaacaaatttaaaaaatatcgcatttattttgtctcgtgacactgatgaaggctctaattgttcttctccatcaaattcttcttgctcttctccatcgaattctacttgttcatctccattagattctgcttgttcttctccacccaattctacttgttctattctatccaattctgtttgttcttttccatctgattctgtttcttcttgtccacttgattctgtttttcttctccattcgtttcagattgttcttcaaaacttcccattgactaatttaaataaaaagaggtaatattatactaatcgagtacaaacataatagttgagccttacccacaaacggttgagctcaactcaatagttgaactttatactaacattacaagaatttggagactacatctcgaccatgaatggtcatggtcgagctataaactaatatttcaagacttttgagactacattgatcgagctctactaaaagcagtcaaaattaaatctcgaccatttatgttggatctctactaacactaatcaagttatataatatatcaaatagactttaaaaatctcaaacatattgggtggagttctacccatttacatcattatttgattgagttgttgttgtgcatgcgggaggagttggttcgttcaaaatcaactgtcgttggattggttgttttggatctataatacttgatcttttgcttcgtgccattaaattaccaaactatagtatgttagcttggatgattgagcaattgcacaacctgaaaatgttaattataagtaaatatgcataaa

SEQ ID NO: 86293 - DNA, 672 bp, Cannabis sativa
  modified_base (528)..(528): a, c, t, g, unknown or other
tagcttctccaaaaattgttcaaaaagttatttgttgagtgtttaccaaacacatttttatcacatctttttcaaaaaggagcttttaccttttccaaaagctaataggcccaccttcatattttaatggagaattttcgtaaacacgggaattgagggtatactttacttttatatggcataaataaataatactatagggttatgaattttttttttttttttttacatttttataggtttttatgccatatttttatataaaaaaaaggtagaaatctcatatttgtaaaacaacaataagtttcgctggaaaagtcggtaccgaaaagtcaccgtaaagtcgtcggcgccggaaaagtattgtcgtcgaaaaagtcattggaaaaatcactgtctccggaaaagttaccatcatcggaaaaatcacttaaaaagtatatgtctcagatataactaaaaatataaccggttctatgaataataaaaaataaaataaataatataaaataactcaaaccagttatnattaaaatagaaccagttctataatagtgttatagttaataaaaactaataacacgaaataactcaaaaccggttataactaaatgaataaaaactaataacttaaactggttataattcaaatataattggttctgtaacata

SEQ ID NO: 86294 - DNA, 657 bp, Cannabis sativa
aatatgagtgggtgttaataaaaaatattttcaaattttggtgaccttggagactcgattgggggccataaatgtcataacaggcttaattaataaaattaatggaaatactgtgataagttgataatgtaagtattagaataattaggagtatatgggatttaatgtagcgccctagaagtagaaattttggagtagctaagaaatgataagataattattaataataaatttttattaatattattattatattattataattttaacttttaaaaatttatcgctcaaagtttatatatattatataagttatatcagaaatagtaaagaatgaatgaaactctcgttcctctcctttcgacaaaaccttctctctctatatatatttattttcttcgattttgaacccgaaacctagcgatctaagctccagtagtagcaagatagcgaattctcggagcaggatagcttgaggtaaggtttaatttcgttttaagtttaataataattggtgtcgtataggggttttgtaaattagaatagctatgaagattttgaccttataagattgtcctcgggtagtcatgggactagttctgatgttttcttactgaaactgaggtgattttgggttagaaatcgagtttggaactt

SEQ ID NO: 86295 - DNA, 981 bp, Cannabis sativa
attaaattataaataactattttttagaaatatgaataataaattgtatattagatgaaaaataacaaatttatggggttttttattttttacactttaaaataattttttatttttatttttacggaattccacacaaaaactcttatagcaactaacggagtaatttaaatcgcaatcaaaatccgcatagtaacccacatagaaactactagagaaaccaccagagcaatctaaaccgtaaatataaaaaaaaatattaaaaaaatagtatatgaagtaattctcaattataaataactaattttagaaatataaataataaattgtatattaaatgaaaaataacaaacttatagagtaagatattaaaaataaaaaataaataaaacttataagataagaaattaattaaccatctataaaataatattcttggataaatctatatggtgtaataagaacaatatgtataacctatattaatagtatctacataatttataatttatactcttggataaattttatgcataattttatttgtgtagttgttttttaaataaaatagaaaaaaattacaaaattttaaaaataatatgaaaaaataaaatctatggctttcctttataatatattgataaattctactctatatattgttgacttgaatgtaacttttgtttagttggaggagtttgggttgccatttgcctaactatgacattaaattggtgaaaaattagtggactaataaaaactcctaattaaataattatttagaattattttagtagttttctattattttaatcttttatgttgaagctttgttagtgttactttggtcttgactttggaattgaatagaacgttagcctctctattttcctttccaccactttattgttgattattcatcattctcaaataattatcattatcataccaaacaaaacacaatcatacaagtttggtgca

SEQ ID NO: 86296 - DNA, 682 bp, Cannabis sativa
  modified_base (169)..(169): a, c, t, g, unknown or other
acattgttacgctttcctcctcgtggccttacaataaatatagctatcatcagcaaggagcatatgagagattaccggggcacctcgagcaagtttacaccccgtgagtaaaccactttgttcaaagctacgcaacaaactagagaaaccttcagcacaaagaataaanagatatggtgataaaggatcaccttgacgtaatcctctttgagaaacaatgggccccaactccttccctccatgtgaaattgtataggaaacagaagaaacacattgcataactaagttaatccaacgaccatcaaagcccatccttaccactcaagcttatcatacgctttgctaacatcaagtttaagtgccatatgaccatccctccctcttcgttttctctttaaatgatgcataatctcataggcaatcatgatgttatctgagattaagcggccttgtaaaaatgcactttaactatcggatatgatggactgcataacactcttgagtctatttgcgaccactttggacacaatcttatacaacacattgcataaagcaattggtcttaaatccccaatatccataggctgcttcttcttaggaattaagaccaaaatagttttgttaagatatgtaggaagaaacccattatgaaaaaattgcttgaccatattgatgatatcat

SEQ ID NO: 86297 - DNA, 786 bp, Cannabis sativa
tgacatggatatgcatgactccacaaattttaacatatatatgtaccacatgcatgtcaatttaaagatgcgaattcttatatttacatgcatatatatggtgttaaaatccaatcaacagaaactctgacctatagcctgaatggaggaattaaataaatgatagtttggtgttattaaatatatccaaaaaaagaaggaaaaaaaaaaagaaaattgtttgtttctccaacattgatctcatgtgtgagtaaattttgagatttatattagacttattagtagctactaacttatttaactccttgctaaagtttcggtaattaaatatataaatgataatttggtgtggtttagtctatataagaaaagaactatatctttaacaaaacttattactacactaaagttaatgggatgaataatgttattagctacataggcttattatatttatagtaccatgcataataacaaccctatattttattttatataaccagtactatatagtggtggtatatacataggtataatttgatagttttaatttatacaatatatgaataagtacttcacgtctagctattttgttatatggtatatggtgtacatacaatatatattgttaaaagttatctcccacaaatttaagaaaatatcaaatagttatgtacaatgtctaaataaagattcaaataccttgttatagccgacaaaaagaaagagattgttataaatgcataaaaataccaaaataattaaacaagaagttttatcctaatt

SEQ ID NO: 86298 - DNA, 660 bp, Cannabis sativa
gcataaaagtgccatgcccacacaggcaagtcaagtacttaactatagtgcagaagacggtggtaaccaacccaaaggagagaaagagatccagactcagatcttaataaaactctgcgacagaaaggaacaagggttaaagatttgagcgaaatgagtcataatattctgctgcaatcaatgtaaggttttctaaactcttatatatttaattttattattttagatacattcatatttagggtataaattcaacatagttgttagtaaatctagatcctagtaaaatattctcaacatgatgtcacaacaaaaggtccctaagcaccaatagtaagaggtttaatgcgcactagtgtataaacttaaccagactcctactattgagtgacagctatctaagattaattaaacaagggacattgggagagaatcaagaaagaattatgaaagtgacctatatgttatatcattggggtgtatattagaatccttttatctgtaccagctcagaactgaatatcaaagatggtgtgttactctgggggtggaggaattattctagaaggatgtaaaaactcatctataataatttagttttaccagtgaagctaaacaactttgttgctttcgaaaagcactggaaagttatttaaactg

SEQ ID NO: 86299 - DNA, 625 bp, Cannabis sativa
aattataaacctagatctaatctcctcacttctcagcccttaatctcataaatatatacaatacatatatataatatataaataaatattgtaaaaagaagaagcagaagagaagaagaaaaagacgcaaaagagaagaagaagaagaagacgtataaagaaaatgtagaagactagaagatgaagatgaagaagagaagaaagaagaaggggatgttgtggctggtgagttgaatattaagtttagggttaagtttaaattaaattataaataaataaaatatgtagcgagtctggatttcactagaaacccgatatgtagaaaatgttatcttaatactcgccttaaatatcatacaggtggtatctaaatcgggttttttacgttattttttcggatactgggtctaggtcgggcgagtgcagtgggtgggctgggttttcaacgccaaatattcagctctaactggtccacttattttaaggtgcagcgtaaaaagtatctaaacttccctaaagaatcttaagtgaccctaccatttttttcaaccaattaccctcaaaaaaataatcagctggcatggtttttagactgttgcgtgttggaattattttatcaggatct

SEQ ID NO: 86300 - DNA, 547 bp, Cannabis sativa
aaaaatttaaaaaatatattaagagtaatttttaaaaaattatttaaatttatatttttttttaataatagaatatatttatcattttatggggtgcaaatagaactccacttcactttgtccatacaattataactacaccccaaaattacatatttaacctttagttaaatgaccaaaataagtattttaaaagtttttattttatttatattttaataagtgcaacctacgattgtttgttgaaatcttttagaaaataaaaaactactaattaaaatctttaaaaccctaaaatcatttatcagtgggataatcctcatctattcaagaaattgcaacacaaattcatacaaacaccactactaaccgcaagcatttagtgaaattcatgtctctatttccattaccacctactactacaatatggacctttcgagactgttttttcacctattggtgtgatgatacctgcttggttcgaaattgacatttagagacggttttttggtaaaaaccatatgtatagaaattaactataccattt

SEQ ID NO: 86301 - DNA, 590 bp, Cannabis sativa
ttccaagctagaaaataccctatagtcttactccatgctcaacaacataactctcaaccaaatcatgcattatcacactcaattcatcaagatcacaacaacacccaagaacatgcaacttcaagagaataacaactcaaaacatgctttaacctcaacaaattcagcaagaatttcaatactaaatttcaaataaactttgcaagaaattacctcaattccaaactaaaaattcttccaattcaaagctccaaaatcaagcaaattccaagcaattacaccaattaaacttgaaattgaaaagagggttaggaagagagagagaggttgggtgagagagggataaacaccataaattgatttccttttttctcaaaaatcaattttatcaaacatagtaaataaaggtcaaaagaccaaaatgcccttacgaccaatttcccacatattcaaacacacaaggcatacttgtcaattcacactcaaatattttttttttcaaaataaaatttcagattttcccttatcaaataaaatgccaaataattcaattcaaattgcattttgggcccgaacccaattcggcccga

SEQ ID NO: 86302 - DNA, 618 bp, Cannabis sativa
ttgacactttatttataaaaatacctccataaggtgtggacaacatttatatcttttatgtgcttttaattaccaaaatatctcttacactatcagttacacaacaccaatcagacaaaagttgttggatgattgaccgaaaattgcatcagacgaaggttttaatccctagaagcatggatcgtgggttgaaggttcgtgtaagaggtatttatttacttttttttattatttggattgtatatttgtttatttggctggcgcttgaagtttttttgtaatattgacttcgattttgctctcccatggctaaaggtggtctttgtccagtgaagaagaagtcgaaggtgtctttgcctgaaattttttttaacttcgacgaccaaatgggaaagaagaagtcaactttcaaggcaactgtaatgaaactataatgaaacagttatatttattgcaagccaactaacataaaaccacaaaacaactaataattccacatatttaatacaaacaaatattgcgaaaattgtgttttatctgttcaggtcacatatttgatgattccgagccttgttttcataatattatgatattgtagtagcaaaactattattcaac

SEQ ID NO: 86303 - DNA, 725 bp, Cannabis sativa
tgaaattaaaaaaaaaaattatatttagattcaagttttaaatgcaaaattagggtatacctaaattttctattttaaaataatctaaatagcaaaaaaaaaacataaatagaaaaataacataaataatctgaaattaaaaaaaatatatatttagattctagttttaaatacaaaattagggtatacctaaattttaactaatttttttatcttctaatttttttgaggttatacacaatccacattattttaacataatctgaaatgaaaaaaaaaacaaaaatgaaaattaaaaaaaataaaattgttacctgagatggaggagcacacagcgcctaagatggaggagcaccggtctccgcctgagagggaggagctctgcgttggcctgagatgaagaagaaaaaaaacaaaatatttataaaaagaaactaaacaaaataaaaaaccattacacttacctcctttgacctttggaagatattctttgatcttggagggtatcgccggtagcaggaacaattttttttttgggtttgagtggctagtatcgtgtgggagcagtggcctggtatggtggagctgtgtttttaggggagaagcagacatattgggacgatataataaggatgaaataaaatgggattagggctgatatgtatttgggttttagtatttagtgacactccatatttttagtgacacacatttcgcgtaataaa

SEQ ID NO: 86304 - DNA, 1441 bp, Cannabis sativa
  modified_base (403)..(407): a, c, t, g, unknown or other
gaattgtgccaactgactttagtaagaaagaaaaatacctggatgggttaaatgcgaagatgagacatgatttgatgattactactgacgacagaatcacctatactgaaatggaagataaggcattacgagctgaggcgcagtgggatgtatggtagagtctggtgggactctggttcttggcagggctcctacccctccagcatcaggttttagcaggggaggtagtggctcagccatagatcagaaaagaaaggcatccactgcaactagtggctcgggtaagaacaagaggtttcgggggaaccagggtcgaggcaatcgtcagagaggcactgaaacccgatacacttacctagagtgccactgtcgtaaaaagcaccatctgggggagcgtaaaggnnnnnggtgctttcagtgtggcatgccaatgcattacaagagggattatccccagcctagaactgaggcaccgaagacagcagcaaaacccactccatccagggtattcgcgataactcaggctgatgtagaagccagcccctcagtggtaacaggtcagctcttagtcaacaactcttatttctctgtgttgtttgattctggggccactcattcctatgtggcggccagaatttttagtaaattggataggctgcatgatagttatgaattagggtttggaaccctactgcgtggcgaagagttagttatctccaaaaggtggattaagtctatgccgatcaaaatagatgatagagagttaagtgttgacctaatagaaatgagcttagtagattttgatattatacttggaatggatttcttatccaagtacttagcattaatattgattgtaagaggaagatagtaatcctccacagaaggtgaggaaccgtttgtctttgtcagatcggttcagggatcttggatctcagtaatttcagtattaacagctatggaattgttatgagatgaatgtctatagctttcgaccgtggtattggataccactcagcttatgtttgttcggcttgaagacatcaaggtggttcgggaattcttagatgtttttcctgaaaaactttcaggtttaccaccatagaggaaaatttaatttgttaatgatttggcatctagagcagaaccggtttctaagacccctttcagaatggctccaacaaaacttaaagaattgacaattcaacctcagggggaaaacagtcttttcaaagactggtctttgatcgggctatcatcagttgagaatctgagaggaggatgtcccaaacacagctttccacactaggtatggacattacaaatttcaggttatgtcttttggactgatcaatgctcctacagctgttatggatttgatgaatagtgtattcaaggttttcctcgatatttgtgttattgtatttatcgacgacatcct

SEQ ID NO: 86305 - DNA, 1521 bp, Cannabis sativa
  modified_base (576)..(579): a, c, t, g, unknown or other
  modified_base (845)..(859): a, c, t, g, unknown or other
attacataaacgggtaaacaacacgctaaaaccctaattcgggaaactcaaaacccccaacgaagggttttgctactggtaactattataaaaataccttaagtatcaaggaattaaccaactaaggcactgaaaatgacataaatcgacaaatcaaacgattcgggaagcctgccccagatccagttaaccggtttgcaccagttttccccaaaaagtttgaatcctgctcaaaacgtgtccaaaccaagccgaacttttcagaacacctataacaacatccaataacagtttttaggcaaaaatagcaagaaacatacacaaaatccaaacatgccatttgtaaagaccgtttaactttaatttagaaattagcagataaatagagtttaattatgaaacttgcatattagttaagaattatcattttatggaaatttatttgaattcagaatgcattttatatgtcatgtatagaattttatatttttccatgttttgtgcccggtaacattagaacacggtatttggctattagaatcatatcttagtatttttagtatagcggggcaatannnntagacattgggaatgttgagaatagtcaagattttagaatgaccaaagtacccctaagtgattttatgacttttattgtgggcaagggcattatggtctttttgccctaagttacttttgtcttctagtgggattttatttgtagtaaaatttgaatattatgttagataagtagataaacattaggttttatttattaaaaccaaagttaaaaattaacgataaatagcttctctctctctttactccctctctctctctctctnnnnnnnnnnnnnnntctctctctctctctctcgaatttccttggagaaccagcaagaattggtgtctcctcagcttgtttttggtgatttgttgttggttcttagagattcaatctaaggtaaagttcttagacctaatctccttggttttcttaagctttaagtgaagagattttgcatgaattgggggtttagggttttgtaggtgctgttgatgtttgttattagtttctgaagtttatttatggtgaaatatgttgttttgagctgattttgagggtttttataaggtttaagcaagctttgagttttagatttcaagcttggctctttaatggtgaatcttgattatgagcttgtttagttgttttgctgcttggaatatgtttattggggtatattatgcaggtctggaaggtttggtaaggtttggattcgaattggttaggttttcgaattttttaggttacctgggtaaaactggttaactggttttacaggccctataaaaccggttaaccggattagaaacaggtttcctacacatttcgtgttttcgattcgtgttagtttcagagctttagttggttaattccctgttaattcagggtattgccatgttagtttttagtaggaaaacttttagtttaaaacctaagtccccggttgtgattta

SEQ ID NO: 86306 - DNA, 542 bp, Cannabis sativa
aatatctcactaaataaatatattttacctatctctcgtacattttatattatttatggtaatagccccaaataactaatatataatataattatatcatagacttactagtaagaatttaaaatcttaaaataattaaatcaattaaacattacacttaaaaaaaaaacttattgaaattctatatagttaatcttaacattcatgactattttcaatgagcaaataaggattatgcaaaaaatagttcacccactaacaatatcaagcatgtcagattctcaaaataattcaaattcatatgttaatattttgatattttttgtagctaaaatcttcaagtgattaaagttgacaattaaattattattttatttaatatttatttttatatatgttattttttttagttttataaattagtattatgttgttcttatttaattttatttaatattattattattttatatttttaaatatattaatgttttgaattaattattacttttgtgatgacttttaatttgagaattaaaatt

SEQ ID NO: 86307 - DNA, 1913 bp, Cannabis sativa
  modified_base (840)..(854): a, c, t, g, unknown or other
agaagcttttgatgataccatggttcgtacaaaaatcagtgaaggattggtggtcaaactgtttgccattgtccgaaactattttgtacggcaattcgaaccgaaagattatgttattcacaataaagtcttcgactttcttggatgtaatggttgcgagtggttcggcctccgttcacttagtgaagtaatcaacccttaccactgcatactgtacccctcccttgcctttgggtaattgtccgatcaggtcaattcccccaatggcgaagggccacggactttgcatctgagttaactcgttgggcggagctcgaggtatcttcgaaaatctctggcatttgtcacaattcttaacataagcctttgaatcttcaatcattgtcggccaaaaataaccttgccgtagaattttcttagataaactctgcccggtggcatgatttccatagaatccatcgtgcacctcagataggagtcgtacagcttgttctttagtaacacatctgagcaacgacatggagaaccctctcctgtacataattccctctactatgatatatcgtccagccttccttctcatctttcgagcttcatttcgattatctgggagttccccagtgttgaggtaggctgctatcggtgtcatccagtttggggaagtatcaatcatttcaatctgttctgtgcaagtgatgctaggctcttcgaggaactggataggaacaaagtttcccttatcacttacattactgcttgccaatcgagctaacgcgtctgccgttgtgtttttttcctttggaatttgcctgagccgtagcttttgaattgtgcgagaannnnnnnnnnnnnnntcagatacactatcatcttttctccccgagcctcgtattctctggatacatgatttaccaccagctgtgaatcgctgcagatttcaatgtgtttggctctcatctcccgggctaattttaggccagcgattaaatcttcatactcgacttcgttattagatgccttgaatccaaatttgactacagcgtgcaggcgttaccccccaggcgtgacaagggcaattcctgcaccagataactgatctgtagccgacccgtccacgtgtagtttccaagtcggcttgtcttcactgttacttggctggggtgtttgtaccggctcggggttgctttcttgtatgctctcttctttgcctatgcattctaccacaaagtccactagggcctggcctttgattgttgttcggggttggaaggtaatttcgtactgacccagctccactccccacttgagtagctgtccagaggcatccagcttttgcaatatttggtgtaatgattggtcagtgtacacccaaacaggatgagcttggaaatagggccttaacttccttgttgctagaataagacaataagcgagtttctctatcaatgggtatcggccttcggcctcaatgagtgttttattgatgtaatagaccgggtgttgtatgttgttatcttctctgatcagcacggcactcacagagtgctccgtgagagccaagtatattccaagtccttccccgtctagaggttttgagagtacgggaggttttgcgagttgcattttgagctcctgaaaagctttttcccattcctccgtccactcgaattgcttatttcctcatagcatattgaagaatgggacacacttgtttgttgattttgaaataaatctgctgagtgcggcgatccgaccagtcaaactttgcacttcctttgttttggttggcgacttcatatccaggtgggcttgaatcttctctggattggcttcaattccttaggcattgacaatgaagcccagaaactttcccgagctgactccaaaggagcactttaagggatttagtttca

SEQ ID NO: 86308 - DNA, 635 bp, Cannabis sativa
gcgtgcaacacactgcttaaatgcaatttttgacatattaaacttttttaaattttttgaaattttgcaggatgtcttaaataattataatttacatgactataaaaaacatttgactaaaaaattatttcgaatactaaaatagagataaagaagatgtatcggtgtatcccttttaagagagtgcattatagaatttttcaacattttttatgttaaaaaagtaaaataaaatattaagagtgactttttccttacaattaatttaattggcaacagggaaaattagtaacttaagcgtgtttaaaagtattaattatgtaattacttatgctattttaaaatataaaatgtatttaaatatcagataataattataaatgaattcatattacaaatgatatattttttagtaattaatatttaaaatataaaattttaataattacacttacggctgtttatataaattggaaaatcgcagtttaatccaaaccacgacaattcgaaccactgtagattgtaattggggaaactgtttttgatggtttggtcaaatcggaccatttacggcgtaatggttcggttgcggttcgtaataaatagttaacggttaaatcggaccggaccgttta

SEQ ID NO: 86309 - DNA, 2517 bp, Cannabis sativa
aagcttgtgttttatgatggtaaaaatttttgatttttaatttatttttgggggttttaattttgaaagctttggtggttaattttgatgaattgatttgtggtgatttagggtacactcttcccaagctttacgccaagatgcagtattgtgtttcttgtgcaattcactctcatgttgttagggttcgttctagggagaacaggagagtccgtgagcctccacagcgattcagacgtcgggtatgttgttttttgcaatctgattttggtttgtgatgtattaaagttttagaattgaaactaaaattagttgatttttatgagttttctttggtccaaatttgtttggttgataattactcatgtttgttgatgaatttttggtgctgaatatgttgaattgtgtttatccaatcaggaatcctcaatcctgtttctgtgagattttttgttacaattttgctttggaaaatctcttatgaatgtgttgatatatgttcttatttagttctttagctttaactgaattgcaccctttattggaactaaaattagttgatgttgatgagtttctttagtgcatatttgtttggttgacaattactcatgtttgttgatgaatttgtggtgttgaatgtgctgaattttgtttatccaatcggaaattttcaatcctgtttctgtgagatttagtatttcaacttagaaagtgttgtgatgataaattttgttttggaaaatctcttaagaatgtgttgatatatgttcttatgtagttctttagcttcaactgaattgcacccttttatgtattcacttcccttaatcaactttaagattgttttgtttagtgtttggtgaatggtaatcaaattatagtttatttagttattttgtgttacacaattcacaacaactttatgaattatgatcttcttctcttaatccacttcaaatgaattttgtttagtgtttggtaaatggtaatcaagttatagttttatttagttttcacatcaactttatgatcttccaagaatgggttaaatgtttgttagttttggttagtcgttgttagtgaaaatatatgttcttctttagtttcttcggcttgaacttcgttgcaccgattcatctatttgcttatattatatgttagttttggtccgtcattatggatggaagtgcatgttcttttttagtttcttcggcttgaacttggttgcaccgattcatgttcttgcttatattaatccacattaagatagttttgtttagtgtttggtgatcaaattggtgttgacatacttcgttgcttttttaaatgtgtgtaggaggacactcctaggcccggtgcaccagggcagcccggtcaacgcccagcaggaggagccccagcggctgctcgtacttaaacaaagggcatgcaatgctcacctacttcaaggcttttgcattgagactttagttttaaatattttggttttctagtgctatttcaggactatttatgtattgttttctatagttgctgaatccatcaaaaagtagtattcatactttttcccccccaaagaaaagagtgttaattcatactttgttttcgatatagaagatgttattttgatctaattatgtgatatgacttccccttttctatgatgagaattataagaaattcaatggtttttcattagccttgaacatattatgagatgttgtcttatttatactgctgttaatttttctaagatcttcacataataatgttctgcataaatatttggattaattcagaaaaattgattaggaaaatgactctagaagtaccaatattgtttcaacatgataatggtgatttcactattaagcgaagagtttctcagaatgagctgaaaaagtgttttgctagccttaaaggttaatacttgaccttattattaaccccaaccatctaataggatattggtttttgattctcttaaaagagctctttgttgagtaagaagtacatactgaaatttatagataaaaattgattttggcatagataaaactaacactatacttaaattaaacccgagtcaaaagagttccaaattattggaccactcttaattacttttcaagttgtattttcttaagtcacagtcattgattatatgtgattaagtatatatattaaaaagagcagaagataaccaagaagcaccagtggtctagtggtagaatagtaccctgccacggtacagacccgggttcgattcccggctggtgcactttgagctgtgacgattactggcgcctttagagattgggggatctatctcactcgtctgattaaaggacgaaatatggtgcttccgagctctgttttttttgagattagttaaaaactacttatttttattacacattaattaaatatgactttaaaataatttttattcagttttaattgataaattaaagagtagtaaaacaaaagtaaaaattaaaataaaaaataggtata

SEQ ID NO: 86310 - DNA, 794 bp, Cannabis sativa
ataaaagtcgtccaacttcttcttgtgttacacacctatgtaatggcatggaaaatcctcttctatacataactccttctaccacgatgtacagcgcaacctttttcctcattttctaagcttcgtttctattgtttgggagttctccagtgttgaggtaggctgctattggcgtcatccagtttggggatgtatcaatcatttcaacctcttatgtgccggtgatactaggttttttgagaaactggataggaatcaaatttgctttatcatttacattattgctcacaagttgcgttaatgcatcagcagtcgtattttcttcccttggaacttgcctgagagcatagcttttcaactgtgcgagcagatcgtgtattttgctcagataggctatcatctttttccctcgagcctcgtactcttcggatacatgatttaccaccagctgtgaatcgttgcagatctcaatgtgttcggcgttcatctcccgggctagttttaggccggtgatcagagcttcatatttggcctcattattagatgccttgaatccaaatttcactgcagcgtgcaggtgttgccccccaggcgtgataagggtgattcctacaccggatagttgatctgtggccgactcgtccacatgtagcttccaagtcggcttgttttcactattattcggctgaggtatttgtactcgctctgggttgttttctaaaatgctctcttctttactcgtacattcaactacaaaatctgccaaggcctgacccttaatcgctgttcggggt

SEQ ID NO: 86311 - DNA, 1796 bp, Cannabis sativa
  modified_base (657)..(659): a, c, t, g, unknown or other
gcagacctggtttttgagtggcttggcagcaggtattggcctacagattttgaaagatggcgaggttggcaagcctggaagtcaacgagcaggaagcaaaggattaatgttgctattttggctgctgtgatttatagcttatggatcaataggaatagatgcatatacaactattattcttattcggttagagcaattgtaaatgaagtgaagagagttgtcttgtatagattacaatacttcaaaaataaaaataaaaaaattgaaagattatgagagagtatacatagagaggatttgaaagtaagtcggtagtggtccctttgttttgattggattgttggttgtaattgtttgtgattaatgaagcaattttttcttgataaaaaaaaatcttaaaaactataaaaatatttaaaatttacagtcgtatttttgcattttttattgttatttttgtgtatttctaaaaataatcatttttctttatttatttatttactccatatactatttttttcttaaatttatggtatgagttgctccggtggttactttagtagtttttatgtatatgtggattttggttgcgatttaagttgctccgttagttattatggggtttatatttgaaatttcttcaaaaaaaaaaaaaannntattttaaaatgtaaaaatgaaacaaaaaaaaaaccattatttttattacttaaagaattttctttctttttctttttttttggtttcataccttaatgttgcttcttattagtcaacgtttattagttttttaatattcgatctagtacttcttcattgaattatattatttacttgtaataggattaaatattaattaatacagtagaaaaacaacacacaattataataatatacttaacaatttatttattttgtttcgaaacaacaaccacaattaaaataaataacactatatataatatcaattaaaggtcatcataaaagtatttcttgaaaggttgaacatgttccacaagaagacaaatgaaaatcaatagagacacattttcatgatcactacatttattcctaagtatcaaaacaccaccatcaatttcatcataaccaggcccaaaatggatctcttttccccaaccaaaatcaataccctcaaacgacaagttcatccaatttgtcacactcataataggattcccaatatatttcccacctccattagttgaagatttataagagtattgaaacttggtcaaatcttgttcaccttttagaaactcagttgctgacaatatataattgtttgtaaccatatcaattacggagcgtattttactcgctccgtaacttaacggttgagataataactctcccgctttacagctcgccattacgttgagagctccgttaccaaagtaagaaattggtaacggaggttgaagacgttgacgagagtcaattgccacgagacaagctgtgagttgttcgtttaagtgctttcttgccttaatcgaacatctccaaatatgagatgttaaggcctcgtaacacgtgtaaggtcgcgatgatgatttttttatcatttgaccgttgtgatcattattcgccttgttcttaagtttctggacttgttcttttgtaagctttaacatgaacactgttgtttccatcttcttaagctcttcggcgttaggttgtttcaacaaaaacggcatactacaaaagtcgtttgagtgatcaaactgttgcgggtttgaaccacaacaatttgatccaactccaaaggcctttttgtc

SEQ ID NO: 86312 - DNA, 858 bp, Cannabis sativa
  modified_base (229)..(236): a, c, t, g, unknown or other
attaaaacataattaagcatctggaaacaacaacaattaatcacagcaaccacaatagcaaaaacaccaagcatgcaaaactaacatttttcttacaactcaagaaacttaaaagaatagtcatgagtgagcttggattatactttgaatttctgaaaaacactagaatttgatgaacaaaagcatgaacccttgctggttctagaggtggccgaaagagagagagagnnnnnnnnagagagagagagagagttgagaggaaatggaattttgcttcttttcttaattttttataatttgcaaaatgaatgataaattaatatattaaacacttatttcagccaacatgatttaaaataaatcaaataattacaatatactaagtccactaaaggacaaaagcttatggggctaaatgaccattttgcccctcccacacaaaaaggattaaaaagcactaaatggtattttgggaaaactccaaattctcgactaatcttgacattcccatgtctaacaatatcgcctcgctaaactaaaatattagattttgattctactgagccatacaccgcgatccatgttgccggacaccgaaaatgtaaaattatgaaattttactatatgacataaaaatgcattctgaattcaaataaaccaacataaataattatttaaatatgcataaataattttcataattaaactctaattatctgctaattccaaatttaaactaagcattctttacaaatgaaatctatgtctaaaagtcgagaagcttctatagattgccattagaaaaaggcttcagcatcttactaaagtaagtttcttgcactagaataagtaaattac

SEQ ID NO: 86313 - DNA, 515 bp, Cannabis sativa
atttgtaatataaaatacgtatatataatcacatttaaatatttctctttaaaaaaatataatcacatttaaatagcacatcaatataactgtaatagataaaaaaaaacaattctaatgattaaaaattcaaatcctatttcaaaaattaaacaataaaagtacattacctaattaaaaaaatgcatgtattgtacttaatattacttaattaaatttaattaaaaaaattaattatacgagtattccacataatcaatctagtataattaaatatactaattaattgcactttttactaaataagctaatcaaaaatttatacatagattggaattgaaatttgttattaaagttgcattaaaactagttaataggtagatactattaattttgtgtcatttatattaaaccaaaggtaatagctaacgactcctccggtgctctctgaaagggtatctctagggatctcaatgtgtagttgccgtctactgtcgtcgtcgccgttaatcggc

SEQ ID NO: 86314 - DNA, 990 bp, Cannabis sativa
cactcgtctgtcgtatgcccaatgcctttgtgatacttacaaaattttgttgcatctctcttatgtcttgcatgcctcatgggctcaggtttacagattgcgaccttgtgctcatgtgtaagatagatgttttcctgagtttcattaagctcggtataaacggtgtagattggcacgaacttgtcatgcttcttctaatttttcttgtccttacctaactccttagagttatctttcctctttgaactagaggctcctggatagtcagctttggtcaagacggtgcttgttgagacagtgcttggtttacctcctaagccagtctttaacaacttcatctcttttcttacttcctctttttcaataaacacttgagctctttcattgaactcagtgatttttttcactaagcgaccctgtaggtcatcccatagctcgcctccagcagtggagagatcagtcgtgatcgctgcctgaagtgcagtaagttgggtactatcgtccatgtttctcaccctcccagcagctgtgctaaaatgacttaagtaggccttaagcgtctcacccggctgttgctttatgttagtgaacgaggacgcctcggttcgcctatcccttgtagcatgtaactgttttttgaattccttagacaactgttcccaagaggtgattgaatgatgagtaaatttgttgaaccagctgctcgctgctccaactagcgaagtggggaacaaaatacagcgtagattgttcgtaacattgctggctcacatgatagtattgaaatgatttaaatgcaagaccaaatctgcggtcccatcatatgatgagacatgtgggttcttgaacccttgggggaatccaatattcataatgtcttgatggaaaggttcgagttcctcattcaagtcgtatcccgactactttccatgttctacgagttgatacctcctaaatttgtcctccaactcatcaatttgcaattggata

SEQ ID NO: 86315 - DNA, 668 bp, Cannabis sativa
tatagtgtggtgtaagattgtgatcaatcctatctcaattatagagtctcgtatgctgagaatacactataatacataaatttatccatcttatagaatctaatagcccactctattcttcagtattgaggctggcttggaagattgtggtgtcaactcttcagcaaaatttcttgcattggatgatcataattatactaaaagatagcgaggattccctgataggctacaaaaggtattgcctctctattcattagtctagttttaatctatatattatgttgagatccttgggcttggagttcacattggataaaatatttttatcaaatccgcttccatttttttttaactctgatatggactctaaaaaccagcacatgtcagttgccatcagaatatcatttcaaggtattagtgaggtgtacatagagttgtactatagatatatgttaggcatattagtagccattagattagcatattaggatatttgtgaagtgtacataaagttgcactgagatatcaacaaatatctgctaggttttcagaaagtatgaactaatttttatcacatcagtaccactagagtactagtataggctgattcgtggttagtcatacttttgtcaagaacgttcctgacctagttatagaattgtgattag

SEQ ID NO: 86316 - DNA, 1027 bp, Cannabis sativa
  modified_base (131)..(132): a, c, t, g, unknown or other
agaacacactaaaacacttatcggggaatttaaaattgaaactaagattaaccctatcgataattaggatgccaatacgtaaattacgtgaaagccccaaccagcagaccggttcccaaccggaaccccanntcctgggtaccaaccggtcgaccggttgctagaggcttcccagaaccggtcaaccggttcatagctggcaacctcaaaaacgatccccaccaaacaaaacaagaccaaatcttctaaaaacttccagacctgcgtacactatactaaaccaatcccaagcaccagaactcatcaaatccaataaaatctcaatccaccattagagagctaggtttgagttttcaaactcaatccttgccaaaaccttgaaataatccacaaagataactcaaaacaacttaatctattaccaacaagctccagaactacaattagagtaacaattatacacacaacaccaaaattcccaaaatcaagcttaaaacctaacctatgcttactaatatcaaaataggaaagctaggaatcaataccttaaattgaatcttctttttcaggtttgcaacactacaattccaacaaaaaatcccttcccttggtggttctttggggtgcacgaaagagagaggaagagagagatgcttctaggttgcttcaatctatcccttagcttttctttctttcttcaacaaatattatcaatattaacttaggataagcttattaaaaggcagcctctaatacccactaaaagccaaagaaatacatggtaaaatgacttatttacccattctattaaaaccaaggattaaacaacctaaggacaatttggtcattttcaaatcccgatctttacaacacctccaaaacctaacaatgacaccccgatataactctaaattatataaaaaaaaatacgactctctaaaggcccaacgccgctttccacagcttccgaacacaatcacagaaattgagcaattcacataaataacataataaacatatacgaact

SEQ ID NO: 86317 - DNA, 614 bp, Cannabis sativa
tataaacgaattatacattgactaaaatgggaatctgttgttgttactttcatttctatgctgctatcatatttgattttttttgcgcaaatagtagaacgcaacattgatatgctgaaatgagtcattatttaccaattagtatgtatatttgtgttgagtttaaggtatgtatatatgtataaagaaaatatatagcaattggtattaatataataatttacctcaacagacaaatttttttgaggagtttccaaatcgtaaaactaatgtttacgattaattgtattaatctcgaaatcaaatgatggttctaatttggcttgatcatcactgaaaatctttcttctaaaataaaaacaaaaaagaaaaaaaatgatataatatatgcgttatatcattacgaatgcaaaatagtgaaaatgttacctattttttcttgtagaccaatcttaaaccattcattaaaggcaatttgatgcaccgtatctggtttctcaaacaaattggaagaaaacgggaataaacctttacgtttttcaattatttttggtttccctatcctttcagctgaaccaaattcactaatgaatggagattgcaaatgcagtcct

SEQ ID NO: 86318 - DNA, 779 bp, Cannabis sativa
attagtatttgaatcttcctagcagaaacaatggtgggattctttggtaagtgtatttttctgattagctgatcagttcttcaatttctgtgtccagatgacaagactttaacctcgggagaaatcgaagcaacaacatcaatgcaaaactgactgttctgagattagcttacacacaaccaaccgaacagcttttgtacattctaaggtgatcataggacagggatatacagaacttgctaactggtgtaatctgccaccgtctaacacttttgggtctaaagtagtagatgtatttagttctagttctagttagtctaaaactagtagtgacttggtggttacttctcttccaatgcttgagacttcagatattgaggttgagctactgtcttgttaacttttcaacgaagaggctacttcccagaagaagctcgtggtgactttagttacatggtatgttattgcatccaaaccagaacaatgaatggcacttgcagctccgtcaaaattttctgctggttccgtttcggatttacttgagaagatgatattcttattctttttcattttcttctttcatttataattcttcatttttagccattattttcatgggattgggatccataacaaaattagtcgatttacaattctaataggaaagtacagattagatttatgggttaatcttagatttggttttttcttcttttgagacatacaaaatcccatgcgaaaattggtaagcggttacaacttttctcaagtgacgataa

SEQ ID NO: 86319 - DNA, 687 bp, Cannabis sativa
tgaaaatgttagggtaaatctttttgcttggaatatgatttaaaaattattatttgttattatttttcaaaaagaaacttaaaaacattaaaatgattacaaagcaatgaaaataaatgcatctatttatcttttttaagaaaataattttaataagataagtattaaattttatataaatactatataaaaaaatattaaaattctacaattttttttaatagtgaagatttttaatataacaaatagtgagtactttaacaaatactcttaaataattaataaatattaaaccattattgttgacaagtttgacatgaaaacaaagaagtaccaactactaaattgcaaacataaacaatttcatagttaaatcggcatgtgttgcaacataacgaatgcgaataatcatccaacaaaggccacgactttcgttttcggtttggaaattggcactgaaataactttggaatgagaaagttatgattttgagtaagccataatttttgagctatatgcttcaatttctctcggcattctctcatttgggcacttgttttaacacgacccaacaattgtattccatgcctaataccactttgctttgtttcatcatcactttcatcttcttctttacaaattaagatgatacccataaaataagaagctccaagatgacctgcattg

SEQ ID NO: 86320 - DNA, 667 bp, Cannabis sativa
tcatcaacaattaagatttgagtgctttcaagaaacaaacagagccatctgggggtcagacctaggacctaacgcccatgttaacctggtgctaggctcagcgcccaggttgacactttttcaacctagaccaattccaaggagtttttttggggaagtattctaggaatattctctatttttcgtcaaatattaagatacaagtgtttccaagaatcaaacggagtcatttggtggccagaaactggacccaactcccagattgacattttgtcaacatgagctatttccaatcattttcccaaaagattattctggacattttttttgtcaacaaaaataaggaagaaacaagtgatttcaaggagaaaacgatatttctatagagcctgaacgggatcccagtacctaggtttacatggccttgcacccacgttgacacaaattctactttggatattcttcctagaatggtcaaaaatggggtaggataccttgttcgcaatcttggatgccataaaagtatcaaaacaagcttcaggaaggagtccgggaagcacccaacgcccaggttgacaactgggttcctttgctgggttctacttatcagaattcgattttgtttcgaacattcaactatgttctttgtagtaaacgagagctacaa

SEQ ID NO: 86321 - DNA, 722 bp, Cannabis sativa
  modified_base (185)..(199): a, c, t, g, unknown or other
gaatcaatgtacgaactgatacttagtgcataacgagaaatcatatatcactaaaggaggatagtgaggcaccggagaaaagtaacgcataacctaacttgcaataagcaaacttggtgtaaaagtcgaattggctcgaagagcaggaatgcgagatgaccatctcactacgaggaagctccctnnnnnnnnnnnnnnnaacaggagcgaggctcataaccttggtaagtcagaagattttcatatacccacaatcgacgtaaaacatatcaagttgacctcaaaaagaaggatggttccagctcgccgttagaatcacttgagtctagtttttttcgagacatctccagattcaactattaaagacgtgtttaaaacatgatatttctaacctagtaaaagcgagaaaattacagctaaatgattttcaaaatcatacaccacatttacatttcataatatgtaattagatcccacgatttaagggataatgactgtaaattacattttggtcagctttgtatttaactgttactatgcaattataaatagtggcaaacaatctcaaaaagggatgaaaaaaaaggcctcttacacgggaggccctgaaaaatcatactcaaaaatctgaataagattcactcgtggactatgtagaattttaactgcaaaatcacgtaaaaaaccctggtgttcatttttttttatagctttattttttc

SEQ ID NO: 86322 - DNA, 1205 bp, Cannabis sativa
aaaaacgagccaatactcctgatgttggaatgagtgtacttagtgaggtacttggtgaaaggcatggtcataatcgtggagtggggcgaaaattaaagggacaatctttatcgcagaacacacaacctactccgactcaagatatgcctgtggatccaagagtggagcaaaaaattgataaattgaccagactaatgttatggatgtctcaaaggttgggacctgatgttcgtctacctactgatgaggagctgctcggaatggcaatgcctcaaatgtctggaggagggtctgcttcatcttcacagccagctgggacttcgcaatatcaccaagcccagcagtcgcctccttttatgtatcatttgtcatcacctccgcaaatgtccccttttccttggatgtcatcgccgattttgcaaatgcaagtgatgaacatgcagcagacaccgaaaacacaacagatgcaacaacatctactacaaatgcagcagatgccatcgatgcagcatacatcacaactgcagcagcattcaccacaaatgcagcaaaggtcatcgatgcagcaaacatcacaaatgcagcaaccttccatgcagtagatggcatcgatgtagcagccttccatgcagcagatggcatcgatgcaacagactccacagatgcagcaggcttccatgcaacatatgtcatcgatgcagcaaacaccacaaatgcaacaaccttccatgcagacaccacatatgcaaccatctttcatgcaacacacaccacatgtgcagcagatgacacatatgcatcagatgtcacatttgcaacagatgccttcaatgcagcagacaccgcatacgccttcgatgccattgatgcagcatatggcaccaacgtctcagatgcaaccattgccatcgatgcagcaaatgtctcacatacagcaaccatactatccccaaatgccagaagtatcacaacagtcttactatccccaaatgccaaatattacagaacaacagtctggagagaatgatgatactgacgatgaggattctacacaattgggattatagtattgttatttgtaatgttataaatatgatgttataagtattgtttatttgaatgtttattttagttattgttattttaatacttttattgtagtttggattttaatttatgaggtagaaaatacttttattaattaa

SEQ ID NO: 86323 - DNA, 968 bp, Cannabis sativa
acttgcccttgttagattattcaccaggattgataatgtcagttaaacttattttttgttcatgcaaattgatgacatcagcaaagcttagcttcattagttgatcgattccaagattcttctacgttcttagacacacatatctagggccattcgagctgtagtattttattaatgggcttacataggctttgcattgcttattaagtaggattatttccatagatattgtaataagaaacctagtttacataaatatggcaaagaaacttagtgggacaaaatatgacatttaaaataaaaaaatttaatatatatgggatatgccatttgtattaccataagtaatattaaagttcccttcatattttttttaaaaaaataaaagaaatgaaactataatgatcgtcggagttgtcactagtaccaaaaaagtcgtgcagagttactgttggtgccaagaaagtcaccgaaactggtattgagattgagtaaagttttagaattctcagattgattgttgttttgtgatgtttttgcatccttttctagatctaaactctgatccagaattgttcacctccttctcagaatcaatattagattttgagttttgagtttcttcaagctttgagtgtgttcttaattcttggtaatatttcttttaagatttcttgtctatctcctcccagataatctttgcttcaatttctactgatcttctttgccaaactcgctcttataccactgtaggaattttacttatctaatcctacaccaatagaaaacacattatcagtgtaaggtctattttcacctttcacttgttttattgaaacttgacttaaacgacaatcacaagggcaaaacgaccacaaaagttgtgtcgtttaacacttcgtctaagaaacttttcaagaagtgtctcgaagcgctgacacacaaagcaaacacacaatcacactttt

SEQ ID NO: 86324 - DNA, 767 bp, Cannabis sativa
tgttatattttagttctttgaaagactaagtaattacacaatattttaaaaaataaagtgtgtttgaatatgaggcattaaatacctaagaattcctacaatattatttggcaaaatagttaataattacacgaaaaaaataatatttttagtagtcaatatttaaaatggaaaatttgtatgagaattagaaagtctaattggaaactctcaatcacctcgaattacagtgttacattataaaaatactactccaatcgtgttctaaaaaatatcaattttgacacatgttaaaaattatgttaaatttggcacaagatataacataattttatatttgactcataataaattttacctttttcatttattatagtgccgctaattattttgatttataaacttttacataattttatttactatattactgttatttaaacaataaaaaaataaaaaataatgatatttatatatttttaataaaatattaaataatatcaataataataatactttttttacatatttacattagttcataattataaatagtgggctaaatataacacatactctttttttttttttgtcggatttagtacaaattttacattttccattaaagatggtctaagttatatttttgcatcaattaaaggactgtcatgttattattgacttgatacttaacggttaattaaatttaaatatttatctgtagccagaaattgaagttagagatttatgtcacaaattattttttt

SEQ ID NO: 86325 - DNA, 673 bp, Cannabis sativa
ccgggaaattattcttcccaccaaagatttttccccaaacgtaatagccgcatcttcattctcctcccaaacctcctcctgatccatttccaatctgctagtcatattaacaatctcctccacattcacagtatccgccgtcaccatcatcagcccaagtaacaataaaaactcaatcatgagatacagtcccagaagactatcttgaaggaagggtcacgcaaagaccatttttacgtcgtagtttaataaattttgttctaattcatatacagtatatctttttttattttttttaaataattttttattttaatttttttattatagtatttaaaatataatttatttttgttcaataagtatattttttttaagtatatgaattgaaatgaattgaaagaaaacagttaaaaaaaattggtataattaaagttataaattttatataaaataaattttttttaaatgagtgtctttagaaattttttgagtgtaaataaaattttccctcattattgccttgcattgaggatgaaatttctttgaggccctcactcgagcacgtacaatttttttagagaaaaagtttgtaagaaatgttatagcattgattcaaaaatagctacaaatgcaccatagtaatttattctataataacaatatgttttaa

SEQ ID NO: 86326 - DNA, 1203 bp, Cannabis sativa
gtcttgtttctgaggaattaatcaaatttcattaagattatcgaaattctaagatactaatgtaaagagaaatgattgattagtgacccctctccccaatggccaaaaaaactacatatacgattgtaccctaagtattgattcggtcacattgataattgaaaatatgaagctctataacgcaataataaataatcatacaaatcagagacactgtaacactaattatagaaaacgaaataaggaagaacaataataatgagactgtcttggcagaaaaaagaaaatgcaaaagacataacatgagattatacattcaaatgatgaatcctttgatgacacaatagggtggagtatatagaagttgtaacctgcgtgaattgacgtaattggcagagaatgaagaagtgacgaagacggatggtggccgaaggaaaaagaagctcactccattttcacagcaagcttcataggggtggtgctgaagttgaagcagaaaaagaaagaagaataacacccaaattatttaaagaaatttgtactgtaatataattttagaaaatttgacgcaaaaaattattacatatctaccgttatttatatttatgtatagataaatatatttacattttaaaaaaaattatgatttattttttaattataattttacgatttttataaaaataaattacaatacaaaaataacataaaaacctgactaatttttttttaataaaaatctataaaccataaaaatatttaaattttcaaatctttataattttctttttatgaaaatatttccaaatgaaaaagagagataatttatttatttatttattttgtgtacaaaaggaaggattatcactgactgcaatgaatgggttgcattggtcctaaataacacctgtagtggcttaaatgggcctcacgttatagcacatagagttagtgttagtgttttttttttaagaatactttagaactatttttttattatatattaactaaatataattataaaataattttaattgataaatactcttttttataattaaaatattaaatataacttcacataatttaataaaattagaattcttaatgcaaagatatgacttataaaattggtataaattaaaaaaaataataaaaacaagtaaaaattaaaataagaaaaaaaaaagtataaaagttatt

SEQ ID NO: 86327 - DNA, 518 bp, Cannabis sativa
aaaggaaacaaggagaaaaagaagtcatgaaagaataccacttggtttaaaagcataatcaaccatttagagcttagtttactgtggaattttgatatttcaaattgccagaaagaaaaatacatgaagatatgtctataattggattttttttaataaaaatttcattgtaaaattggcctaagtgtacataacgcaacaactgaaaaagctccagtgttgcaagtcaaatggtcaaatatttacctaacatgataacagtataacacatattctgatcataaacatttatcatataagtaaatatgttatagtaagaagaacaagatcaattttcagaccaaacagatcagaaatactgaacggaaagcaatagaaacactaatgaagaattcgaaagttgactttgtctgaaatgtaatgcttactttgttcatacaaaaaacatcccaagcatatttctagagctttaataatgtcttagaccagtcatgtcaggagggtaaaagaatttcaag

SEQ ID NO: 86328 - DNA, 866 bp, Cannabis sativa
tttttttttttttttgaataggaacaaagctgactagaaataactagcatcagtagttaacttaggcccttgtaactaaatttgtcggattggagatgagttttcaaagttgttagtgtcatctgacaaattgtgatttatgttaaaaagtttcacagttataatcatcgtgagagatagctttttcaattgtattatcttctctgttactatgatttttatcctattacgttttacctaataaaaattttaaacctcttagagtactcatatcaaatgttttaaaatagaatatctctaaaatatttagtgaattaaattaaaatcacgctacattatatgctctaaactcttctattttaaaacttctttaaaattgaatattcatgttctatatttatagaatattattcattactctaaagatattttattaattatttagagttttaattttacttaaataagtaaatattaatattatttgaataaaatgtattgaaatttaaaaaaaaaatagaattttagtttaaagaagcggatgtatagtataatataaaaaattaaagtaaaatagaaataatataattttagtgacgtattttaatgaataaagtaaagaaactaataagagtcgttatgaaatatgaatcatatatgtagattcaaaattttaacacgtaatggattgcttgtttcaaaaagtttacccattgtacaagaaatatacctcttaaccagcccaaatttgaaattggaattctgtcttacacataatatctgaggaacatcaatatcctcatagcctcataggtccttagaggaactccaaccaacaaccataatagtattcttacatttggtga

SEQ ID NO: 86329 - DNA, 518 bp, Cannabis sativa
caaataatacattaaatgcaaattaaggtttaaatattaatcaaagtcttatttattcaaaaaaaaaaaaaaaaaggtcacagtcttgtaaattaatcctcacatgatttaatcatttattgactcaaaatcttctcatctaaagtcttaaatagcattgcacttgttggaaaatacatttttccttaaaaaaatttacattttcgtaatcaaaagtaacaaatatgtaactgaacctcacaatttgttatcaaagtatatatcattattgtcctcaattccaaatgtcaactgaaaaaaacaagtgatgatgcatgctgtgccccaaacaattctccaaagtcctttgactcattgccattccaatccctataaggattttctctatacttactctatgtgcaatgaaagaaatggtgcttcaaaatttgagtttttgcaaatatcaataatgtatatgaaaatataaaactgtatacgtctgcaaaagcagaatgtaattctgttactgcaaagac

SEQ ID NO: 86330 - DNA, 753 bp, Cannabis sativa
aaaaataatagaaaaatctataagtttcggtgcacgttttatatgaattgtttaatctatgttttttttttttttttttaatgatcgtgtacttgtagctttttaacattattaaaatttgaataatttacaaaaaaaaaataaagttcaaatatttattcactatgcatataataaaaaagagttgggtgtatcacaaaatatttaaatcttaatataaattattcaatttttttaaattttttttagagataactttaaataactacaattatactaaaaaaaaactttcataaatactaaaataaataaataaaaaaagactaattaaaatttttgctccacaaacttaaacatgtaccaaatgatgcccactgaacttttaaggttgttaaaaatgccccataaattattgagatggttgaatttaatgacttttgtctaattttaataattaaaaaaactaacatgaatgaaagttcaggggacatgatttagtgcatgtcaaagttcgagagacatgatagatatcaaagtttgtggagtatggtttagtacataaacaattactgaaatggtaaaattgaatgaaattagacaaaaatccttaaatctaacaattaaaatacattttttaacggcaaaaaatattcaaaaagcatgatttacatattaaaatttggctgattagtaatttttccccctgaactttaacatgtactaaatcgttgccccctgaatttttttggccgt

SEQ ID NO: 86331 - DNA, 967 bp, Cannabis sativa
gccccttaaaattttttaatgaaaagtgcttttttaaatgattatgaagggtatatctttcataatcctgttttgaaaaaatgcatgtcctcgaattttggcggttttgtggtttcaaggtgtattagcatttaatgaccatcttttccacttctttttcaaattctacccgttgatcaattgtttccctgattcaacggagattgacctaatagtataaaataaaaaaagtaaccacctttgcactaattttgccattttagaaactctagagatttttgaagcttttctccagaaaaaccattcctaggtttgcccgaaaccttgcttgctatctctatcattaacgtttttcctacgagttttatccgatttaatttttgacttcaagcatttggtgtgatcttcatgccgttcgttgattcgcagattgcagagccctttgtcgtcccaaaaactaattttaaacagtaagtgacttttcttcctattttcttaaatgcctttgctgttgtgtttctgggtttgatttctaatttcttagtcagcacctttgttacctcattcgtttttagcaccttttgggtagaattgattcagggtaaatattagggtttaggtagaatgtaggtttttcgaaattctccaatttaccaacttctggtttgataagtttcttccaggaatcgggattgcttcctccttgcaacaatgtcccaatctagttcagaagtttattgtctagaagaattagaaatagagtatcagctgaacttgtcgtcccatataaacccagaactctaggacccaaatccaaattagaggtaaatgatgcaagaattagagaacacttagtgaaaattcaccaagaagacatttctagttgccatagacgcttcttgcaagaaattattgaaggcagacactgtttcttgcgagatgctgcttggcctgaaccccccaattt

SEQ ID NO: 86332 - DNA, 1475 bp, Cannabis sativa
cccaattcttgtcctcatcctttgttttgcttggccataccccaacaatcctcctcttgctttcctgctgtacccgattcactattgctgtgattttccattgtttttggttccataacacatcattgcgtgcaccctagatctggtataccaaggcagccaacatagttaacatcatgctactccttattgctgatattcctttcattttgttgataagatgcagcagctgctgcaattcagtagctttagtgccccattgcagccgtgtcttccattctgtaaggcatttgttactatattcacactggaagaagagatgttgtattgattcattatccttcccacaaagtaagcaagttaagtccacctgtgtgtcatatttacttattctatcttttgttttcaatctgtcccacaagactagccataggataaacttgtgtttgggaataacaagtctatcccacacttgtttgcaccacaccttcttctctggcctattaaacaacacatgatagatgcttgaaatgctaaatttccgcataaggaaggttgtccgatccatcttagccttcacctgatctctaactccaatcaattttttccaaaaccagctgcactcggtgggggcttcataatcccaccagcacctatctttcaagtatacattatgaatccatttgacaaacagacagtctttcttgctagctatatcccatatatacctttccatagctgctgtgttccatttctgaatgtctctaaggccaagtccaccagcacttttggatttgcacatatgctcccatgccaccaaaccaggccccatcattgtttgattaaccttccataagtatgatctacaaatggctataagtacaacattaatcaatgttactcttcccatatatgacgaattccgagagctccatcctctaattttactaaccatcttctctaacaagatctgacattcagaatgagatattctttttgaagagatagggattccgaggtacctgaatggtagagagcttcttttgaattgtgaggcctcaaggattcttccaacttcagtctctggcatgccagaacaatagatcgccgtcttctgctcatttggcattaaacccgaagttgaagagaaaagtttcagccctcttagcatcaacatgactgaaatgaaatctccatgactgaacaccaacaaatcatcagcaaagcacatatggttcagtttaagtgatgaacatctttcatgatatttaaagccaggcaaatcaccaattttttgaaggattcgggataggtattccatccctaatacaaagagaaggggagacataggatctcctcgtcgcaaccctctctttgcattaaagaatccacacatagagccattaaaaaggagagagaattttggggtcctgatgcagctcattataagttcaatgaactgaatcggaaaccca

SEQ ID NO: 86333 - DNA, 633 bp, Cannabis sativa
atatatatatcatcatacaccctagagtactagagcttagccagtatatatatagttaatatataaatcaaataaggagctatatatatacatataaatatagagagctgggaaagtaaaaaagagagagagatattatatatcagagtataaatcatatatatataaatgggaagtaatacaaaaactgagtcatactttgttttcatgaactatgatcctgaatatgagcgccttcgagctgataataagtaagtctatacatataataatcatcacattttactatgttattattatatatatagatgagatttaatttgtgtttatatatatatatttattagagggaagaaggaaacaaatgagcttgatttataccttagccaaaaacatgatgagatattagcaaggactcttgagcctggttcctacaagaaaatattgtctcttgttattgttgatggattttcagctgagatcactgaacaacaggtatatatttttatctttatatttttcaattataaaaaaatatgtaaaaattttcatttttcttcttattaggccaatgtgcttagatctgccaaagaagtgaggttggtggagaaaaatcaagaacttaaatgaatc

SEQ ID NO: 86334 - DNA, 868 bp, Cannabis sativa
acactgatatcatgctttatttatttagagattttaggatgttgtgggtgaaaggatcagcaaagtgtgccttgaaatcttaattgatagtgttttagttgcgacaacttaataagtcaagcgtagtgttgataccaaaagtataaaaaccaaaattggttaaaaagtatcgatctattgctttatctaatgtaatgtatacaatttttgcaaaagcattatcattgaggatgaaaagtgttcttggtcacctcatctcatctttctaaagtacatttcttccaggacgatcgatacatgaaaatattatggttagttttgagctacttcattcactgtttaaaagaaataatgggaaaaggggatttgtggcactcaagctttaattgagtaaagcatatgaccagatggaatggaggttcttagccagtataatgcgatagtttggctttgctgagggctgggttagggttatcatggactatgtgatgaccttgaagtataattttttaatcaatgggcaacctaaaggccgagtgattctagcgagagggttacgatggggatgtccattatctccttatttattcctcttctgtacagaatcattgtcttcattattctcccttgcagaggccatatctgaactgatgggatttaggtgttcgggatcgggaccacatgttactcatttattctttgtagatgatagtcttgtgtttggtagggcaaatgaggtgatactaaaactataaagcatatccttctaacttatgaggctgcatctggtcagaagataatctttgagaagtctgttattacttttagttcgaatatgcaatttgtggaccaagatggggttttgaga

SEQ ID NO: 86335 - DNA, 813 bp, Cannabis sativa
attatttcattttattttcatatttaattttatttccttttttttttagatatgatttgagaggagagatatgtacaaaattttgtttacattgttctttgacttagccattagagaatttctgaattttaacctctatttttcttttcaaagaaaaaatatcaaatctcttagttttgattattctttgataaacaacttttaagaatttttagaaaaaaagagggaggagaagagagaagtgaatgatagtttttttttaaaaaaaaacagagaaatgatagtgtttttaataaattattatatatgtaaaaaaaataaataagaaaataatatttaatggacataaaatagaataatgacatattaaaaaagattaactctacataaagtggtttttaatatgaagtattatctaataatataatatattatatttatatttaaaatttatttataatttgaatttattaaatatagattaatttaataaaattatgggaaaaaaataatagtattttttattcaaatactattggcaaaatttttgaaaaaaaagtaaggagttcactatatttggagatagtggcgaaaccaactagatattttaaagggaaaagaaaaaatttaagtattaatgaaaaatataatttttattaaaaaaattataaattttgtgagaataaaaataagtatatgtaagaataaaaataaagaatgtagattttttaagcatacaaataaagatatatgggataaaaataaaaaatataaattttttgagaatagatataaaaatatgtaaggacagat

SEQ ID NO: 86336 - DNA, 606 bp, Cannabis sativa
cgaccctctccctctctcaaaccctctcaattttgtaacttgaatttggtgtaattcttgcttgagttgaagagtgttgattgggaagaattgtgttgaagttttggatatagcttgtgcaaggaattaaggtagtttcttgctgaattatttggattttaaatgttgaatccttgcttaaattgttagggtaaaaacatgttctttgttgcatgacagtgaattgatgttaatcttgtgaaaattgagcttcttattgttgcatgcttctttgataagtttgggctgagattttaagctatttttagcttggatttatgtgtttctaagatgtttgattgctggaaaattgcttgagttgttaaaaaggaaactcttgttcttgagcttgactttgcttagttgaagcatgaactttgtgattttcttatgcaatctgaattggggatttaatgttggatattgatgcatgttattgtgttttaatccctagtgattgttagtagctttgatttgtgatttggagggttttgttgtgaatttgaatgagtttggttgagttgaattgttgaaaattcgaagaggagctgctggttttctgggttc

SEQ ID NO: 86337 - DNA, 1941 bp, Cannabis sativa
gctagtacggttcactgatgcctggttattggtgcaagtaatctcggttcagattactgatgtaggatgaaatctaagtgaatgtgatgtatataatggcgattatgtatgataagggccgatatgaataaagctatctttatcaaacttaccgtttactataaagacctaattcatatcgcaatgatgatcaatagtagatcggcctaaatccttagtaatcatgaactcatgttcatattattagtttcttttatgcactcgttaaagtttctcagagaagatgattcatacaacttctgttttgggaatctaataatatggatagctaggaacatgatctaaaattatggaatcctaacttccctaacatatcaaatattgattccctttatatatttattatagaacttgtgtgaaaatttagatgggatgaattatacttcaactagtgaattaatggtactaaaggataaaaaagtaattagaagggtaaaacaataatttgatcaaaactaattacgtaccgacaaaaagaggtctaattactggaattgattatatgaatagaaactatagtaaaactcaataaatatacttctataattactaagacttcaattccatatttatagtagagtaatcatggaattaataaacaggattatttggttgataagactcaatcaataatctggtttattggagcttcaaattataggtctatggaccccaaattgccactttgaaatactaccaagactagggataaagaattatataatgttatttggaaaaatctattttgagttagcaaaatagtaatttttaatttctgtaataaataaataagttttcaaattaatgaaataaaaaaaaaagacaaaaaattattaagacaaaattcatcaagacaataatcgttaaggaaaaagttatcacgatgaaagatatcatccttgtcttaattgagacaaggtaggcgcctaccctatagtagggtgatcctattggttttgtctttttaggataattaattatttaattagttcaattagataaatatttgaatttgaaaagtcgtagatatttaaagttggttgagatattccctcaaagttagttgagagattccttcaataactgaattcagttataaatatttatttaaataattaaatatgatttaattaatggagaattatactactataaatagaagtgtgatttgagaaatctaaagatgatttttcgcactgctattttcaaaatactaagagaagaaaaataatttttctctcactaatagttcttgctgatcatgctttgagaatttatcaagaagaaattctacacttttcgtaatagtctacactattccttgagtgtggtagatcgatttggaagactacggtgtgagtttctaatcaacttgaaaggatataacttacaaaaagtttcgagaataccctgatagtcaacaagaggtatacatatatttctttcatgtgattcatattttgatttaatgtttatacatctggagatcctttgggctattgtacgatgataattagatatacaaatcttctgttgcgtacctgatttactaccataaaaccaacaattagtatcaacactactataaaaactagattttgtgttagtatgtcagaaaaatttaaaaccgacgctattaaagaactcgtgaatttcatgtcagttatgcactaatgccaaattagctttagatataagattatttgcttcagttttgcaccgacgctaacattgcgtcggctcacaaccgatggaaaaacttctacgcaaaaaaaaaaaaagaattaaatcaacagatgggccaagcccattttacataccttaaatatatataacctactactttcagcagccccatataccactctctctctctctctc

SEQ ID NO: 86338 - DNA, 532 bp, Cannabis sativa
attgatggagaggataggaaagatagagagaagaaaggatgaaaatagaaatagctgtcctcatatatttggtattaagagtggaatggaaaggatgtagaagaaattaattgttaaaattataatattattttttaaagcataactatttataatttttctgaagacaaatatgacattttatatattgtattttttttttttttttccttcacatttggagggattgaaaaacttgaatttagagggagaaagtctccctccacttatcctctcccttaccctccccttcttaccaaacaaaggatttttcctctcccttcatctctttccctccatccctctccatccagccttccttcctccctaccaaacatagtgtaaggtaccccttggcatttctcattcctcttccgatttgctaatggatatgatttataacaccacagtctagggatattcatccaatctgttacacccgattttgagaaataaaaaaattcaaccctgcgactttgtgttacaaaaatta

SEQ ID NO: 86339 - DNA, 596 bp, Cannabis sativa
ataacataaatcgcttttttaacaactcacataataattattaaagcaattcaaaccgtaaaaattaaaaatatataatatataatataatttctttagtaaaatattgaattatttagttttaaaaaagatttatattttcagcaaaaataataatgataacatcaagaattattattgacactttctttcttaatttttttttttctttcatagaattttggattatgaattctattacagaaagttgcttctttcctatctgggtgtagttggtatttactcaattatgtatttatttgttgaattaggccttaggataataagtaaagagggtgaaaactgctcataatacagattaagacttctaatagagaaaactgtatgaattggacagtatatataggagataggattgattgaatgaatgggtgatgtatgggaattgtatgagattgagctttggctcttgggagagttgaggtttctcaaatacctcaggttggattttgctcgttaattcgttatcattttattcatctgatatgaatatttctagttacagtttttctacactggatggtgtatatatatat

SEQ ID NO: 86340 - DNA, 837 bp, Cannabis sativa
  modified_base (284)..(289): a, c, t, g, unknown or other
  modified_base (389)..(395): a, c, t, g, unknown or other
agcagcaatgtacatatcagccgtcgtggcacgacccagtgaacaggatgctctattttgaatgtattttgggaatgaaaagtttatgttgtaagaaacactattaaaccagtttgtaaatattttgaaaatagggggaccccgtagttaatattacttatcgtttatcataaaacaattttatatgtctatttttaattatcaaaatttaattacccacacttttagtataattatatagtatatgaaataagaattttataaaaacacacacacacacacannnnnncacacacacgtggcgtccttgttggatagggcgttacaaaaactatagaaaaataagatatgaacaacacgtttttttacgtgattttgcagttaaaatnnnnnnnagtccacgagtcaatcttattcgaatttctaagtattttttcagggcctctttcataagagtttttttgtcccttttttgagattgtttgctactatttataattgcatagtggcagttaattacaaagctgacccaaatgtaattacagtcattatcccttaaatcgtgggatctaattacatattattaagtgtaaatgcggtgtatgattttgaaaatcatttagctgtgattgtcctgctattacttggtcaaaaatatcgtgtattaaacacgtctttaattgttgaatctagagatgtctcgacagaaacgtgattgtattgatctcaatggcaagctggaaccatccttcattccaaggtcaacttaatatgtgttacgtcgattgcggatttatagaaatcttctgacttgccagggttatgagtctcgcttcc

SEQ ID NO: 86341 - DNA, 614 bp, Cannabis sativa
  modified_base (321)..(325): a, c, t, g, unknown or other
ataatgtaaattttttttacgtccaacaatgttggacataaaaactccacataactatataatgtctactactatttttgttggacatgaaaaagggatatagaaagagtattttgtagtagtgatagtattagtaagtgataaggaggtaattgaaaagggtttatgtcacaaatacacaaaaacaacagaaaaattacaaaaatacgatttcacagaattttaaatatttttacaacttttttgattttatttacaaaaaatacggtcattttatgttgtagtcttattaattgatttttgttatttgtatgttatttnnnnntattgttttgatgttatttagatggtattttcatgttacttttgtgtagttttcttattattttttatgaaaaatcgtaaaaatgtaaaaaaaaaaaatcttaaacgtaaacatgtaattttttttttaaaaatggtgaggtcaaagcaggaatatttgtggccgtggcgagatggctacgcaatgcctcgaattcgacttagtttttataataaataaaacaattgaggattgctctttaacaagcaaacacttgaggattgctctttaacggagatgacagacagta

SEQ ID NO: 86342 - DNA, 1318 bp, Cannabis sativa
gaaaccttctccaaaacgaaagcatcaccactaattatacaaacgagagagaaagataaaaggagatcagatcagaaaccttaactagtaggcgatttaggcggtggcagagaccgcttctgcggtgcctctagtgatgacacgtaagatgaatccgtagactccattcataaactgcattgttgctgggaagaaagttcttgcagatgctgatcttggtggtgaaaagctctccaatgtagtttttttttttttggaaattatcgatctgggtattccttctttctatgcatttatatatatatgaattgttaaagttatttttttttatagaatggtatttggttttggtttcacatttgggtcttttcttaatgtctcaatcttatttatttgttattttttatagtgatatgaatatgtaagagctaagaccattctataaatacatttgaactctatataatttgatattggagatagaatttttgagattaacaatgacaattcttttctaagtgaactagaaaattcttgtgaataatgtattgattgtaatttggggttctgtttatttttcaggaatggtttttggtttcttacatttgtggtcttttattagttattttaatgtaaattcaacttttgatttggttggactctggttgaaattcttgtatttcttttggtttacagattgatcaggaacgagctggtgtgcttgttgggaccgatatgggtggtcttactcttttctctgatggtgtcaaggcactaatagagaaaggtcacaggaaaattacacctttttttattccttatgctattacaaacatgggatttgaattgttggaaattaaccttggtttcatgggtccaaactattctatttccactacttgtgctacctcgaattattgattttatgctgctgcgaatcacattcgctggggcaaggctgatatgatgattgctggtggaactgaggctgccattatacctattgggcttggaggctttgttgcttgtagagctctttctcagagaaacgatgatccaaaaacagcttcttgcccatgggacaaggaccgtgatggctttgtcatgggtgagggcactggagtgttgttaaataattagtgaattgtggttttaaatcaaaattatttataacaatggtgataatgttgatgatatgtgtgttccatttcaaattatgattaggtaatggaaaaaatggagcacgcaatgaaatgaggtgcaccaattgtcgcagagtatttggaaggtgctattaactgtgatgcttatcatatga

SEQ ID NO: 86343 - DNA, 866 bp, Cannabis sativa
atattattggtattgtttaaaaatttatggatgcacaaactattttataggatcattttaaacaacttcaagctgatggtaaatggacacctgaaggccctgatgatgtgttggcgagggcattgggcacccctgagccacgtggacgtgttcggggtgtaggtcaaggtgtgactccttcacagtattgggacactccgaagcctaatagaaaaagacaacacaaagatgatagttcgactaaggctttgaaagaagcatttgaagaaataatttgtccccaacaagaacaacacaaacaggaacaaaaaagtcttgaagatcgactttgtaaacaagaagaaatgttaagagctatcatggctcagcatagcacgtcgggctccaatattggaatgcctagcccaccatatgtgccagattcaccttatatgcctgacccatcgacacgcgtgaccaccccaccatatgtgcccatgccaccatcgccaccacgaccaactacagcactacaaccattattacaacaggtaattataattttaccacagtatatagagcacaaagattaattagtacactaatcacttgttattcaccattaaatatggacatattttttaccatatatttatcacttggggtggctattcataataaaatttggtagaatggtagttctcatcatgtgtagagaggagaaagttactaatatataataggtaactttatttttgtctttaaaaagttactttttgatgaaaggtaaaatcaaattataatgataaatagcttctgacaataatgggtcataaatattgtaaactactatatcatctttaaatgaattattatatatatatata

SEQ ID NO: 86344 - DNA, 2694 bp, Cannabis sativa
ctttataaccctattttattttcttgtatacagagaagaggcgggctgaggcttcaagaattagggagaaatacccagatagaattcctgtgagaatatgtttttaatttacctttttcttttatgtatgcaaatgcaataacaattatcactatatgatagatttagataaaacccttgtaaataatttagtgaaccagttgatatgatgggtcattacccatttatttgattacttgttatattagtttaaaacaatataagtgttgatcagctcttatattttcttcattaagtcatatattcctctgttattgttgtaaggtaattgttgagaaagctgagagaagtgatattccaaacattgataagaaaaagtaagtcttgttgagttaaattagtattgtatcataattgtttgccattgtttcttataattgagagtctttactcaaaataataacaatgaaccttgctgataacagataccttgttcctgccgacttgactgttggccaattcgtctatgtaattcggaagagaattaaactgagtgcagaaaaggctatcttcatatttgtggacagtgtcctcccacctacaggtacttgttaaagggcttctatacattttgattttgtcacagtattcaatcatatgttatgaattttcaagtcattaagtactgaaatttgttgttggatattggcaggaggcttaatgtctaccatttatgaagaaaagaaggatgatgatgggtttctctatgttacatacagtggagaaaacacatttggttagctgcagaacatgtttgtcaatatcttttatcaatttccaattgatctattgaactataacagcaatttgggtcacataagtcatgttttctttccaagtatttaaatgtacagttataactgctatgtatatagcacattggaacaaacttttaatgaatcagttcgtaaataatttcatattctattgacatgtgaatgaattttcctgttctttttttacccttcaattcgcaatttcatagtgttcatggtaccaagtaaacttgttatcctttactatgggaaatttacagttgtgtttccttgatttgttcccatatgttaaatgtttggtatctttgttctgttattaaacaaggtgtgaagactcttgtcatccacaggaacattcttttagaatatttcagtcttgaaagatcaatttctgtaattttatgaaaggccaggttgttggagggattttgcgtagtgattcttattttgaggggacgaaatatgatatgaattgaaatatcattaggttggatctattttactcgtatgtaccagcactaagtattttcttttgtcctttttaccaagtttatagattttttttcgtgtagttttaccttaagtttttagttgatcgttagaaagcattatgcataaacagcaaatcaatatatcaaccagtcttttattctcaaactttgcagaaatgtacgagaatttagatatgtgaatgatcattctacaagtatgtgcctatgaatttgctacctcgattatatagctctcattcctttcatcctttacttctgaatttgctccctcgattaaacatagctttatcctaaaacattaaaattgaactctcccaacacattctcaattagatgaccaaaatgaaataatggtaataataaaaaactattataccgaagtcattgaaagtatcttatgtgataaattcaaaacaccacataggtatttttagtgaaatttacaaaaatactagaatttgggttaacttttacaaaaatgttgtcacacgtaaatagtaaaacacaaagcagtataactcaaaacaaaaatttaacacagtatagtgcagtatgaaacttataaaaaaacaaaacacagtaaaaaagtaaaaaatactgcctgacagtatttttgtaaaaaaaatggcaaaagttaatataatttttttttttattattatcagcaaattaaggtggaccatctttatagcctataattgtaacaaaataaaaatcacgacgaaagagaggtgattactataaattgttgatctagcatatggaggcgaatgggagctttaagtgaagctttttctgtatatatttttgtgacttaaaaacttatccgtttcaaaaaaaaaaaaataaataaataaaaacaccgaaaagtaagtatatttaaaacgactttggtaactaagagaaaaattaggatggagttacaaatatttctgtttgaaaactattcagtcaatatctaaatatttaaaataaaataaattaactaacagaatattattcacaacacataagcaaaatggctacttaaaaatagcattatattgtcaaaatattaaataactacgattatttgattatttgtggctaattgaggggtctgccattttcgagggtccaattgggaggaagtttgggattggttttgcgtgggctaattgaggttatgagttggcttaaaacctctgcttaccagaatatgagtgatagaaatatatagaatcagattgtttagttgtggctcaggcgattacaagtgatattatctttcataaaaattcacggaaaccatctacaaggccaaaaaggctaagtttgttcataagtctatacatgaaatatttaat

SEQ ID NO: 86345 - DNA, 1031 bp, Cannabis sativa
tgagactatggctggccagcctgtggaggtagtggtcaaccaggttgttgattccatggtcaacaagcctactgaggtaatagtttgccaaccttttagaggctaagtcgtgccgcagttggatcccatctacactcaattggctttgcccccttgcatgattctcgtagagcctttatgcactcctgtcaatagttgttcatcttcttacgtggtaacatatcttagaggagatattgagatatcacgtctgtgcattacgctgtccaaaatcagacacctacaagctatcccccttatttgtgctttctggtcaggtttttttttggaggtatgctgctataggtgtatccatgttggatggctacccaacatgtctatttcttttgaaatagggatgattaattcttttaagaattgagtgagtaccaagtttgccttggctaccaaggcgatgatggctagtcgagcgagtgcattagctattgcatcatctttagggactcgccttttagtatagcctttgagcatacttaacaagtcttaaaattagctcaaataggccattatccttttgcattgagttgtgtattcacctaggacatgacctacgactagttgagagtcgtggtatatgtcatggtatttagtctgcacttcttgtgctagcctgaggccagcaatcggagcttcatcttcaatctcatttttagaagctttgaaactgacctttattgcctcatgcaaccattggcctctaggtgccctgagggccatgcctgcaccgggcaggtggtcaatgcaccttcatggccctctcacttcttctctcgttcttacttttctcccaaatcttgagagatttggggagatatgcttttatatttagccatgaagctcgcaagagcttggccctgcaaggttgacaggtggccttatattggtcgagctcgatggcccaagtgcttcaggtttttggtaggcatgcattgctttatgagttttggcaggtaagagagagagagagagag

SEQ ID NO: 86346 - DNA, 699 bp, Cannabis sativa
ataaactacaaaacatccaaaacaatattacttttattaattaaatattaattactatatccaagcataaacatatatgtttgaatttgggattaaggtagatggagtttcatctcaaaattaattagtaatggaaggagtagttttatggtattttatttttacacattaacaatatacgactaactctaataatataaaatatatgtgtgcaacaaaaataacaaaaaataacaacaaaacaacttaacaactcaactttaaccctatatatatttagtatacaagaaagaaaaatgaaaatgtagaaaaggagagaaaactagcgtgatataaaagaaaatgtattttttatctgatgagaagatatttaaatgtataattacaatttaataattttatataaattattttgatgaaaataattttaattaatttagtaagggttaaaaaaaattaattaagattcttttacaaaatatgattaactaaaaaaattaataaaatatgaaatagtttgagtgtgaataataaaaaaaatgtaagtgaaaaaaggtaaatagctacacttgctattacacacatgcagggagcactatggcctagaggcccaaatagaaaaaatactttttgaaaaaggattattttcaaaaatatgggaaacattactaaggttatgataaatatggcataaaaagt

SEQ ID NO: 86347 - DNA, 785 bp, Cannabis sativa
gtgtatttggatatttttctgatcagaaattatgttattcagtttatttcactttgtacatttaagctaaagttttgatctccataaagtaaagtaggaccaaatgaaaattgacatgaatagatgaccatgtatgtaaatttttataccacattatcatgattgatctttgtcattgactgtgttgatatatgtgactattgatacaatgaaaaccgctttgaccctatgttgatatagttaatggacgaggttgtacatgcctacggttataatgacaaagttatgagctcaataaaattaatatatttatatatatacatatgtggcctagtgggagattgttagaaatttatttatttgaggccacaattgtatatataaaatatgtgttggatcatcatataaatgagtcaaatttatgtggtctattttgaaataaagtttataacttaatggcataattgtcatgattttttaatatgtggataccataaagacaatttctaatttgatgaggggctgaatagaaatagtcaatgaatatttgtaaatgttttgtcagttggtaatagagctattaatggtctccaatttgtagtgccgtatcttttcattatcttgaaaccccatcatcaaaagataaaagttcttgagaaagattttactgcaaaattagaagatcatatcattccaaaatcgattttatggactctggtacgcttccactaatctttgattctgttattgaatttctcatgaaataattagggctaaatacatat

SEQ ID NO: 86348 - DNA, 783 bp, Cannabis sativa
aagctaagtttaattttaattgctttaatttaattttatttttatgcttgatcaatttaaattttcaataatgaagtcattgaactgaatttactggtgtaacatttagttttgaaagtgaatcaatcagcataagttcattattaataaaaaataaatatttaaaccaataaaaaaattactcactttttaattagaaggtatttccttcatacatctttatttgaataaaattacaaaacaagctactattatgttcttcaaataccatctctgactggttgcaaaatatgtcttataagcttgttgtattttgaacatgcaagccacgttgctatgtagcacctttcttcattagagtcaaactacaataaccaaaaaatataaaagaaaactttaagtatgtttttgcaaaaactaaattaaaaaattacttgcataataataaatcacattagaaagagaactaaccgcaaaagacctgccatcaaacttacaacgatgaatcatgaataatattacgaagattccacaatcataatcatttggttgtctaggaacattagatgcacgaacaatacgaaagctagctaagttgaaagtagaaggtctgcttgtaaattgattctctaagcccaaatctagattgcgtaactacaattacaataaaatttaaaaataaataaactttaaattttaaaactatttaaaaatcaactaacaaatccttacaatatccacaatcttagaagattgtaatataggagagttctcatgagcaag

SEQ ID NO: 86349 - DNA, 894 bp, Cannabis sativa
accaaatgtggtggatacaagcagccaatgtagttgtaatgacagcagcaataacactggacttcttgctagccaaccaagtagtccaactcccaaagtctctagaccaagcagaaaaacccagccaaagaagatagcatctgtaactttcctagaaaagtcacactcaaagaacaggtgggcatgactctcattagagagaccacaaacggcacaaagaagcgtctccaaggaaatattaaatcgagtgagaagatccctggtgagaagatgagagtttaaagcttgccataacataaatctatgtttgggcaagttaactttattccagactatgccttaatacagaacagggtgttgaactatggtgctattatagagtaaagaacttttgaatttacccttacaaccagcagctaggatttgacttttggagaaactttgcctcaacgcacagagcttcttccaataccagcttgagtctagtttcatatgggtatcccaaaggtcacctttcctcaaataagtagcatgaatccagcgaacccaaagcacatcatgcttttcaaagatagcccagatttacttggctaaaatgactctattccaggtaggaccatccaaaaaaccaagacctccatactttttaggcaagcagactttttcccaagaaggaatatggagcttgcatctattaccatcagttccccaaagaaaaccacgacacagtctttcgacttcctttataatactttgaggcaaaaggaaaatactcatctagtagttccgaagacccaacagtacagaatgaataagttgaactctccctgcaaacgacaaatgtttagtagcctaagtatgcagcctcaactttattttctttaaaataactcc

SEQ ID NO: 86350 - DNA, 1973 bp, Cannabis sativa
cgattgcttctcccaaatcattcaattggaattcatcggctaaccacttctttacgtctaataaccattttacattgctttcagtaagtagaatgtcatcaagataaataactaggaataccactacatcaacatcaaaatctcccacttgccctaaaagtaaactgggcttcacccttagtctcatatttgttaaatgaaccataaaggattttgctggtagcgtctttgtgaatggatctgccaagttatgttctgatgcaatcttcaagactgtcacatcacctctctctactagtatctcttagtagatggtgcttcctcttaattttcttacctctcttgtggatctttggttccttggagttggccaccgctccactgttgtcacagtagcacagtttttcttcttctaaaactacttccagagtagtgtagaatttcttcaaccaaaattgcttccttaactactttgcaagctactatgtattcgactgccatggttgaatatacaatacttgttcgcttcatgcttctccagacgacatctcctccaccaatagtaaatactgacctagatgtcgaccttcgactatctttgtctaattgaaaatcagaatcaatatatctagctagtaggattcgactctccaccagaatatacaaccatgagatctctcattctctgaagatacttgagaatgtgttttacagctattgagtgttctaaacctagattagattggtaacgactaataatccctacaacatagcatttgtccagccttgtagacaacatttcatacatcaagctcccaacagctaatgcataagggtactttctcatttcctcttcctcttgaggagtctttagacattgatccatacaaagagtaattacatgtctaaatgatagttatccttcttggaattctccattgagaatctttcaagcaacttatcaatataatttacatgagaaagttctaatgttctttctatctctatagattttgatccaaagaatatcgattgcttctcccgaatccttcatttggaattcatcgactaacaacttctatacgtctgataacctttctacattgcttccaataagtagaatgtcatcaacataaagaactaggaataccactacatcacctttaatgaatttgtatacataggattcctcttcgttttgttcaaagccatactctttaattgctttattaaaggtgatattccaagatttagaggctttcttcaatccataaatagatttaagcaactttcacaccttttgatcttcccctggtaatacataccattctagttgttccaaataaatgacttcattaagatcaccatttagaaaactgatcttgacgtccatttgccatttctcatagtcataagtggtagctatggaaagaagaaggcggatacatttaagcattgtcattggagataaggtttcatcatagttgacgccttctccctgtgtgaagccattagctacaagcctagctttaaaggtctaaccttcccttcagcgtttctcttcttcttgaaaatctatttacgccttatggatgtaatatcttaaggtggagtttcatattcaagactttattggtgcatgctattaatgataaatcttgtagtgctttcaaaaaaaactttgaaccgtcaaatcggtcaaacaactaatttatcatcaattaggatactttttcttaatttgtaaattgatgattcaatttctaataaccgacatgaagtcagaaaatgatccatcaactttcttggcaaacaaatggagtttcccacgaagaagtgctatattcccgatgtaacatttttccaataactcccttatatactatgtatcaaattagcgaactatgttgttatcgttcagtaaggcacaatataaataggtcaagcttcaagaattaaatcaatgcaaaact

SEQ ID NO: 86351 - DNA, 1056 bp, Cannabis sativa
tccaagaaagtttaatttgtggattgctttctcctctaaattccatgcacagttttctttctcccgtcagcttccctcacaccttgaagacttggtagaagtgataaaaatgccaggagaacctctaagggcctacattagcaggtttacaattgaagcaacaaaagttaaagggctaactaaggagggaagattagcaacaatactggggggcattgagcatctgggagaattgtggaaagatatcaaaagattaactgtggcatcgatggctgagtttctgaatcgagcagatggattcattaagctcgaggaggcagtatggcgcgtggataccgtaggacaaaagaagaatcaacaacacaccagtgcagtcagtacttctgtccaaaattcaatatatcccaacatctcgaatccaaatggaaaaaggtctaacaatgacaatagacagggtaatggaaagaaagggaagttcactggcaacaccgaataacatcccagagaaaatgcttataaatttattgccttctcattcctaatagatgatatagaaacaatctatgcaaccacctagtctatggtgatgtacaagaaaccctctcccatgaagaaggacataagcaaaagagatacaattaagttctatcattttcatgcggactacaaccatgacacgaatgaatgtaacaatttaaagtgaaagattgaattcttgattaaaaaaataacccgcacttacaaaaatatgtcaaggttgaccaagaacaaagggttgcccaggtagataataaccaaaaccaactgatgcctccaccagtggatgggcatctgcaggtaatcattgggggcccgcacctcgctggagacttgggtaatgcaagagaaaagttactcgagccttgcagcatgaacaaaatgatacaattctggatgtggaggaaaggaaacctaaaataccacttgtatgggaaccaacaataacattcactgaggtagatgctagctaagttatctacccacataacgaccctttggtcattgaggtacagattg

SEQ ID NO: 86352 - DNA, 633 bp, Cannabis sativa
cctgaggtaataaatttaaatatacacttattgtgtgtttattgatggttaggttaatattataggaaaaatgctgtctaattatttctaaaaatttttttgttcatatcgatatgtatgaattatactttgtgtgcagcgccataaatgtcgattagccatacaatctagagataatattgttgcacttgggtttcatcttgatactagaccaaatgacttcaatgtagacatgggtgatattgattgccatgtgaccatccaacaccctattaaaggagcaactccattgccttaccccatggttgacatggatgtgtgtgtagtttctcaagcttctggggttgtcatagcatggcccaaatatttggtcatatttcatgattggaccgatcaggtgacacaattggtttatttgtcatctatactttttagaaaagctacttttttttttaattttaatttattcataaatcaatatgcaggatgctttaattaccaaatcaagacactcagcggcacccttaacccaacaacaacaagagcctacacgtcgtattcgtgaacctctgtcacaagaagtgtaacaacctgtaataagaggtcattacttgaatgaggtttataaaatta

SEQ ID NO: 86353 - DNA, 874 bp, Cannabis sativa
accaaggtaattattgtagaattgatttcttttaaaatgttacctgagccaaggaaagataagactgcattggtgacctcctccccaatgatctccaagttatcctggaaaaaatagctcgagaatccatttggacaaggagattttgccccagcaatgctgaaaaatagctgccttcacatcatctttagtaaattctttactcagcatctctttatgttcagcagataaataagggcaaatagaaagcactcttgtattaatcttccttctattgtcaatcttagtggcaagcagctccttgtagtactcaaggaaggctgttgttatttggttaggctcatgagttctgctcctgtccctttgttcaatagacagaattcgattagctcttattctctgcttgatactcgactgaaagaaagcagtgttccaatccccatcttgtaaccaagcaattttagctttttgttggaggaaggatgaataatttttctgagccacaaccagtttatcctgagcctctttttcttttccagtaaattctgtgttcaatggctgctggtgaactttcgattgccagtcatccacttcctgcttcagcatcataaccgtatgttgcaggttgttaaagccctccttattaatttccttcaaactagccttgaaatgcttgatctttgtaaccacttgaaacataagagatcccagaatttttttcttccaacaatccttacgacagccatcatatcctgaatgggatttccatattcgaaaatatttaaaaggctttctacccgaggcactaataggatggagtgaaagaacacccagagagtgatcaaaaagtccttcattcatgtaaactacctca

SEQ ID NO: 86354 - DNA, 956 bp, Cannabis sativa
gaatgtttaaagtctatattatcttatacaattcttcttatgctagctcctatagacctatgagaatttatttatttaattataaaacattaatatattaaatggggcaacgattaccatgcatgtttgaacaatgacctagtactgttcatgtcctctcattaatcatagtgatgatcgaaatagattgaattaaagtattcaaatcaaatcccttttaaaaaacctagctaactgttttccatccgaagatataattagatataatataatttatataagctgtgctttgtgattccacatttaattagctattcaaaaacacaacttattagtatacatattacttaacaggttgcttttgtacttgaggatgattagtgcattatattgattactgcacctgatataatgcactaatcatccacaagtacaaaagcggaaactacatgtagaaggaaatattgctagcttctcatcgtacaataatatcctaattttttaatattgtatcgtgtgtattttttttaaattctattgtatcatgtatttttttttttttgagaaatggaattcattcaacaacgattacaataaatgacaagtttcactcaattatatgacgagtagagtagggtgataccttaatttatatagtactaactttgtttttaaaaacataattgatcaatacatgagccaccttattaccttccccaaagtacaattgaatataactttgtatcatgtatttaagatatatatataatatatatatatattttcaaaactatttatatatccacataaaattttagtaaatatctcttgctttgctgttttgttttcttcgtacaattggattttatttttattaaaatttttttgagtaaatttaatgagaaaaacctcaagatagaaaacaatatcatagattactaaatataatgattatt

SEQ ID NO: 86355 - DNA, 640 bp, Cannabis sativa
agtgttgtatataagtgtggttacggtgttaccaacacgagtaccaggggtaagtcgtgcatgtggtacaacacttagtaattcccggaagtacaattctggctctaccaacacgagtacagggttggtactttagtgcatctggtacagttgtcgtacttcccttaagaaagttcttatccatttggtgagcttaattattgagctcagggcggcttaatcacaaagccggtatcgccttatttctatatatgttttgcatatcttactgagtttgttgactcatcagtttgctaccttgtgtaggtaagggaaaagcaaagctggaggaacagtgagatggagctcggcagtgattatacatatcgtggcagtgcaacctggagggtttcggtcttttattattttgagtctgtactttgaagttgcatgttcgcgagtttataaaaaatatatattatatgtacatattagtaaaatacttttaaattatattttgatacttgggatcccgacccatataagaataaagttataatataatcaagttatcttttgggtttaaaaatatttaaatgcgggcgttacagtttggtatcagagcctccaggttgttcactgaagaccgtcaagatatgta

SEQ ID NO: 86356 - DNA, 964 bp, Cannabis sativa
agaactgaagaaggatagaaacatgcacggtatccattgttgcaaatccatagaaggaaggctgcccgattgcctgctagggtctggcctgaggtcaggggtgtgttagtcagaggtgtcgttgaaaacctactcctatgtttagacgaaaaaagtacagaaggtgaacgcatatggtcttaaaacattcgcagtgtccatgcacgtttgtaacagtttaaatctggacaaccaactctctgaggagatggctaaccatcggtacccttaagctaaagtcccccaatgtctaatgaggcatggccacatagacacgatgaggtgcaagaggtgttgggatgaggtgaagaagctaagaccggttgcgattacaatgaataacttacgaaaggttatcagatataacaatctcatccagctcacaactctggttcctcaacctttaatctcagtgtcggtactgacgcaagggccaaattaatttctaacaactacttccaattcatttttgctgagccatgaagtttatcaaaaactgacattataggatcctgtagtgatgacgactgggagtttaccttcaatatcaccaacatctactaggtttttggataggcctggttgtggtactgctggtaggaagtgtgttgttaagggaaatcacttctggtgaaggttattgatagggattcctatcatttcgatgtaagcataaccgctaaggctacatcaaagaaagtaactcgagacattataagccagttaggaaatctctaccggagtaacactcaccctactggaactccgagtctttgccttgagaactacctggtgccttggagtcctcttgagtgacagattgcgcaagagatcctagggcatactgggttgtgcgcatcccctgaaccttccctgagcatggatggtgcgtgcacatagtttttcttacatgaaagatgacttg

SEQ ID NO: 86357 - DNA, 839 bp, Cannabis sativa
actactacaaattgtacttttagtgtcggttttaaactgacacttatacttttagtgtcggttcatagaaccgacacctattccacagtgacaaaaagtatattctttagtgtcggttctgaaccgagacttttggacattggtgtcggtttttaatctgatacttatgggtgtgcaattcatgtttgcactatatgtcttgatttagaaccgagaccacaaaaaaaaaaattaaatctcactagagctccaccgcaagtggtggctgtccacaccaataaactttatataagactcgaaaccatgagatcttgaagtacataacacaaacaacccaaaattatactattgatgtacattatacaaatcttttctattaaaaaaaagaccaatacaaacataaaatagacaaatacacatagtagtcatagtcaaaccaaaaaagcaataaaaaatccaaaaaatatgaacaggatagcaaaataaaaaaaattattaaaacctagaaagtgtagctctccaatccttgcaatgagcctaaccgttgtctactccaaacaaccgcaatcgccaacctcgaacactataatcatcaatttttttttttaaaaaaaagaatagttaaaaagcttagctacaattgtcaaacaactacaatcgccaaccctaaagtgtggaagagagagacgagtcgagccatgcccggagatggctcattttagtcgtgagcagcgaggaagagagagacaagtcgagcaagagagagagcttggggaatggcagagagagagagagagagagagagagagagagagagagagagagagagagagagagag

SEQ ID NO: 86358 - DNA, 553 bp, Cannabis sativa
aaattaatttaattatataaaaatatcagtaaataaccaatctcccgatcttgactctctctaaagtaaaatccctatatataaaaaaaattaatttaattatataaaaatattagtaaataacaaacctcccgatcttgactctctgaagtaaaatccctaatatcctaatcgcaattccacgatgaactcaactaatttggagaatataaattcttcttccatcgctgctccctcagtacacttcctcagccttctttccattttgtttatataattatatttattaacctgctttatatagtctagaactatataaatgaaaattataaatgaaggaaagcactatgacgctcacagacgtcattcaagcacctgatctcgcacaggcataactcccaaattgtataaaggaaggagaactatgatgctcacagattggaactatatttaaggaaaaaatttgataggtgatgggtgataattttctccatcaacaaattttattctatgtttttaagtattcattactctactttatatgtattaaagg

SEQ ID NO: 86359 - DNA, 1741 bp, Cannabis sativa
gatattagaagattttgaacttgaaaaaagatatcttctacaaatttgctattatggttacaatttattttaaaattttgattatttactatgtttattattattataaggtgagatattttatatttcatttatttaattaattatatgaaatgaccttatttgatattaaaatatgatataatttaaaaataatctagatattttaaaatctaaccatatatttatcaatttttcaaaaatgagttattttagttaaatcaatttatgagattagataaataataattatttatcattttatcttgttagatatttattttaatttttttaaaaaataacataaattttgaatagttagttgatattttttttgaaaaagatatttagggttgttacaactatatattttcaaaattttgggatttattttttttttattaaataaatcttataaccaactattctatcatgttgcatgtttatttatttatttaattgtttattcaaaaaaaattagtaaacctattatttatttgatttaaattgttatgattaacttgttaatagattcaatgatctagattaatcatagttcaattgtcaataaatcaaataaataatttgtaatatgtaaattttataatcttctttcatctatgtataaacctagtaatatgatagggttcatccaaatcagtgtgtatatgagcctatatgtttgcttttgggcctagatggatgtaagaagcctatataattttgataattcaaatggactaagttgctaaaataaaaagatcattttgatagttttatttaggcttaattagtaatgggcttattcaattaataataattatttatttaaaggttgaattcttttcttttgggccttgtgtgagagttaggaggtcaatagtagtgggtacgatatactgaatccagtcctccctcacatgaacaatttcaactgtaaagactcatttaccttatttaaataattgtatcaggcttattgtatatgtttaatctaattaaaattgattagcaatataattaatttttaaaatatatgaaattaatttttcattagattattttaaaattaatttaagaaaagcacacttagtttaataaaataaattcaagataattaatttctagaaaaactatatgtattttttatatttaattaaataagaaaaataataattaagtagattcattctagatacttaattaatttaattttcttagaataatatatttaagttaaaaaataattttttaattaattttagatcaacttaaattataatatttttatttaaaatataaattaataattaagttgatttatttaagatacttaattaattaaatttattttaatatatttaattaagtaagaaaattatatttaagttaaaaatttaattattgtagaacaacttaaattatatattttcatgatatttattttattatattttaattataattttgaaatatatatttttgttatagattagatttttgaaattaaagttgagaattaattttaaatcaacttaataacttcattaattaaaataaataattaattaaaaatatatattcttaaaaaataattagctttaatataagacattcgatctccattgttggttctacatggttcttgttttaatgagattcatccctaatagatgttcattcattagcaatttaacaccgt

SEQ ID NO: 86360 - DNA, 628 bp, Cannabis sativa
  modified_base (345)..(372): a, c, t, g, unknown or other
cagttgcaacatattaaagagtcaataaaactcatggaacccacaacagaatagttcatctaaagtatatggatagaacactatctgaagcctatatataatccaaaagaaaaaaaattaaaagagtgagagcattaaaaaaatgttacagagtaagagcatacaaaaagccatacctataatttatcaacaaaaaaaaaactgtatgcaaggactacaggcctacagcaactgtaatctcgtggatgacctcaaaaaatgtttgttttcttttttcctaaccctatgcgtggaagttgaattttggtgggaaaaaagacaatgcaataataataataataatannnnnnnnnnnnnnnnnnnnnnnnnnnntaataataataattaatattattggaactttagttgtaattttcttaaattattgtatgagaagtgaagtatatgagtgcattgagtcccacatgggataggaatacttcattaatagtgtatataatgtgcaactttggcacatgagttggggccccaaggggtacccagttttgtgcgcaaggttgaggactcacacactggaccaccacacgcacacgcaccatcgccatctgactgactgtgccgagccgag

SEQ ID NO: 86361 - DNA, 829 bp, Cannabis sativa
aatttttgtaaaaaaattcctctttaataacttctaaaatttgtactaaatttagaattaatgggtgactttaatacatttttttaagtactgtcattattttttaagaaagtatatttaatcaaacataacacacacgacaagttactttttataagagactcatcttaaataaagatgattggttgaatgtaaatatgtgtgtaaattatgtgtaatttattgtgaaaagtgcactattaattcttttggtcacatttaacatatttgacatcataataagttgaaaagtaagagttgtgtaaagagagaacaacatgattacttacccagtttgtacctccaaaatgacaatacaaggaagttgatatgtaaccagaaatagtagaagttgttgtgtatatgacaaataatgcagttgataggccaccgcggttgtgtggataaaatacaccagagattccaagtaccagaatgagcatggtactaaaaatgcattcaattgttataatctcattttacatataacataacataatattagggtcgtctcaattaatttggcagctctttataaaaattataaattggactctttttatgaaaaaaaaaactatatttttctgtaaatatctaaaatatcatatttttatcaaataattagattttttttttcaaaaaaatataaaatatggtatttttgaaaaagtagattaagtatttttctataaattttttttaggaaatttacataatatactagcttttgctatttttttacaaaaatactgtcatgcggtattttttactttttttagtgtattttttt

SEQ ID NO: 86362 - DNA, 553 bp, Cannabis sativa
ttaatccaacaatctcccacttggacaacacatgttaccttataaatgtataaccttatgagctcaaaattgttattgtgtaaaggtattcataacaatctcgtccatcaactatactcatataggatcaaagtaattttcatcatattaatcatgacaaaacccatcaatggtcacatatacaatataaccaaatgacagagatcaatcatgaatgtgtagcatagaaattacatgcaatgtgaactgagcatgcctatttccatctagtcctccttaaactaaagtgagattagacttaaacataacaaaatagagtgaataaattaaaattttatttctgatcagaaaataactaaatacataaatgtcttaaacaaacataaagcaaataaaatacaaactcccacaaaatcgtgttatcctcaaacaataaaacacctatatgggcaatgtgcccatgaaagaacttgggtggtaatccttttgtgagaggatctgctatcatggagtttatcccaatgggctctatggatatctatccacctacatt

SEQ ID NO: 86363 - DNA, 2194 bp, Cannabis sativa
tttaattatttgaataaatattgtaaccaaattctattatggatatttatttcctataattaattgagggaatttctcaaccatttgagagaatctctaaactaccttaatcttaaccatcagaaatatctataactacattttaaattcaaatttgaataaatatttcttttgagttaattaaccaaaaaataaatccagtggggacaaccctattagtgtgggcgcttatcactgtgctaggacacagtgatactggcgccacctatgtcttaacgagacatcggtgatattttttgtccagacaacttttatcatttccccagtttatttaattaataaaatttaaatataaattatttattacaaaataaataattactattttgacaaattaaaaaagattttttcaaacttccatatacaacttttatccctaccattgacagtgtttcaaggtggcaatccagggaccatagacctataattctaagtttcaatagtctagattatttattgaatctcatcaatcaaataatcatgtttattaattccatgattactctactataaatatggaattgaaattttagtaattatagaattatatttactgaattttactgtagtgtccattgatataatcaattccagtgattaaccttccttgtataagttcataattagttttggtctcgttttacccttctaattacttctttatcctttagtactgttaattcactagtaaaagtataatttagatccaatctaaatttgagcacaacctttcagttctagaattaacacttgaagagaactaacattcgatcaattaaagaaagccaagatttcgtaattatagatcatgttcctaaccattcatattattagattcccgaaatagaagttgtaagaatcatcttctttgagaatctttaacgagtgaattaaagaaactaataacatgaacatgagttcatgattactcaggattcaggttgatctattattgatcatctttatgatatgaattaggtttttatggtaaataaaatgtttgataaagacaactcaattacatattggtccttgtcatatataatctctattacatacagcatcttcacttagatatcctagtacatcagtgatccaaatcgagattacttgcaccaaataacgggtatcagtaaactgtactagcaaccattgattaaagattctaaaactttaatatgttactgactgttttgttcatggctaagtggtcttaattcttcgtaaaatacaagtcaaagccttaagtatgaataaagaatttttcgatattaatatataaattattcaatataaaatattaataatttaacattcaagcatatatgaaaatgatcagcttatatttataaataaaagtgtctttacaggcttttcagggcataaaccctaacaatatccactttccctaaaactaaattggacatatccctcaactccatattagttatctgacccataaaatattttgctggtaacatctttgtaaatggatctaccaggttatgttccgacgcaatctttaagaccatcatatcaccactttctactatatctcttagtagatatacttcctctcaatgtgcttacctttcttgtggtttcttggtttcttggagtttgtcaccactccattgttgtcatagtagagtactagtggtttttctacttctggaactactttcaaatcagcgtagaaattcttcagccaaacaactttattagctgctttgcaagctgctatatactcagcttccatggttgaatctgtaatattggtttgcttaatgcttctccagactacagcttcaccaccaagagtgaatactgacccagatgtcaactttcgactatctttgtcttattgaaaattagaatcaatatatctagtaggatttaactctcctatgaaatatacaagcatgagatctctcattctctaaagacacttgagaatgtgcttcacaactatccactgttccaaacttggattcgattgttaacgactaacaatccatgcaacatagcatatgccaggccttgtacataacatcacatatattaagctcccaattgttgatgcataagggtactttctcatgtcctccatctcttgaggagtctttggacattg

SEQ ID NO: 86364 - DNA, 795 bp, Cannabis sativa
cgggattcgcttggtcgtggggtctgttagggtggttagtttctagtgaaatattccctctggaggttcgatcagcggctcagagtgttaacgtgtcggtgaacatgatcttcactttgtgtattgctcaggtgttcacaaccatgctttgtcaccttaagtttggtctgtttattttctttgcggtgttcgtggtgatcatgactgggtttatctacatgttacttccggagactaagggagttcctattgatgaaatgtctatcgtgtggcgtaaacatccttattggcaaaaatattatgatgatgatgatcaacaacacagagttgtcccaccaaacttggagatggtttaagttgcaaagttttcttgatgggaagtaacatgtagataactattctattttttatcaaataagtagggttatccaacggccaaaaagtaaaattcttgtattgttgaggcaagtagacaagtagaagattgtttaagggttttactccctctttctcctcttcggttcaaaatcttatcctcaaatacaaaataaataaataaataattgagggtgcatgtgaaaattgcctttgattagaaacaagatattatttatttctctatacataaaaaaaaaatatacaggtttcccttttaagctcgtttttctcacaatcttttccttctcttagccctagaaagaaagaaagttcagttgtaagaaaatgccagccgtcggcatacctaccggtggtgccgataagtcctacctagggaaactgactccatttgtgacc

SEQ ID NO: 86365 - DNA, 565 bp, Cannabis sativa
aaatgtaaataaaaaaaaaaaaaaaaacacaaaaagctacacaagcaatatttgagtagcgtaaatacccttataatattcattattttaatatgtatagaaggatacatcactaccttccctatacataattgttgagaatctttattaaaatgggtggggaccaaagcgaccatgcattaatattagagtaattttcagcataaatatctaagtttaatttttaattgtaaataaatatttaagtttaatttttatcagtaataatatttaagttatatttttagaactctgcaagtacttgggcgttaaatgttaagttattatccacatattattttttattggtatatttaaactattttttttttaaaaaaattaatgacttgaaccaatcagaaattatcatgtgagaatttacttaatacttaatatttaggtacttacaaaagttctacaattataacttaagtattattactactaaaaataaaaattaaatatttatttaatatttataccataaattattcttaatataaatactttagatatatatagggac

SEQ ID NO: 86366 - DNA, 786 bp, Cannabis sativa
gttttacattaggtgtttgggttttgggtttgggtttggggttttgagtttggggttttgggtttttaggtttgggatttagggttctggggtttggggtttggtgtttatagtcttttgcttttgggtttttttgggcttgaggtttagggtttggggttttatgactagggtctagagtttaggatcttggacctagtatttgtggtatgaggttttaagaatggagtttggtgtttgggttttagggtatggggttttagggtttgggtttggggtttgggatttggggtgtggtgtttttgtgtttggggttttaaggtttgttgttttttggattacagtttgggttttgggtttgatgtttgggatttttaggttttacggtttaggggtattggggtttgggtttgggatttgggttttagggtttagggtttcgggttctgcaatatcggcgtttggggttttggggtttgggaatcgttatgggaatgggttggggaatggaaatgggaataggaattgaaattggaatgggaatgggaatggggattgagaatgggaataggaatgggaatcagaatcggaatgagaatggaaatgggaatgggccggggaatgggaattggaataggtcgaggaatggaaatgggaatgggctagggaattagaatgggaatgggaatgtgaatgcaaataagaaaaggaatgggaatggcaatgctaatgggaatgggattgagaattgggatgggaatcggaattggaatgggaatgggaatg

SEQ ID NO: 86367 - DNA, 613 bp, Cannabis sativa
aaagtattgtattcgcttttaaatttatacacaataaattaaaaagtacttttataatgcctctactcgtaataaaaattagactatgtctagtttatgaatacatcgaaaattatatttttttgcttatgatagttagttagttaaaaatttattctactttatttaattagagatcattagttaattaaaattttcttttaaaaaaaaacatctgtctattctcattttaattctctcatcttttcaattttttattctactttaaattctcttatttttattctattttatttaattggagattattaattaattatttttaatactttatttaattagagatcattaataattaaaagttttttaaaaaataaactatataaccgtatatgatattgataattaatgatttacttattatgtataaaagtgactacttaccgacgattattatttgatttattttatgtatagagcaaatttactggaaataatattaatgatgactacaaatgagacatagtgataatatcaactttacatatatatagtggtgaatacaagtgagatacagtgatgacaattatttaaagatttctttgcatgcttt

SEQ ID NO: 86368 - DNA, 2282 bp, Cannabis sativa
  modified_base (512)..(515): a, c, t, g, unknown or other
aattgtgcgagcagatcatgtattatgctcagatatgctatcatcttctctccccgagcctcgtactctcaacatacatgatttaccaccaactgtgagtcactacagatctcaaatgtgtttggcctttatttcccgagcaagccttaggccgacgataagagcttcatactaagcttcattattggatgccttaaattttaatttgaccgcaacgtgcacgtgttgcccccaggtgtgataagggcgactcttgtgccgaacaactgatctgtagatgacccgtccacatgtagcttccaagccggctcgtcttcactattgctcggctgaggtacttgtactggctctgggttactttctgacgtgctctcttctttacccatacattcaacaacaactccatgttgttcggggctgaaagataatttcatactggcccaactccactgcccatttgagaaaccgtccagaggtgtccagtttttgcaatacttggcgtaatggttggnnnntgtatacccgaacaggatgagcataaaagtatggccttagctttctcgttgctaggattatgcaataggtgagcttttctatcaacgggtatcggccttcagcttcaatgagtcttttgctgatgaaacagaccgggtgttggatattgttctcttctctgatcagtacgacacttacaacaggttccatgacaaccaggtatattccttgctcttctccggccagaggttttgagagtacaggaggttttacgagttgcatttttagctcttgaaaggctttttttgcattcctccatccattcaaattgcttatttcctcgcaggatgttgaagaatgggacacacttgtttgtttactttgaaaaaaatctactgagtgtggcaatccgaccagtcaaactttgaacttccttggtttttgttggagatttcatatccaagagggcttgaattttctttggattagcttaaattcctcgggcattgatgataaagcccagacacttacacgagctgaatccaaaggagcactttaggggattaagtttcatgctgtatttcctgaggactttgaagcattcatccaggtcatctatatgcccccagccttcctggatttggcaagcatgtcatccacatatatttccatatttcgtctgatctagtctttgaacattttgtttaccaatctttggtatgtagctccggcattcttgaaaccaaatggcattactttataacagtacaaacccatatctgtttggaaacttgtacgttcttggtccggtggatgcatcttgattcaagtgtaccccaaataggcgtccatgaagctttatatttcgtgtcctgctgttgcgtccgcaagttgatctactcttggaagtggaaaatagtcctttgggcatgcctttttgaggtcggtgaagtcaacacatactcgacattttttgttcggcttgtgtactagtacggtattagcaacccaggccgagtagaaaacttcacttatgaaattgttattgcgcagctattctacctcttcttttagtgctagggctcgttccttgtccaacaatcttcttttttgttgaataggccagaaattagtatcaatatttagggcgtgtgaaatgatagaaagatcgattccgaccatgtcctcatgtgaccgtgcaaaaatgtccaggtttgctcttaaaatttttatcaacgctgattttacttcgagcagcaaaccttttccaattttgagtttcctggtcggaacatttgggtccattctgatttcttctagtttttccactggcccaacatttgtatttggttccccaagtcgaggatccacatcttcatccccgccttgggcggttccctatttggcaatgtcttttcctttgtccgaactctgactagaggacacttcctttttagccttggttagggcaaggttgtaacattctcgtgcaacttgttgattttctcttaggcacccgaccccattcttcattggaaacttatggcttgaatgaaatatcgacgtaacaacctttaggtcgtataaggctggatggcctaacatgacattaaaggctaatggaacatctaatataaaatattgtgccattacagttatgctcttcggagcttgcctaatagtgaggggtatgcaaatttgccctagaggtgcaacactctggccggagaaacgatatacgggctgaagacagggggttaaatctttgagttggagccccatttttt

SEQ ID NO: 86369 - DNA, 518 bp, Cannabis sativa
aaaaaaacagatatctgtaaattatggttttaacatttccatgcttatgcattattcctcagaaaaaagatcatctttttcacatacaaagaagataagataaatcttaaagaaccatatcagaactgattgaaaacaacagcactgcaaaactgtccaaattattgcaaaacaattgaaacatgaggactaagatctcattccaaagggcatgctttttcaaatgcttcctgctctttgcgacataaatcaaattcgtttgtattgtaatacatgcacccaacatactcatccatctcttttgtgcatttttggtgaagatctctcaacctggcaatgtatcaacagaaaattcatgttttacaacaacaacaaagtaaaaaagaaaccccgtagattgcttcgagtatgtgcataatatgattttgacaattctatcaaagaaagataagatgcagtcttttatctaatctaaccaaagaaaaccaggcatctctaaccaaactaggatatgaaat

SEQ ID NO: 86370 - DNA, 1627 bp, Cannabis sativa
  modified_base (686)..(692): a, c, t, g, unknown or other
cccgctgccacaacatcagctttgttgaaggttgttcgcaacctacaaagctttctgcaataccaactagtacccatgctcattctatagaacaagaaatcactccccttaagataaatcgagttaatccacttaacccacaataaatcttttttgttcatcaaatgccaaacgaatctagctaaggaagctttattccatttagaaccatccttgaacccaagaccaccataagctttagggaggcacaccctttcccaacttatcaagtgaactctagagcgtcttttaaaccccaaaggaaaccgcgacaaagtttctcaatctccttaatgacactttaaggcaacaagaaaactctcatccaatagtttcttaatcctataaaagtattatggattaattgaacacgaccagcataggaatgatatttgttggcccacctataaagaccgcttagtttaatttggaaattagcagttgattaagatttaattatgaaattatttatagatatttaaataattatttgtgttgtcatatttgaattcagaatgcatttttatgtcatatagtgaaatttcgtaattttgcattttcggtgcctgacaacatggaacgcggtgtatggctcagtagaatcacaacttagtaatttagcatagtgggacggtttatttagacannnnnnntgtcgggattagtcgggaatttagagttttcctaaaatacccttaagtgctttttaacctttttagtgtgggagcggcaaaatagtcattttgccccatacacctttgtccttttgtggacttagtatttgagtgataaagtgatttatgtaatgttatttggctgaaataaagcatagtttatgcattttcatcacttattcaaaaaattggaaaatttggaaaataaggaagttcttccctcaagctctctctctctctttcggtttggattggggctgctagggctgggaattttcttgcaaattcaaacatttttcagcaattcttagagtaattcaagtggaggtaacctttgttcaagcttctcttttagtttcttgaagttaatgaaagaaaatggttgcatgcttggtggttttggtgttgtgattgctgtagttttttgttgttgcattcagaagcttatttatgtctaattgaatggatttgaactaattatgttgttagttgttggttttatgcatgtgtgaagcttttaaacccaaaactttgatttttaatggtgaaatggtatttttgctgctgtgatctttgtgtgtgcttaagtttgatttctggatgtttcttatgcttgtttgagtatattaaatcaagttttgatgcatatttattagatttaaacaaagtttgtgttttgaactcaaagcttggagctttaatggtgaattttgattctgtgcgtgtaggggttgttttgttgctttagaaatgtttattatggtctaattagcaggtctggaaagtttggaaacgttatgattaggggtttggcttttgtgggatttctgggtaaaaccggctaaccggttttacactgcctgtaaaaccggttacccggattttgcagcagggatgaaaaccagtttttctca

SEQ ID NO: 86371 - DNA, 1182 bp, Cannabis sativa
tggaattgacaaccaagtccttcagaatatccaaagtcaagaaagccatggtagcataataattttataaaattacaatattcactttaacaaaatttaattcattatttgttttaatattttcatttgctaactaaatagctaattgaaaaacaacgtggaattttggacctccttcacacacatgtaaatattgtgatgccattctatggtatgaggaacgaacccaaaaattacaaaaaactcggaatcccaaattctcattttgttgtatggaaggatgcgtacaaataccattattgacagaatcacccccattacttaaatatctcctaggagagaactcttgacaaaaaggtataaaattccgcaaaaatataagggtatacaactccatgtttgcattcacatcaatgggaggccgaattgacggatcaattaatcaatcaaaaggtccttatgtttttcgaatgagcggtcaaaattatcaccacattggttcgttgttgccagaagatgggaaacgtccacaatttgctcagttctatatatatgacacgaaaaatgagattgataatagaatgaacacgttgctaaacccagaaaaaaagacagaaattgacaacgaaatagttgtcgagttatctaaaatgttagaccaacacaatactttggtcaaatcttttagaatggtgagggataaatacaaagaacaaccagaagctacattacgcttacgacttctacaaaatagagctagcgatggtcgtcaatacaatatgccaacaatttctgaagtagtagggttaatagtgggtgattttagtgaagcaaactacgaacgcgatgtcattgtagagcaccgaactaatggacttcaaagaataacagatttacatccaagcttcatgtccatgacatacccattgatacacccttatggtgaagatggatacagacttcgaatacctttcagaggtgtaacagaaataactcctgaaacaaaacagttgacaatgttgcaatattattccttcaggttccaacaaagattaaacgaggggtacactctacttcgagcagggagactgttacaacaatatatagttgattcttacatggcaattgaagaggaaaaatttcgctatgtacgaaagcaccaaaataaactaagaactcacc

SEQ ID NO: 86372 - DNA, 586 bp, Cannabis sativa
tttttttttttttttcagttctccgtttttaaaattttatttttaagaatagcgaactgttttttactattttaaaaatttaatgtttgacacaaattttttaaaactatatttaaattttttcttattaaaaaaaattaatattttaacatcatactatgacatgaaccatctgggttggtttcggctctagggtccaaatgtgcgagcaaaaatataaaatataatatgttagacaaaaaaaaaattgtttttgaaaattgaaaacaacattttgatgttttctgtttgctagtttcttaaaactcaattttagttttaaaaaactgtttttaaatttttttaccaaacaaccccgattaatttttaaaaattattttcaattttaaaaaacaaaaaacagtttttaagttgcgaaaccaaataatctctaaatttggacggtatgatttctttctggtattaagggatgacgtgtcacagtagatgttatatttgtttctttaacactatatatagtaatagtttaataattttgtacataattaaaataaaaaaagagttgtgactggcacaagagtcaaca

SEQ ID NO: 86373 - DNA, 1864 bp, Cannabis sativa
atattctctgttttcatcaacaatctatatatggatgctttcaagaaataaacagagccatctgggagtcataatcaggacctgacaccaggtctcagaacctaggttgacatattatcaacctgggccatttccaaaatgttcttccaagaagtcttctaggaatattctttgttttcgtcaatagttaagatacaagtgttttagagaatcaaacaaaatcatttggtgggaaaaactgggacccatcgctcaagttgacattttctcaacctgggtcccaagtgttttctcataaaaagtggttttgggcatcttttctatttttagaaataatgaagatacaagtgatctcaagaaacaaacgagaacatttgggagccaaaacagggccttaacgcccaggtaaacatgggcactgggccttgcatccaagttgacatataacatggttcgcatgtttctgctccttcaacataaattatgctctagtcattcttcttattttgttcaaaaattggatatgggaccttgttcgcaatcttgaatgccttagaagtatcaaaacaacccccgagaagccccccgaggagcacttaacgccaaggttgacatatagcatggtgcgctgggttttacttattcgattctagttctgtctcaagaatccgactatttttccgtagtaaacaagacctaccacttgtgaaaattaaagttcgtacttttctatttcaccttttcaacaaagtggaatatcagcaaattagtcgcaaatcgggaaattttgagtctacctgattttgcagaaaagaaccatctccaagaactggtgaatgattccacaaaaaattaagaagttgactaagtgatgtcaacatatcacttaaacattaaaaatacaagtccaacacatttttctacacatacagcgtccaggttgacgtcagtatgtcaacctaaagctgggtgctgaatagtttttattaaaatagtcataactccctaaatattgatctgattaacacaatttaatttgattcttaaaactcttccaaactcttctaagcatgtctcacacccatatctaaattcgaaatatttcaagtccaaaattcatccccaaagcaagtgtaattttcaccattagatcgtcatcaatggtcaagatcaaccaaaaaatattttttcatattttttgtaaaattttattattattttaatggacctccttccctataaaatgatagtttcactagctcattttttacattctaaaaaattctcatatggtcaaagcatttctctctagtttctctctctagaaatatagagctcttgcctaatcaattttcttgtattctcgtgagtaataaaaactcgaagtacacgtagctccattaccatcgcgacacgaatagtgaactactataaattatgtgtgtctctcttatttaatctacttaacttttattatttttctcgccaatctaacgagcaactgttggctagttttttatttcaacacactcacttatgcacctatagaaatacaataactagactagattttgtaataaaagtaaatataatagtgtattttaaggaaaaaaaattgtacgaaataaatttttttatttatatactaaccaaaatatacatattaaattattggcttatatttttctcgtctttttagacaaatagtgcagtgctaaaaaaaaaagctctattttaaaattgaacattaacttatttttaatttgataagggaaatttgttaaaacatacttaaaaatttagactattcttttaatataccacttttaaataaatactctaaatattctccaaacaccctaaa

SEQ ID NO: 86374 - DNA, 903 bp, Cannabis sativa
aaactaatatagatataccatatttttttcgtactacaaatttattttaattaaaattttagtaaacttgtattttcttttataattttatatatattgaataataaatttcttacaattttttattttttaaataaaaatctcacattatttataagttatgtaagagttataagtaaagtatttcttcatgcaccatttctccaaaattattattatttctttaattttgtatatgtgattatctcaattttacactattattagatatatttatttatttgaaaaaattaattaaatctatattaaaatccaaatattagtttttattttatttttttttctttacatttgattatttttttttaaacatttatattttgttattttataattactttaaatatacatatataattgaaaaataaaaaataaaaagtattaaatttaatatttcattcataattatgaaagtattttaaaataaaattattaaaaccgcctaaaacccaaatttattccctaattttatataaaataaaaattattaaaatagagtaccattataaaaatttgggaagtaaatagaacccccttggttattttatattatttgaatttatccttttctataatttttttaatatatgaaaaagctgaccttcctctccagaattgctcaccatcaccaagtcaagatttttattattttggcctggcaataatgaaatccatggtaagtcggtccctctttctagtgtgctgagtggacagtgaatttcctgcatgactatccaggccacaatggagaagaagaagagcacaaagtccaggcaggaaggatgtcaaatgggaagacatgatgcaaatgcaatattagatggatgcacaaggctagtagag

SEQ ID NO: 86375 - DNA, 756 bp, Cannabis sativa
tgaaaaatttctccctgcaaggaaaccgatagaccagttctgctgcaccagaaccaatcggtcgaccagtccaaagattaaccagttctggcagggttgcaattttcaaattttcctcctccaaaaccaatacaaacaccaccaaagcaacccaaatgctccagaacagtacaatatcatcaatataatgtatcccaagcgtcaattacaacatctcaactcttaattcaaaaattacatactcaagtgaagaaaactcattttattttattttactcaatccaaactaaataaccagtagaaatcattcaattcaaacttcaacacagttcaaaacaggtctaaaaacacaacccctaaattgaatccaaacatacaactctaaatcctcaaggaaatatcaacctttcttacttaaaacctaagtaattcaagaataaagtttcaagatcttaccttaatgtctaaacaagcttctaccccttccaatctgatccaagagctgaagaataagcaaaagaatccttggtttgcagctccttagggtttcagataagaagaaaaagagaggtgaaggttatgtgacttctctatttttgttttacacctaatagtctaataaataaaaaaatattatcataaatccattttagcctgattaacactaaagacaaaacttttataacccactcaaatgaccataatacccctcccaatacctttaacttaaaataaaagcctaggggcattttagta

SEQ ID NO: 86376 - DNA, 735 bp, Cannabis sativa
gaaagttgcctccgatcgctacgtcagacatgggtacgttctggaaagtcaaagaggagattttcctcttgctcacaagactactttttctagggaaaaatgcagtagttaagaatatcccatatattatatagctgtaatttaacaaaattaagaatttttcaaactccacattatcaattcaaattaccatttacaattattgtttagttagataaaattcaactttttcttttaggcatatttagattttgtaggttgtaccacataaagtttttttatcattgcaaaataataataataataataataataatagtaaaaagaattagggttgttaataggctggctgtgaagttggtaaaaggcttggggcatttggctgcacaatcacgtgatgggtttttaaatgttgtggtaagaactaggttatctgataagaatgttgttacagtaatagataaaaatggaaaaaccttcttgttgaatggaatcttgtggtcaaaaagtttagttgctaaggcagccaaagagcgattctgtgttaatttggccggttgaagttggtccagcggattgtgattcaaattcgaactcgaacttgaagtcgaatgcgaatctacttctcctggcgctgatccttcccctgccgtgctctctccagataattttatgtcattaattcctgaatttaaaacaagatagttcaagataaatacaatcttgccaataacg

SEQ ID NO: 86377 - DNA, 1485 bp, Cannabis sativa
cctatatactacatcatcaaaagactaatcgacactagtcgatactcacttataggaagttgacttacagcttgctcttggcttccagaaagctaagaccctacatctaggcacaccccataaaggtgtagactgattaaccattgcagcaagttttacagaaactgtaagcatcaggtcgactactcaaatgggccattgagcttagctagtttgagatcacatatcaaccaacaatagccataaagggtcaagcccttgccaacttcgtggcttagtgcacaaaatcatctcttgaaatatctcaagattcaagagaaaagtacgagccagagaagaagcgagagcaagagcagcagcaacaacttgaactaacatggaaactccatgttgatggaagttgcactgaccaattgttcggtgcaggcatttcctttagaacacttgggagcagcaacttcatggagcaatcaaatttgacttcagggcctcaaataatgaggtttaatacgaagtgttgatagtcaacctcaagctggcacatgaagtacgagctgaacacctggcatattcagcgattctcaactagttgtgaatcatattttaggtgaatacacaactcgaggagaaaaaatggtgccctacttaagcaaaatcattggcttactaagttagctcaaagaaaacacaatcacaaagatccctatagagcaaatggtatagcaaatgcacttgcctgtctagcaagtagcaccattaccaacaagatccaatttgtgacaatacagttcctagaagaacccaacattaccatcccaaaaaaggtcaacatgttggatgacactctaacatggatgacacctattgccgcatacctccaatccgaagccttgctagaagacaagaatgaagcaagaaagataagatgaaaagttgctatgtatctaatcctagaaagagtaatgtactgacggaacttttccatgctgctcttaaggtgtgtcatcaactaactttgagcggttaatgatagaagtacatgaaggattctatggcaaccatgtcggggggaaaaactatccaagaagatactttgataggggtacttctcgccaacaatgatcgaggactcgatcgactacgtcgaaagatgtcaaaagtgctagagattcttgaaaaattccaagggatacacccaatgagctcacgatgatgtagtctccttcgcactttgcagtttgggcaaactccattttctctagcttatggctatgaggcgatgttgcttgtagaggtagtgccgccatctcacaggaaaacaacttatgaccgaaaaacaaacaacatcatgctggaagaatcccttaatgaagtagaagaaagaatagatccagctaacctaaagatgcaggcctaccaacaaaaggtagcaaggcacttcaacaagcaagtcaatgacatgaaattcttcataggagacttggt

SEQ ID NO: 86378 - DNA, 1455 bp, Cannabis sativa
ttcatcaactaacctttctgatacaataaagtaaaccaacatctaaaagatgaaaacatgcaaacttgcaaaccttcaagtataaacatatgaattttgtacttgtttataaacgtattactgttctgctatttgtagttatcttttttccatctcttgatgtttttgtatttcatcaattatagtatagagcctacatgtaaaagcaaactttcattttatttttctagggtgactctaacaagaacaccctaattaattcattatgaaaaaccaaagttgaatacaaaacagaacacaccaaaggtcaccaaatgctaccaacaacacctaaaataggaaacaagaaacaatggtgagccatcccatggcaaaggcatatctccgatacatccattaaaaaaaaaacaaaccttcacaaaactaaataaaaaaatatatacaaaccatatatagctacaaaatatttgatgaaacttacatataagtctaaacaaaataaaatgagaaaacttaaaattatatagactaaaaattaagagaaaaatttactgaaaaattgaactcaaaataaaagggagaaagtagtctcagtatcatggttgtgaaagactgaggaatgatatattggacttataatatgcattcggcttttaactaattatacatgtttgttttacataccatattgaataacattttttttttttcagttttaaaaatagtataaattttagagaaaaagcatccataactttataatttgaaaataaatttatataatgaataaactaatgctaaacatattattattattattatatacatatataaatataaataagttttttaatatgtataaatataattagattagatcggttttttattagattttaaggttagtatatttaataactgatcaaatctaattataattcaacttttaatatccaaacaaattcaattgtaattagatattcaattttcttagttgaggttcaattcagttaaattggattggatattgccccattaagttgtgagtctttttttttttaaaaaaaattattaactattcttttttcttaataatgatataaaaattaattacataaactttatggtttattattaagaaatattgtataatttatcagaaaaattatgttatgttttcttaatttttttacttaatttttttaatgtgctaataatcacaacgtgttcttaaattgaatgcaataagtatagtataaatataatttttgtaatttacatgtgggtagtcatagatttttgaaatagtaagtttaattttatttttgttattaaataattttataaattttaataaattctcattaaattttaaaaggacaaaattagagacaccactcatatggaatacccctattagtagtgggggacttagatggacacaattacacaagt

SEQ ID NO: 86379 - DNA, 733 bp, Cannabis sativa
ttttatagaacatgttcttaaaaaatatttttacttttttaattttaaaaacaaaaaactgattaaaaaagtgttaccaaacggtacctatatttatttaagatgggttttatttatcaaaagtgatttgtcaaataaataaatgtgtgatacatttgtgtataatttaattgtacacgtatcattactctataaggaatatgtataaaaatagtgttaattatacaatacaaaattttggacttcaactaaattttgatcattatatgacacataaatttaaattttgacactaaattatttagaattatctgtgtatgatatataatccgatgaaagaaaaagtttgaatctttactctctcatcaaattaaaaaacgatgtgtgcttaactttcacacacacacaaaattcatacattagctattaaacacaatttttattgtgaattacatgtctttagtatgtggtggtgcttgcctcattaaattcaatcaactctatttaaagcacacgacgacgtcgttttcctaagagtctagactgtactgctttttttttttttttatttttcatttttataaatttgatccttatcgctgtttaagtttctggatttctccagaaaaccatgtctattccattgctgtttccagaattgtcgaaacgttcctttaaaatcatgcataccagtatcctcattctcatcaatccaagaaaaaagaacaagaac

SEQ ID NO: 86380 - DNA, 1224 bp, Cannabis sativa
gctggtggcagattcttgaagtcctggaattctggggtcgaaaatgtatcaagtggtcattaagttgaggagactgaaggatgttttaaagaaattaaatagagaggggttctcggaaattcacaatgaagatatgataaccagttcatcccttgcagatatacaaacaagattgagcaaagaccctatgaacatggagttgatagaggaggaacatagagcacatcagcattacaaagaggtacataaagctttttctctctttatcacacagaaggctaagcttaattgggctaaatatggagatgagaactcagcaatttttcatgcttcattgaaagctagaagaattcaaaataaaatattctccattgaagatgaagctgggatttggagagacaatccagagggagttcaaaaagctttcttagactattatatgggattgttagggattgcattgcctaacaggagacatgttcaccagtcgattgttaatttgggccccaaactcaatgaaatacaaaggaaattctctctcctccttactctgctaaagaagtgaaagaagttgtcttctctatccctggaaacaaggctcctggcccggatggctttggtagtgccttttaccaggattgttttgcaaactgtttgtaaagacattgaggaagttgtgttatcatttttgaattcggggaagattcttaaggaaataaattcgactaccatcacagtcattccaaaatcagtttgtcctaaaagtgtagttgacttcaaacctatctcctgttgtaatgtattatataagatagctaccaaggtgatttgcaatagacttaggaaaatccttcctgatcttattgcagaaaatcaaggtggctttgttcatgggaggtatatagcacataatatcttggtttgccaagacttggtaagattatatggaaggaaaaactgtaagcctagttgtatgatcaagattgacctaaggaaggcatatgacacaattgattgggatttcttggaggagatgttaactgcttttgagtttcctttgcagtttatacagctaattatgaattgtattaggactccagagttttctcttctccttaatggctccatgtgtggattttttgaagaaaatagagggttaaggcaagaagaccccatgtcccctcttctttttgttcttaccaaggaatatttgtctcgaatatt

SEQ ID NO: 86381 - DNA, 4240 bp, Cannabis sativa
aaaagaaattccaaagagaaaaggaacgcgtttaggattatggaggctatccacgtgagtgacacgtgtgtggtttaggaaggaattggattccaatctgaaatggatggttgtgaatataaatatttaggtaacttatatgctaagaaagattatagtttatagatatataataatgaatgaattaatattaattgagtattgagtagagagtacttctactaaactttatacttggtaacttaattagttgagctactttaatactttcatccattgctttgtatttaattgagtaatttacatagaatatcttcaaattattgtttccttttgtttttgtctttttttaaggtacatttattttgtgtttggaagttaagagtgaaatatttgatttaatataatgtaaaattgtatgttattattatttattttatgatttatttctgcctaaattaataccctcaaaattaaaagataaattttataatttaaaataaatatttcaaaaaaattgatttagagctttgttaaccatcgagtcaatgatggggatagagataaaggtaggagtcgggttggggttctggttcttggttgttgattatgtattcggagtgtgtgtggctctattgtagggcattgaccaggagtgaaaaaatcgagctacaaattaatattttttgatgttgttttgatgatttttttttttttttatttaaacggtcatatatttccgtttatatattacatcagtataaactcaggacctccaacacacacacacccactatggccacttgagctagcctcaagtggttagatgattttttttttgttacactaattttactttcgaaataaagatgaatattttgttcttaattaaatcgactttaattcttaaataatttacattatttatttgtgtgcatctcgatatattggtcatttagcttattacaaaataatttgtcaatttaatttatcatgacacaatcaatttattcttgttttcctcattgcgatcttacactaaaaaaacaaaatcataactaaaaaaaacaaaatcataactttaacacaaaagaaataaacttttttttaagaagatcaataaacattaataattactactaaaagaagaaaaaactacacattcttaagcaaaaaaagattgtaagtttggtacaattttacacactttttctaatgattaacaactcattccacaaaattccctcctacaacattggaaaaaagacactaatgattcatgtctacaatccttaagttctcagaacaaaagtgtttttagagagagacatttcgaggcggttgggtaaagtaaaagtacatacaccccgaaaaacaaaaaaacaaaacaaaacaaaacaaaactataattttcgaagaaaaaaaaaaccgaagatttacaacatgaaagagtggcaagtgaagaagttgaaatcatggtgtttaacattaagttgtttcaaccatgaatctgcagcactatagagattgactaccctttcgtagtccgatgtctccggtttcaaccatacatctccttccatcttgtatgttgctaacccgaaaggaggaagagatattctacctttctcagctttctccattgccattacttcttccgagttactcaccccatcattttcggttgccaaatctgcgtaggtaagcatcaatcgagcataagaatcataagaagaaagaatttacaaacaagagcggggcattaccgacatgagtgagcgattttttaccttcgaaagatgaggacaatgtgtgataagtgaggaagcttgcggataagtccttcacatttttcctactcggaatttgatatattgggtacctgtaagattggattgaattaggtaactactaattcatcagttaatatattttcgaaaaatcgaaacgaaaattaaggcccacatgaaaatatgctactaacgtaagtaaagctaaagtttcggtaaaacatataagctaataatcgaaaatatccaatccaatcctatctgcttaccaagcaacggccatccaactcgcgggggaaagatcaacacttttgagagtcatcaatgcaggatgatgctgagctaattccatcatctgtcaaaaataaacagctataaaattcagaatttcacccgaaaaagatcaaacttgtctctatactaaaatgaaaaaataagttaccttgttcattaatggaggcctccaataaggagaacaagtctcaatatattgcaagtaaacatgtccaagtttatccttaataggccatggattttccaactcaaagctaaaatcttccgaaacaaaatcccaagccttactcgaattgttactaagtgaccgagaaagattatcgctaccactgtcatcgctccacgagtcactttcaaactcggccgagtcactattacacaacaaatttgactaaaatttttggcataataattgtaagagtatagtatgattaaatcgaatcgaatcgaaaatcgatacctgttactgttgttggaagtagcaacaacagatttattgcagtagatttggatagcagaaaggtaaggaacatagaattgtaagacagtttcatcaccattgtgatctaattgaactggtgtaccaacaccaaaggcactccattcaccataacagttccaaagatcttcaagtgtgaaatactcaattttgttgttcttacatggtggttgccattgactatttacatcattaatgcagctctgaaaaaattcaacacaagaaatgaacaattgaacacaaaaattttacgaggttcgaacaagggcattgagagtctttattagctggtgatcaagtagagattacaacagttcaaattgtacaactcgagaagcttagcttcaattacaaacagtctcacttgtaaactctttctagccttagctcgatcaccaactatcataaacagacagttagttaagttagttatgtgtaataagggcaatatattgaagccactttccgaaccatttatcggttcggaatgtcagctttgtaaacctcccgaccaattttactgtacaacgtgtggctcgaggggtgtctcgtgctcagaatgtattcaactaacacactaacaaaatgaatggttcatagtattttggattgatgaatttgaatacttctatgtaatttgttggctttacttcgcattaaagccactttccgaaccatttatcagttcgaaatgttagctttgtaaacctcccgaccaattttactgtacaacgtggtttgagtagtgactcgtgctcagaatgtattctactaacacactaacaaaatgaatggttcaaaatatttttggattgatgaatttgaataattcaatgtaattttgtttgctttgcttcccattgaagctactttctgaaccatattggtcaagaagtagctttgtaaaccttcgtacaactaagtccgactttgggaataagcgggttaagactgtacctaagacccacctaacacataggcctaaaaaatttcctcttataaaattacacatttttactaattttaaaaaatactacattttacattttactctaaatatgaactcgaaaatatttttttttcctatgaactactaaatttcagaataagctggttcaagtggtgactcgtgctcaaaatgtataacattactcgtgctcagaataatgaatggttcaaagtatttttggattaatgaatttgaataattctatgcaatttgtatgctttgcttcccatcgaaaccattttccgaactatattggttcggaaaatttagaaaagttaactttgtaaacattccgaccaactcgagtcgtgactcgagtttggctcggaatgtatagagcattacacttgttttttttcctctactaacaaaaagaatttcagcatactccctgaattttcctctatttttcaattcagtccctaagaacttttctataacattcaagtccttatattctaaaaccacgtattcaaagctaagtccaaaattatttataagaaatttagaatttttccaccattgaaatagtcacaatatttatgctaagaaaatactaatctttataatttatttttttaaaaaaaaaaaagttaagaatatactaagcatctttccagaggattttattgtaaaaaaaaaaaaaaa

SEQ ID NO: 86382 - DNA, 558 bp, Cannabis sativa
cttaatttgttattattgcttaatctatagaaacctaaaattattgttattttttataatgttgttgtttgtatataactaactgttattggttatttttaaaattagatttgcaagtgcaaaatggctaagtgaaaagtatttaaatgaattcaagatgaatgacaaattgactatcacttcattctagcatgtggttggtaaggaacaaattattaaaatatcaagggataaggcaaacagagcttgactaattgtaacaagaaaaaatgaggacagttacgaggagcagtatgctactttgtgggattatggtaaggagattaagagtacaaacaaaggttctattatcgaatttttgacagagctaggtgagaatggacaacgtcgttttaaaaggatgcacatatgctatgttgggttaaaaaagagattcaatgagggttgtagaccagtcactagtttagatggttggggcagttacttacttcagtaggaatatatgaatacaatcaaatgttccaattacaattgccattgttgaaatagaaaataatg

SEQ ID NO: 86383 - DNA, 792 bp, Cannabis sativa
atctgtcaagggatccatgttcagatctcaggcatttctgaaggcctcctcgcgcaaagtatttttttgctcttccagcaagacattcttctgggcttccacctcagcatgtccccgagtgaactcgtccagggcgtagttgtttttggcaattcggagttgttgcctctcttcatctgcggggaccggggtaagactaatgccaaacggcacggtatactcctccgcctcgggaggaatcctttagtctgaactgacggctggggtgtccttcctcctgggcctcttggaagacttggcctcgaccattttaccctcccgcttgcggtcaagggaagccacaatctcatcctcctcctcctcgtactccccttcctcgtctattaagacgattgtgcctaagggggcactagaagacgacctcccaggggtcatcagttgggtaggaaccggaggtagagaagagcttgggctgtaggtcttggcgagagttgccaaaaggtcttccattggcttggctgctgcaaaaagaaataaacaaagtgttagaataactataagaaggcatgcgcccaacaacaaatcaataaagttagtcctaccctgactctctaactcagccctaggaaagtcttgaactacagtgctagcttcgtcatccccaagaaagctctccgagggaaggaaccaactataagacaagtacgctgagtgatccaaagggatgggtgcaggaggtccaagacccatccgggaccggcctaagaaatgacctaagtgggaaaagtaaaa

SEQ ID NO: 86384 - DNA, 504 bp, Cannabis sativa
aaattgttgtcttctgctcatttgtttgcgggccagatgaagctgagaacaatttcaatccttgaagtagcagcaaaacagatatataatcaccatgatagaagactagcaagtcatcagcaaagcacatatgattcagtttgatggatgcacacctatcatgaaatttgaaccctgtgcaggtccctaccttggtaaatattctggatagatactccattcctaacataaagaggaggggagacatcggatcaccttgtcttagccctctctttgcattgaagaatccacaaatagagccattcaacaacagagagaatttgggagtgcatatgcattccataatgagcttaatgaacttaccaggaaatcctagagcagtcatcatctcttccaagaactcccattctatagtgtcataggcctttcttaagtcaattttgatcatacaacttggtttaccattgttcctcctatataatctcaccagatcttggcatacca

SEQ ID NO: 86385 - DNA, 2321 bp, Cannabis sativa
tatacattaaacatataatcatgaatgtaatcatgtgaaccatgtaacataaaataatttctgatcttttattaattagtaaatatgattatattaacctaaaatcccaacaataacaagatcacatgaacctgatatccttagttcccattgatttttagaaatcccactcttttaggcattttgattaacctattctgcaaggattgggcaattagaatgaatttggacatttctcccgtgaggttgttggtcgaatattcgtccgggaagtgccttcttggttgttcagaatgttggttagcatgccccgtcaagaatatatttaattttggacgacttcgtttggcatataccctgcccaacatcttttaggcagtcttcttgattgtctgacctctgtcaagtatctttgatacttgacatatacttgtctgcccaacacatgtcacatcattccataccacgtcaccagggtgatttttaagataatagattcattcccttaacaccgggaaaaatgtcacttggtgcttctaggtcaaaatattttaaattttgtaactcctatttgaaacagtggcaaagccacatggggtcctctggggacacatgaccccactcaagttttagtaaattacctttttatatataatttttttttaatattttcaaaaatacctccataaaattaatttttagtatttttgtccttataaaatttatgctttttatttttattttcacaaatttttcatgtgtatctctataaaatttatatttttcattcatgtctttacattttttttttaatttcattttataatcttttattcaataaaattaatatttgtttaccctactaacataaacgttggctctgccactaatttaaactattttttttgtcaaacgttttaaatctactttccgcacacaaatggatataaatattagagtaatttacgacataaatacttagtttaacttccgattgtaaataaatacttaaatttaatttttgacggtaataatacttaagttatatttctgaaactctgtaggtacctgatcgttaaatattaggttacgtgttattttcttattggtatatttaaattattttttaaaataaagatttaatgacttggaccaatcaagaattgtcacgtggcaatttacttaacacttaacatttagatacgtacctacataagttccagaattataacttaagtattattaccgctaaaaaataaatttagatatttatttgcaattgaaaattaaatttaagtatttacattacaaattactctaaacattatccctaaaaactataattatagcaattgaatttcaaaataattttaagttgtggaatcactttgatacacttataaatcttataaatgttatctacaaaaataattttgtttttttttaaaaaaaaaaattaaattagtgtattaattcgtatttttgtaagattgtgtacattttatattttcttttttaaaatgtgtgcatgtttcaaaattctctcatatatgtgacataattacagtattattgtcaatcaatcaatcttatttctagacttttatcatatatttggctaacaattttgacttaattttatcagttgagaggaatgaaaattataaaataagaatgataataaaaataagaagatgaataaaatagaatgtaattttaaatgcataaaagaaattgataaaaaaattaattaagctttttcttattttttatttccttctatttctaactaaagtaatcattctactaaaattataaaaaacaattattctattggaatgacaattttattccattaggtacattttgttgagaggaatgaaaacatatgaatatgaatgagaataagaatagaaataggaatagaataaaatcaaatttaaaatgcataaaaaaaattcataaaaaaattattatatatttttttttcatgttgcattagaatgacgtttccttctatttaataatggaatagtcattctactaaaattatggaaattgaaaaggtcactccatcaattttatttcaatattttattaccttcaatcaaacaccacttaattgtctattattagtaagagtgctaaaaaaaaaaaaattagtccaaactaatttgtatgattcaatttaaattaattaggatttattatagtcatcgatctctttatctttccatctgatatattaaaatatttgtgtggaggcatccactggtgttgtcattgcgagtggggtactgtcgtcttacagagtgggcact

SEQ ID NO: 86386 - DNA, 567 bp, Cannabis sativa
ttccatgtgttattgcttagaatgctttttgtttattttcactttttaaccttctgttggactccaggattagtaggagaggttatatgagtcattgtattagggtagtgattgggagagaataggacagtatatatagaagaatagggggagagtgatggtatgcaagaagagtattactatttgcatcacaggggcctaaaggctccaatagtttgtaaacttcttcctctagttcaataatgctcacctatattttttactgtttggctactgttctattggttttcttgagttcagagcatcacttcacatcaccttcttcagtctataattcgtttatggtttggctggaaatgttaccaaccaaacttcacctcatagaaatcgcctttactatttttcttttttgttaaaaaaaaaatgtaattgtatttattttgtgctattttagaaccacactgatagatggaacactgatttgtgaacaaattctcacaatattttcgttgtgtgtctgtcatccaattgataactataactgctattactatattactggaagaa

SEQ ID NO: 86387 - DNA, 511 bp, Cannabis sativa
ttatatataataaaattaaaaatatattatctaattttatattattattaataattttgtttattaaaaaataaatcacaattttatttattattatttgaagttatttattgagatatttaaaatttattataggtagtattttaaattgttttgtttaaaaattttattgttataaaaataaataaataggatagtgtagaaaaaaattaaagtattcccataatgcattatttgtacatcttaatcatttaaagtcgttgttattattgtatcacacatgttgttctattgtatcccattcattttcattatcgtatctcatacattgtcattatcgtacctcatctcttgtcatcagcgtaactcacttgtagtcgttaccactatttttcctaaatctatattttaatcttaaattttatctcgaattttaaatatttttttaatatttttaagacattagagaaaaattattagtcttttatgttactattaattaatatattta

SEQ ID NO: 86388 - DNA, 781 bp, Cannabis sativa
attatttttgttaatcgtaattttgatatataattaaaaaaataaaaaaataaatatattttaaatttcattcctaataaaaaaaataatttattttatataataataatcataatcatttaatgttgcaggaagtgcagaagcatatgatgccatcatatgcccatatgaaaaattcaaagggcttgactcctttagatattttcaatacaacacatgagtctatgttgaaagatcaagaccgttggatgaaaagcactagtaaatcatgcctaatggtttcaatacttatttttgttggagttctaataactacgtctcaagactgttatgactatgaaggaagaaactcaaattggttaaattcagtagcgttgtcttcatctttctgctcaacgttaacattcttgtcaattatcacatctagttatccaaaagttgaagtccttgcctcactacacttcaagttgattataggactagcaatgatcttcatctctctcacaaccatgctggtagcattcaatggaggtttgtccttgaccttaagtattaattttcatttttatatatatatatatatttatatatatccacttgcataagttagataaatagttaattatttttactcgaaaagtaattaggttagaacattaaatttctatttatgctatactttcacaaatatatgcttttgtaaattaaattttaatgtgttacttatgtgcgctgttatgggttacagtcagtggcggacctaggattcaaagtgaggggg

SEQ ID NO: 86389 - DNA, 1037 bp, Cannabis sativa
  modified_base (187)..(192): a, c, t, g, unknown or other
ttttttagcctatagactccccttggctagctagacatgttagtacaactacttgagtgctcgcttaactccttccgcttgatgtttgacgattttaccataccttataaggaggctttgtacagctattcgcaaggctgtattaattccacatgtactctgtcttggattacgtggacatgccacnnnnnntggacaaaatttgggataacactttactaatgccctaaaaaggagataccacttattcatgtgtaagtaaatgttattattgattatcacgtcagtttaaatccagtgcactaataaatcatgggactaaaactttgaagcatataatctcaattactttccactgtgatgtcatcactgtaattgtaaataactatatgttctagatataatagaacttgtatattaaaccataaacattaaaataacatgtaaatttaaataagttctaatcttccactaatagcaaataagattatattgaaatatattttatttaaggcataaaatcacaacatctctctcgtggggtgaatggtccgtacagtggggactattgttaatgtaggatacgtgtcaggcaagggtgtgcagttggtggaaaaaatgccctgaggattcatcggataaagaagagtattcagaggggtgtgatcactaccatggtctaatgtggggtacaagatctaatttgtgtcaaaaaagaataatcatcataaaagtcaactggctatctggctcttggttcgcgattgacctcgaattctccatgtgcaattgacatctgtcttacactctttgcatggctttcttgcgtatgcatgtatgtttaggtaagttggtctcctctgggtctcagagaaatgacaaggcttctgaatcccggatggttatttgctttgtggcagatctctacgcctcgccatattagacaattctcgggccatcataatctttccatgaccttccacaattaaggagacttaatgggtaatcatctagatcgttggcttctattttttgcc

SEQ ID NO: 86390 - DNA, 1155 bp, Cannabis sativa
catgtgctggtgcggtgctcttttgctcaaagttgctggagcaaggttccaaaaactgctgtggcgcctgatgcaatgttgttctcaagttagttcgaagccggtttggcattgtggaacacggccgaggctcttgaggctggtatggtctgttggtcagtttggacttatcgtaacgatttggtttggaactccaaacaccctgatgcgagtgaggtagtggcaatggctcagttaaattatgttgaatggtttaatgctcaaaaacttaatgtcacagatgcaagcttaagctggccgactgcactacctgtggagcaatggacagcacccgatttcccttttgttaaagttaatgtggatggtgcacttttttctgcccaagggcggtatggaatgggtttgattgcaaggtctgttgcgggtttggtttcgagggccagaagtttatctagagaaggctctttgcaacctcatattgtcgaagccattggtatcaaggaagctgtctcttagagttaagcaaatggatggtcacatgctgtagttgaatcgaattgtttaagggtcattagtgatttgcaaaagttcaaaaatatggcttctccttatggttatattctttatgattgtatgactttggttgctaattttgatgttgtttcttttatttttgctaagcagttgcgcatgctttggcgcgatcttctctttctgagattgactgtacttttagtagagactccttaccttttgttattgcatccttggttttggatgatttagtttaatgaaattattattcaaaaaaaaaaaatagtttaaagggttttaccattaaaatttaaacttggagtgttaagtgcaagtgaaatgatagttgaaagtatttagttacaaaaaactcaaactcgtattctattagcagttttttatttacatctatccatcgtgtgccatattagactatttatgtgtacacagtgtattgtctaagtacacatgatataattttattgatccgcgtaaataactattttaaaaaaataatttgaaataattttttttaaaacaaataaaagaaataaaaactgattttttagttctatttacactccaaaaaaatgatacttttaaaatcactttaatattttt

SEQ ID NO: 86391 - DNA, 783 bp, Cannabis sativa
atgtcagtaactactaaacatgatgttaatgtaagagttttttttaatataaaactaatttaaaaacatcataatcacttattaataaacccaacaactatcattttagactgtaaatcgaaataatgcaatatttggacttttatgctgtgtataaacacttttgactctcttcaaccaaaaaaatgatcctttactttactaattttaacttattttattcaaacagtgcagaagaaaatacttttttttttgaacttgtgcacaaaaaaatacttaaaactatccggttgccagttttaatatactatttagccttagttgtatatatatataaaatatacatagggaataaaataaggtgttgtttccaagaaagtcaaccattcaaattcaagtctttttctatattaatattagccaccaccttcacagttcacacctcacacatgcacttttacttaaattattgatgatttttttaaaaaaaattatataatagttatagtggcagacattaacatataatgttattatgacttaaacaaaaaaaataaaaaaaaaatagtaaaaattattgtaattaacaatgttattctttattgttattgttaaattgtgaacgtatgtatttgattgaatcaacttaaattttaaagttgacacaataaaggaaaatctactataaatattatattttaaaaaataaatgataataataaatatttaaaataattaagaaaataaaaataataagaagaaactcatttttataaaaaaaaa

SEQ ID NO: 86392 - DNA, 557 bp, Cannabis sativa
ggtgataccactgcaactggttccaatgctcatccttcaactcgaagtccttctataaatcttgataatgatgatgatgatgctatgtcaaagagtccatctattaggaagcaagagatctagtagttttgattaggatggtagcaaaagaagaggtaaatcaacttccactactagttctcgattggcaaaaaaagcaaagttttcactcgcattggcagaaacattgacagtgtataatgaaaccacaaagcaaaagatggaaatgtatgagaattcaatgacatcgacaaaacatcacttattggatgagtgtattgaagctctcaatcaaattgatggaatcagtggagaagtatatgcaaaggctattgagaagtttgagaacgaagtgtctagagcattgtttctaaagatgccagttaatagaagaattgattggttgaactatttgaagtgatttttttttagtttgtttagcctttacactttataattgttgagatttatgaatgatttagtttctatgaataactttgtttgtaagcatgactttg

SEQ ID NO: 86393 - DNA, 699 bp, Cannabis sativa
tttcatatttattttcaagccttacggtatttttgataagtgttgcttaagctttgttgtatttgtgatagtttaattatttgatgatagtctaaatctaaattgtaaaaatcgcataaatcgcactgcactgtaccattttttgaggtgcggttattgcagttatttagtttcgcaatgcagggcagtttaagagattagaaaaattgtatgtgcggattaatttgagaaaatgattaaaaatctcatcactcgcatctcaaataacgctattagaatccatgaaaacttaaatagtaattgttatagttttatatgtacacataatttacatataaaattaacacacatttatatagtaagtaattttaattaattatttttatttaatataggctctacttaataaaattaatttgccagagtgtgtattatatttgtataaattatgtgtgcacatattattttagaatttttatctattttcattaatatctatcaaatcatgctctttaaatttttatttatctaagactttccttattgaaattagataaaaagtcttaaattcaataatctcaatagttcaagagagatttttaataatcttaaaagtttaaagaacataatttgatacatgtcaaatttaaaaaataaaaattctaatcaacctaaatattttaaaggctaattagtaat

SEQ ID NO: 86394 - DNA, 671 bp, Cannabis sativa
tccctttttttataaaatgggttagttaaaaaaaaagggaagctaaaggcccatattgtagtagtgtaatggccaagaagtctggaacttttataaatttcaaagactccaagccatagctgaaaagaaattaagttaatcattaaagacactctgatcagatcatgatggcaagtatttggattctgaattcaaagactatttacttgaagaagggatcttgtcccaacttacagcacctggaatacctcagcagaacactgttgtagagagaagaaatcagaccttgttagacatatagaggctactcatcactgcctttaaacttttggggatacgcacttctagaggctacttaatttttaaatgtagtactctcgaaaatcataagcaatactccaacagaattatggaatagaacaaaacccagtttgaaaaattttcatatttggggttgtctggctcatgttcttaaaccgaagtttgggaaacttgctgttatacccaaaaatcggctggcacttcagagaaaaatacttgtcaacttgggagaatacgtatcaacaaatataatagtaataatattaaaagatattaaaatagaataactcattaaatgctaaactggtagagtatatctataacttattgactgtaaagtcttgagtgag

SEQ ID NO: 86395 - DNA, 685 bp, Cannabis sativa
  modified_base (470)..(484): a, c, t, g, unknown or other
tagtggcatttactttttatgtcatatttatcataacgttaataattttttccatattttttaaaataaccctatttttattaatacaagaccttttgaaaaagtacctataaacaaattgagaaaaataggctttatacctcttttaagttggagtatttaaaatttaccctctttttctatatctttcgtttttaccctttttttcagccactataccaattttacctttattattacacaataaaataaacaacacagcttattaaataaataacgtgtctaaaataaaataaataatatgtcttattaaatatataacatatacttattaggtaaattatgtatccatttacatttcaatctattctatcctttatcttctccctgttaatttattaatataatcacaattaatttttatcataatttatttgaatggagcacgaattattattattattattatnnnnnnnnnnnnnnntattattattattattatagtggaattcataatggaataaagtgcatgaagtgcgtgcattcagttgctatggacgaattcgtaacttgtagtaagggtatatttggcagttcattataaaatatggtatattttaattaaatttattttagaattatttttggtgaatgtgtaataaaaagaggtaattatcaatttatc

SEQ ID NO: 86396 - DNA, 2634 bp, Cannabis sativa
ggttagaggtttttctcagaaccacattgatttgattgttcatcataataatttatttgattggaggttcacgggtgtttatggtcaaccgaactgggctcttagaagaaacacatggaaccttatgagaattttgaaagaagaattggctcttccatggtgtattattggtgatttgaataatgtgttgagtcaagtggataagcgaggtggaaatccctatccaaattggcttcttgaaggtttcaacaagcggttgctgattttgatttagtggatttggagttggttggtcatcagttcacttgggagaagggtagggattcgaaaaatttaattgaggtttggttggatagagctcttgccaactcggactgggttgatttatttccaagttctcgattactcaatctcatgttcaccacttccgatcgttgaccattgcttcttgacccttcttttcggtttcaaactggttctactaaagctttccgttttgagaatgcttggctccgtgaagagacttgtttttctattattcaggagcaatggggaggttgcatttctaataacattgttgacaagattgtggctgttgaggaacctcttaaatcttggggaaatgatttgacgggtaacttcaaggagaggattcaaatcaagaattgttctgatagtgccttggtttccgaatacgtgacgcaaaaaaatagcttgctgagatttatcatcaaaaagaaattttttggcgttaacgatctaagcagttttggttaaaagaaggggacagaaaaacgaagtactttcacgctgctgctagttctcgtcgaaaaaaaaaattcattcatctgctgaagaatgaggcgggcaattaggtcaaatgggagactggtttacctcaggtaatggttaattactgatattttccattccttggggacacatggtaatgatatccaggataagattcagcatttgataagtgatgatgataatgttactttgcttcaaccggttttggaagaagaagttcgttcagcggtgtttcaaatgcatccagataagtctccaagtcctgatgggatgacacctgccttctatcagaagtgctggcatattgttggtcaagatgtcgttcgccttgttcagaatttttttcggaataaggtgatgcctaaagatcttaatgctactaatcttgtgcttattccaaagaagaaaatgcctgtagtcatgggagatttgagacctattgctctgtgtaatgtgctttacaaagtaatttctaaagttttggctaaccggctcaaaggtctattgtccaaggttatttagtttcagagtgcgtttattcctggtcgcctcattacggataatgctcttgtctcttttgaaatcctccactatttgagacgtcaacaacaaggaaagcaaggttgtatggcccttgagttggatatgagcaaggcttatgatagaatggagtggtctttcttgcatgcaatcttacttcgcatgggtttctcggttgactgggttatgatgataatggaatgtctgagaacaatctcttataacattgtccatgggggagaagttcttgggccgattttcccaactatagggattcgtcagggagatcctatttctccatatctctttattatctgcgcggaaggtctctcagctcttattcgactttatgaagaaaagaaatggatccatggttgtcgtgtggctcgtagagccccttatgtcactcatatgctttatgctgatgatagcttcctttattactcggccactatggaggaggctcaacgtgttctgaaatttctgaagaagtttgaggaggcttcgtgtcagaaggtaaatctagataagtcttctgtatttttttgctccaacacgattgatagtgttcacttcggtattttgtcaacctttcatatgcatgctgctgatgagaatagtttttatttgggtttgccgagtgtggttggtagaaacaagaatgtggcttttggcttcttaaaggagaaggttaggaagcgtattcaaaactgggatagtaagcttttatcgagagctggtaaggaggttttattaaagtctgtgatccaatctttaccttcttacaccatgagtgttttttttattccccttgaaatttgtaaagacattgatcgcctcatgggaagattctggtggcattctaaggcctctcaaggtggaggaatccattggaaaagctaggataagttatgtccgcataaatataaaggtggtttgggcttttgaaacttgagggactttaatttatctatgttgggcaagcaaggttggcgtctgttaaccaatccgacttcgcttgtggctcatgtttttcaagctagatattatccccaaggttcttttcttgatggtgagttgggagctaatccgagttatgcgtggaggagtataattgaagctcaagatatggttaaattaggggctagatggcgtgtgggttctggttcttcgatctctgttcttaactggccgtggctcccttctatggacaatccctatgtgatttcttctcatgaggctcttcaagattgtcatgtctctaatcttcttcagactaat

SEQ ID NO: 86397 - DNA, 818 bp, Cannabis sativa
  modified_base (27)..(35): a, c, t, g, unknown or other
atgatgattttccaaatccaattactnnnnnnnnnggatcggatgaggaaaaaaaggttggattggattggatgcccacccctagttctaattcataattataaaatttcattaaaatataatataaactaatttttaagctaaattaagcacaaattttacaatattagagatggttaagttgaaaaagttgtgtggaaaatgaaattgctttttgtttttttttttaaaaaaaatttattttttaaaaaagtgcttttataaaatttagagtaatttgtagtataaatagccaagtttaactcctagttgcaaataaatatttaaatttaatttttggcagtaataatacttaagttatatttttggaacttgtaggtacgttaaacattaagtcattatcaacatatcattttcttattagtatatttaaattattttttttttttcaaaaaatcaaaattaatgaattggactaatcaaattttgtcacgtgacaatttacttagcacttaactgtcagatacatgcattaaattaaatttaccgcaaaaaattaaacttaaatatttatacctaaattaaaatttaaaattctagtgtaataaaattcttgtgaggattaagatgttggctggcaagcatcaagttatcagatccaacattttcaaattattttagagcggctttctctgccacgtggcgacacatagcaattcgaccgttgggcagtattgattcatagctctcttttgaccgttctcttcttccatcgtccgcatcaagctccaaactcatctatctctctctctctctct

SEQ ID NO: 86398 - DNA, 888 bp, Cannabis sativa
ttcacgacaaagtcactaatatatttaagattactgctctacttagtagttctgatacacaaagtccacgatcaattctgtagtaggatattattactaattgttcacgataaagtcactattaatacatttcagattactgctcctcttagtagttctaaatacataattaataaaattacatgcgtataattttaaattataaagaattttgctataataaatttcaataatttaatggcaaaaagatgtctaaaagatccttatttaataataaatataattaatctttagtaaagttttataaggaaataaattgttaggtgactattaggttataatttaattattatttatttatatttaattttaaaattaatcacaaccatttaatgataatgtaatggctaaaaaatgtaaccaatgatatttctaaaccacttttataataaacaaaaaaaaattattaatagggcatttaaaacataaatcataataatatataatatacaataacaacattattattcaactaaaaaattaataataaacattttaaacaaattattattagttgtatccttataatgattatggtttgtaactactacccatatacaaatttagttattttgtctgcttcctcatgaataccatacaaattaggcatgaccaaatgataatgataaacattgctacaaaaatctaattatggtaatttgactattaatacatccaatataattaaactaacaatttgtatgatttatgtaaatgtgtacatttttaatttttttttttttcatattttttgtaataaaattatttttactctacactaatgaaaaagccctacaaaataaccgaagagataggttatttttctct

SEQ ID NO: 86399 - DNA, 701 bp, Cannabis sativa
acctcattcaagtgaaatatgttcgtgctatagactaaatagaaattggtctaaaaaaagctatctcaagttcgaggttctctacttttagacccaaactcacaattaaattcagctctagtccagtcgtaagtttgagggggcatgttagaattagagttagctatattagttggtttctgctagtatgcatatcaatcagtcagttaggtttgtcattgcttagctgtaaactagttgccttgtctctcattctgtaattccagtttgtgtaaagcattgtatgaatctttccaagcatgtgactgttaattagagaatctttcattcatttttgactctttttgtctctcttttatctctcaatcttttctctgcttatcttttttattttattgctttccaaatacaatatccaagaaatttattattcttattcaccaaaaataaaatagctaaaaccccaagagtaactgaacaaggtgaactatttatatattaattatttcgatggttaacaaagttcaacagactttttgtcctttctccaaagttttgtcttcatggctaaggaaatgccaacattttctatcacttaggtcatgctccgactttgagaatttgtaggcaagtatgttaggagcttatgtttgttggaataaatgtgttttgtggaatttattggtgttcgacaaccataa

SEQ ID NO: 86400 - DNA, 1301 bp, Cannabis sativa
cacattggtctgtacagtactgtcctttatatatactaaaggaaaccgtacatgtgttcttgagtcaatgcatatgttctaatattattttttattcttttaaaaactaaaagacattatttaagttaaatatttaattttaaaactatctacttatttaatccattttttttattttgtttagatagtttttcacattaattatatttatatatatattactataatattcaatttaaactaaacatcaaaaagaaaaattatattttttaaaaaaattgtactctatgcgtataaataaaataaaataaaaataattattatccttatataaaaactttaattataaatttaatttttaacaaaaaatcatattgtttaactttgaagaaattttttctattaaaagaaaaaaaaaatactaatataaaagagaaactaaataataataaaaattagaattttagaattatttgaataataaaaatactggtgggagatagatagataattcgtgatggtagtcaaataaataaaagttaaaaaaattaatgtgcataagtatatatttgatattgtaagtatcagatctcctaagtattacaattagttcaagcttacaaaaattgtaagagtaagatgtgagcgtataaaatatataaaatatttgaatactttttatacttggtaacactaaagtagattaacaaaaataagttgtactcacagtctgaaataaccggtgaagaatgataagcaacaaaaaagctagcattctccgtttttttttccttttgcgatgctcattagattagattttttttatgagaatgaccagtaaaaagagacaacaaatgaattagaaaatattctctaaaaaaaatgcataaaaaaatactaactaaatacaaagtctaagaataaattgaggctaacatatgtaaagcccacaaagcaaaaccaaccaagaaaaaaaaaagcaaataattaaccaagcgtcacaaatttttgtattctccctcgatagtttcatctcatcatctcttctcatgcatatatatatatatatatatttttatataactattccttaagagagaaatgataatgcaatgttgttattttattttttgtaacttcacatttgatgatgaattaattttcataataataattacatattatataaaatactttgacttttagattcattttttaaatgtaacggttttcatttattaattttatttaaataattaaataattaaataataataggagttatgaaaataaaaagatat

SEQ ID NO: 86401 - DNA, 1453 bp, Cannabis sativa
aacaaaagaatcaagcgtaaaataaccctaaaactagaaacaaagagtaaaaactatccgaaaatatgacccgaaacttagactaattttagcctaacaagagggtcggatagggctaagaaaaccagaaaatgattttttcccttttcaaaaattatttttgttggaaaataacttaaatggtcaaatgaccaaaatgcctctagggtcaattataaccacacatatatatacaagggaaaaattgtcattccaatcacacatacataacacaataattcaaattttctcaattatcttataaatgccataactaaatcccgaaaatgtattttggaccccgaacccagttcagcccaaaatacccgattgtaactataccgcgctgacttgtcaaaaaatacctacagataggcagaaaagacatactatataataatatagttcataagcatgatatatcataaaattatacccttcttgggtcaaaattacgattttacccttatcgagtcaaaattacgaaaatgtccctaacacaccaagtgggtcttaaaatgcaatttatcaatatagtttcatatattaaattatataataatataattcctcattaatacataattaatcttgttagggttgctaatccggtttcatgaactttagggtattacaaaaggagatgcccaatttgcttttagggcaagtaggagattgttagggtttatgccttgaaaggcctataaagacttttttgattatttaataaagagttgaacattttgatatatgcttgaatatttaataattaataattattattgaataatttacatataaatatcgaaaaatttcttattcatatatgaggatgtggcttgtagttgtacagagaactaagaccacttaactatgaataaaatagttaacaacatattaaagttatggaatctttaatcaacgattgctagtacagttcaatgatgctcgttctttggtgcaagtaatcttagttcgaattatggatttagtattacattaaagagaaggtattgtatataatagagattatatatgacaatgaccgatatgaatgaaattgtctttatcagcatgtcatttactataaatacctaattcatatcatcatgatgattaatagtaaatcaacctttatcttgagtaatcatgaactcttattcatgttattaatttttttaattcactctttaaagtttctcaaagaagatgattcttacaatttatattttgagaatttaataatatggatgagtgggaactgatttacaattatggaatcctcaccttcctaaagaattgaatactggttccctttaagtgttaattatagaactggaaagttgtctacaaatttagatgggatcaaaattatatttccactagtaaattaatggtactaagggataaaaca

SEQ ID NO: 86402 - DNA, 1087 bp, Cannabis sativa
acaacaggttttccaacaaaccttacaagaagctctaagaactctgaatagttgtttgaacaacaacgagttacatttacgtaccatcagtactaatattgacatgtttggaataatgaaagaaataatggattagtccttctactgcaaggattattttttcttacaattaaatatgtgcaacccaatatttatattagattggtaaaaatacactataacccaacaaatatattattttattaaagaaaaaaaagaaagagttagattgtttagaaggctactaataaattcattacaaaaacacatcagttcaggtcaaatttggcaactgatatctcatttgaaataatcaaataataataatgatgatgtgtattctatgaaattttcttggtaatgaaaatttatcttattcatgaggaaaaaataatgactaataattgttatctagactggtgtttgaacttgaagtatatggaatggaaaggggacaacccttcccttagctacctttggctttgggttctacaccaacaagcatttcacattgttctgaagtagtcagcagcagtactgaaggcagaaactagacaagttgttcccactacttgcttcaggtttcgtgtcccggcagcaacagtggcccctgctacagctcccgcaacaagagcatttacctaaaaacattccacaatggtgagcggaccaaaagaaatctgtttaatgtatgtgagtactgaaaaaatagggattgcaaatacacagaaacaaacatatgatattcacatcatacaacaaaagaacatccaagatcagataatgttctattgtacaaggaaaagtttaatttataacttaatttatcaatgaatataggtcgggaaggcatagacaaaaatttagcaggttacattctccccccattctaccacaacaaaacacactatggctcttgcttcggcagtgccattgcaatgatcaaaaggtacaagtgtaagtgtgaacattaggagcacactatgagatagttattgcatcatttatattgacaatactccagattgagcagccatttcatggtttt

SEQ ID NO: 86403 - DNA, 875 bp, Cannabis sativa
aacttgtaaataaaccaaatagtaaaaaaagctaaacattaagcttaaacaaaattaaatatacttactgttaacccaaaaattttcccaatgacatagacatcaatatttttatatttagacattacaagattgaataaaaataaaattaattttataaaacaatttaataggtttataaaataatttatgaataaattaaatagtatctgaaacatcatatgagttacattaaaaaaaaaaagtaatctcaagatatcttaaacaataaaataatataatataacttaaaaatatgtaaaggaaacaaatttttttttttaatattagcgtcatttttttggaaacagaaaaatatatgtttctcatgtattaaaatggttatattattatttatatatatgtaaaattttgaaataaattttttaaagggaaaagtaatcaattgatatcttattcacatcaaaagcaactaaatgattgtttttttttaactctcccaaatagcaaaaattcttagaaatgagatttttcaaattttttctatttttgacaattattttgaattttagtatgtatgttgacgtggcacaacgatattttacctgagagagagcgagatatagagagaggaagagattttacctgtagaatagctgaagccaagaaagagaatatggaatggtatgagcttctaggtgaggaatcaagccagagagagaagcaaaagggaaaaagtgtttttaaatttatttaattttgattttaaattaagaaaacaaaaaaatttactgaatgcgtgtttttccttctttccccgctttatcaattaaaaaaacagaaattcaatttgtaaattgttaccgaacagggcc

SEQ ID NO: 86404 - DNA, 633 bp, Cannabis sativa
tgttacaagatcaactccagatctatcgttaccaagtcctgaccctgtcaattccaacatcactttcaatttgttttcttctaatggtgcttctgacttgttgatgattgataactttgttttcccttctggaaattgtgtcgaatttttctctgtgtgtgtcacataccaaattaattcaatattaataatgcatatataaaaggataggaaacactctctaattcaaaagtgaagcaaagacgtcgtgcgcaatatagttatttaagatattctgtaaaattttgagatattcataaaaatttaacatgctgaaaacatagtttaaaatgtttgttgtacgcgtataaaatagattgtttgaatattattttttatattgtaagttatttcgaatatcttaaaattttaaaagatgtctcttaaatagctataacggactaaacttattttctaaatatcaaaatatacaagagtgtattggtgcttccattttaaaaatacaataaagcacccaaaaagatatataatttacaaatgtatagtaaattttttagataggcactacaatattttttatttttagtcacaataaaatttgtgattaaaagttaaaaagttgtgactaattat

SEQ ID NO: 86405 - DNA, 695 bp, Cannabis sativa
atgtttaggatgttaaaaatatacttggatgttaaaaatatacttattagtaaataaaaatatacttattagtaaatctagaaatatacttattagtaaatctagatatatacttattagtaaatctagatcctggtaaaatatattccaacactaccaattgtaaaaggcctaatgatatggtgtaatacccaaagaaggccaggtcagccaacatcccacgatgggtatggccaattatggtaccaagaggtaacataatcactttttggcttgacagataggcgtccacgtgccccacaggtgaaacacgatgacccttactcgcactactacaaaattagactttagaggcattttctttatacttttgcgtcgcttttggcaaagtttgcgactgttgctattctaaaggtcgctaaagggatgtgaaataactgaaggcatagggaccccctatgacgtcgattattagtaaataaccaaccttgtatagtccctatggcgtcggttatatactaataactgcctacataaggttttttttttaatttcattttgaataaaaatcttgattttgatataaaataagttttttttttcatatatatatttttttattaaattaatatataaaattagtttttttcatatattttttaagagtaatttgcagcataaatatctaagtttaa

SEQ ID NO: 86406 - DNA, 638 bp, Cannabis sativa
gatttggagacgacgaaagagtcaaaggaaatgccattgactgaaacagaggctccaaagagagggttatggtctggcccatatctcatagaggtatagaggtgtactttggtaaaccccattgattcttgtggcaaagctcctgcagtttcgacttgtacattctttctctgcttagtgttgaagtaataaacttgcttactgaagaactctttaagaagatgaacatcaaatgcatagtttccaagttttttttatatggttgttagttaccaaaggacatcaaaggcttttcccacgcgttaaagacaacacacacatactgttgtgctttatttttcatgtctaacatatgactctatgagcaccagtaaactaatcagttcaaaagaaattaagagaattatttttctttattcttttatggtgtactactaccttttctggatctgctaatcatgcttattgaaccaacttcccttcccattcagtaaatatgagttactatactagtcccactcttaacatatacctttaaatacaattatgctcatcaatttcctacctttgattggagatggaatattaaatgacattgtgcatttatacaattttttttaaagggcacttatactatt

SEQ ID NO: 86407 - DNA, 1196 bp, Cannabis sativa
taagtaacgccactgatgatgggcttatgttctttaagttttgattatgtatgatgtttttgttgtactcttatagtagatatctttgagttttcccttgcttcattgattgagtcggtttacattgttccaattcaattagagttggttacagctgaatcttgttccatttctattatccatgtgtggaattagtttcattgaagttttaaaaacaaaataaataaatataaatgaaataataacttaacattgaagtattaaatttttttattcttaatataaaataaaaatattaatatagcctaaaattataaaattcatgaccttcatcatcaaaatgtaagcattaatccaacatttgctttctcattgtaagtaaagtgatgatgaaagaatactaatttggccatatatagacatcatcactaaaactcatcttcaacatggaaacacttatctaataaaatattttttttctatcacaagcatatgatttttattattattattatagttaaagtacaaaaaaaattatattctaactcaaaacttattaataaaagctagtattgttttttgtagggtagtgttaattttctttttgttttccacttatgttactactgcaagtaaagaattttgttgttgtttttgcttttttatctttttgtattctctgttttgcgatagagtaagggtacaacttcatgttagaaaaaatagtaaattattgcagaagtttttttttcactttaattttgtatatgtttctttttctcttttaaaggataggctagacatatataaatggtagactactgtgttaattttgtatatgttttttgccattatttgctctctagccatctgggtattgggcttgctatgaactaatatcattataaaacgccaaaaatatatatattattgttaatcgtatgaagcatagggtccaatggaaaacaaatggttgaatagtgtccaattaattagttctttttttttttttttttgattgactaattaattagttctgtcaagagactatttttgtattttattttattgatcgaatgtgccttaatccttatcatatgagtaaagatattttacacattgcacttttttaatttaaagcagtggtagattcaaacccatgaagagatccttccaagcctgtatatgtattaacc

SEQ ID NO: 86408 - DNA, 743 bp, Cannabis sativa
tttaggaaaaaatgacatattttatcaatattgaatagtttaggtttagaaaaaaaaaatttggtccaataaatgcataactagtcaaatttcccatcccatttgaggatcttagagaaatactaaaaggtaccagtagtgatctaatattttcttatgtgtgaatatcgttattggtcatactaagtattgggtcttacacagtttgatgtaataatttgtagggagcatcattagtcaatcacaaagcgacatgtctaaaagtattaaacaatattattggtgtctgatgctcatttatttatatatatatctattttttttagagtttttggagcttgatatactcttttgtcccaatcaaaatttagtgaaaatatattataattagggtcacttggttgataaaacaacattcattgaaaaaaaaaatgaatagaatgtaacattaatagattagaatgaaaattttgagagaaaggagaaagaatagtacacaaaccatatatatcatacctttggagattatttattttgtaggattaattattttaattttatttaataagtcttaattaatatatatggtcaaaattaatagtcccattaataagttaataactgaactattaactatacaagcttgtttacaagcagaaattcagcaacgcttacctcgttttagtattgaatccggtttttttgaaagctgtctaattaatccaaaaaaaaaaataaataat

SEQ ID NO: 86409 - DNA, 1001 bp, Cannabis sativa
atgtaagcacatacaatacaaggagttggatcggtttatatagtaaaaattaattattcattctgattgactgaagaaaaaataatgataaatcaataatgttgactataatcattgatgataaaacttctcttggtttttttggatcgaaaaataatatcaatcagcagtgggacaaaggagatgatagttaggtgaggaagtgatgactttgattgtagataatggtaaaaagaaaataaattaatgataggcgcgccggacgtcacatagaagcacactttgacttttgaccatgactcatacatattattgcaagatattatttatgcctactttacgaatgagaagaaataatatttgtcatgttaatggttaatgcatgatcctcttaatcattttaaatcaagatgtattcagctatattgtaaaatataatataagaataatatatagagattgagagattatttagtatgttgtattgtattgtattgtatggtattgtattgtattggattgtattatattgtattgtattgtgctaacttgagatttttgaaaactaaatattttaggagctaaagaaatattaaaatccagaaataaatgagatggagatttttatgtggttcagttgtcaattaatcttagtccacgaatcagtctattatcctttaagagcgtatttgacgtgtttacagtattttgcatgaaaccctaactctgtcttcttagtttctcttgaaaaagaagaaaacatagaaaagtattggcagagctttggctatataggttctaatccccccttcgcatggaaatagaagtgtatttataagctaagggcgggtatggacatgcccatgatctgcctagggtttctgctaaaagccgactaatggggtctgttagagtattagttgtatattagttgtaaaagaattaggctaacttgtatttagtagtttcctattttgttattggtagtttcccatttagtc

SEQ ID NO: 86410 - DNA, 884 bp, Cannabis sativa
gaaaaataaaaacttttggcattgtaaccccatctttaatggggcatttgaaacctatgcaactgactgtaaaattccattgaccttaggccagcataatcttgaacagaagggacgtgatgaataatcaacggagacttacaagttctagaagtgctggcatcaagagcgctagagttggcgaccgagaaaggaaacttagggcgaatagggacttgttccttcccggcctcctctcagaggatcctccccgaggcagcctgagcattgatataggccagctcttgttccttcttgaatttgtatatgttgtatttgtcttctatggaaaagatgatgtcctcttacagcactttctcggtttcaaggcttcgaatatgagggcaagtaacattggacaagttgaagtcgtccatcaactggctttccaaaatcaacttggccctcatgcagtttgcagtcgtgaccagatcccccatgttcaactcatccttattgtaaccagcaaaagcctttgcgtggtttaaaaagagttgggtggggcggtacggtgcatgggaggaaccctgacccatttcgtgagctgattcgaacgctcaaatgctttgaagcctgaggagaagaaaaatcggtggcgatattgtttttcattcttttgaaagttaaaatgcactggaccctagctcgttggtagggtgggcctagagtttgtagaaaccatcgttaagtttgtcgcgcttttttgggacggacagaagttaatagaaatacaaaatctcagccggacttggtggggcctagttcctggcaacataaaaaatgtacaagcctgaaagtaggcgataggcttgaggaatgagttgataaggtgcaaggccaacaaa

SEQ ID NO: 86411 - DNA, 899 bp, Cannabis sativa
gtcacgattcaggttcgaacaaatatggttgcaggaggaaaaatgccatgacattattctggaacagtggaagaattcagctactgatcctaccaaccaggtgctgcaaaatatttctaattgtgcatctcagcttcagcgttggcaccattcaaagtttagtgatctgccgaaaaaaatcaagctttcccaagataaagtggctgctcttaataataaacatgacacgagtgttgatcattttgaagagcttagaatgagtgaatctatccttgatgagttactaactaaagaagaggaatactggaagcaaagatcaagaatttcatggttgcaatccggtgattcaaacaccaaattttttcatcaaaaggcttctagcaggcggtccaataatactattcgtatgctgatagatgaacatggaattgaacattcatctactgctgatattgctcacattgttcagagttattttcataatatattctccacagagggttacgatgttgctgctattaatcatgtgatgtctgctgttcctaatattatttctgcagaaacaaaccaagctcttcttcgtgcttacacagtcactaatgtgtatgaagctctttcttccatgaaatcggatggtagcccgggtataaatggtatgtctgtcatgttttacatcatttattgggagattgttggtgatcttgtttctcgtacagttctcaaagttctaaatgatgggggagatccttcaagcttcaatcaaactgttatcaccttaattcataaggtgaagaaaccgacttcaatgacccagctgcgcccaattagtctttgcaacgttctatacaagttggttttgaagtcaatagtgcttagattgaagccttttattggtgaag

SEQ ID NO: 86412 - DNA, 789 bp, Cannabis sativa
acaccattgtggtgtaggaaaaaatacctgtagatgtgctgtgagaaaaaaatagctgtaacaaaactgtgaaaaaaactaagctgagtgtttgaaaaattagaaattttaaagtgctgtgagttgttaaggttatgttataataatgataatgttataacctagttcattattataaaaaatatataaaaaaattatgtgataaaagtttttatttttctatatatttttaattattttatcctatagtataaattcatatgtatttgataaaaatattttataacatttttaaattatatttttatagcttgtaaaacaaaaattttaatttataacaaactctagattgatgtgatttgttaataatataaatataagtataaatataaaatattgtttaaaacaaaataaaaaataagaaatttaaatattttttcctttaaaaaatatatatattttttaaatgtataataaataattaattatttttttagtacaaaataatttattatagttttattttcttaaaagttaggttaaagcagcttttaacttttttaaaagctataccaaataagtcatagatcttatttttgacttctttcactatttatgtataatattttatttttttatgtatacattttttatttcacaatcaattatattttgaaccaaaaaaaaaagaaaaaaaatttagaagtttaattggttaacatattaaaattatgtatttttggcatctaaacctttcaattgttctttcacttgcactaaaccctccat

SEQ ID NO: 86413 - DNA, 1809 bp, Cannabis sativa
  modified_base (408)..(409): a, c, t, g, unknown or other
  modified_base (1744)..(1744): a, c, t, g, unknown or other
tttggtaagtataattgacataatgctatttattttataaacatcctatcgtttcacttgcactaaattcttaaagtttaaaatttaacagtaaaattttttaaactattgaattgttagcaaatttaaagtatcatctggttacaactatcaccatagactgcttatgtgtacactcttgtacacatgacaatttttatattagtacacccactacaaaaaacagctacttttagtgaaaattttttagtcacaatgtaaattttttgtgactaattatgttttttactcacaacaaaatattacttatgactaaaacatagtatttagctacaacttgtcactaatctagttttagtcacaagtattgtggcttaaaacacaattagtcacaacaaattgtaattnntgtgactaatacttttagccacgtactttttaggcacaacataagaatgatgatttataattagtcacattttttttttattttcagtcataagttttgttgtgactagaagtaaaatttttgtagtgacctaatattattattttaaaattaaataaaattatatcaacaaaaaataaaatattaaaaaaataaaaaatattataaattttgaaataatattttataattttaaaataacaatattaggtgtatcaatataaatatatcacgagtatacacataagcagttcatgttggcagttaactatgaaaaataaatgacaccttaaatttgctaataattcagtagtttggaagagtttactgctaatatttgagcttggagaattaagtgcaagtgaaataataattgagagagtttaaccgcgattttttttaatactttatttggaattttgtctctgaaatataacttttaccaaattgtactacctctctctctttttttcattcatcaaaaatttcttctaaattatttttaaaaattttaaggattttattaagttttattcttcgtacgtatataattggcaaaattttgatgtgcttgttatagaattccacattgttaaatgttaccaaagtattataacaagtaaatctcgctaaatagtgaactctattgtttgcagaccatttaattaacaaactttaaagaaacaaaacaatctttcataccatctaacaacttcttgcacttaattagtaataattctaccaaaatagaagtacatggtagaaatggaatagaaactaacattcatgtattgtacatttcatctttaaaaaagtatcacatgcaagggttggtaacctaagaaatggaataaaaactaacattcatgtattgtcaagtgtcaacaaatatttttggtatttatccatgaatatataaatataaaatataactattttagagacacaattatagatttaggtgaatcgataataaatgttgtagtagttgttagtatgtgccatattcatcaattatctacgcataaaataatacttggattttgaaccacgtgattcacttcttatcgagaaaattaataaataaaatcatgattggacttttggttgcacctaattatcaggaatatatgtatatttataggaaataatttggaaaatttgactttgtattgaattattggattgaaattatttttttaaatctaagataactcatattggtaaaatagactaacattttatacaactcaattttacctttaccatttcaaacacttaggaggcgtttggttnggaggaatgaaaatataggaattggaatgggaatgggaatgagaataggaatggaatagaataaa

SEQ ID NO: 86414 - DNA, 575 bp, Cannabis sativa
agatcctggtaaaataacttccaacaaatacttcctcctctttattgataatttttcaagaaatgtatgggcttatttcttgatggagaaataagatgtgttagagaatttcaaaaaattcaaagctctaaagaaagttgtcttgctattaaggccatgagatctgaccgaggaggagagttcacatcaaatgagttcaacaaatattgtgaagattatggaatttattatccattaatagtgccaagatgatccaaacaaaatggagtggcgaagaggaagaatcaaaccatactgaacatggctcgcagcatgctcaaaagcaacacaatgccaaaagagttttgggctgaagcgatagcttgcaaagtttacttggtgaatttctctccaacaagaagtgtgtatgagaagaaacctcaataagcatggaggggcaaaaacctagaatttctcaccttagagtctttggaagtattgcttaagttcatgttcccgatcaaaagagaatggggcttgatgacaaaagtgagaagtacatattcatcggctatgagtcaagatccaaaggatgc

SEQ ID NO: 86415 - DNA, 1099 bp, Cannabis sativa
aacccagctcccaaagcccataaacaacataccttgccaattgaactataactttttttatatgattacttgaaccaaaatttatatattttatatttttctatatatgcatttatattaatttttatatttgggggcctccaaaattgtggggcctaggacttatgcttcggctgccccaccctctggccagccttgatttacttaaacatatagtgattcctaagttatgcactccactttaatagactcactaccaagtctcatacagagttcccaaggggaactacgcataagagtatagttgtatatgtctctaaagccatcacgagaccctagctagtcgagctaaattgaggataaagaactagcttcccacttagtaccttggcattggctggccagcgttccctagccatagagctagcttggtcccatgacctagcctgtaacaccctactactttaggtgtgttatcgtgatttcatatgaattgtgcagctcgttgctaatcaaccagtttattgaaaaccatgaataattaaaacttttttaaaatacttataaatactaaaataaataacatatacatataactgggatcccgagtataaattatttacaactattacaaagtatgtaatacaaaagatatcgcccagcgactataaaaaatacaactagttgtcccaaagattatacgctctaggtctaacagcctcgacatgtacaatcttcatttgctcactttcacggctgctcaaccttagccttgcccttacctacacatgaaaataatgtctgtgagtcgacagactcagtaagaaaaatataatcaatatcataaatataacttgaattatgatcaggtgcccaaacacccaaccataatcctatcaccgtgtcctacacggtattgagtctagaatgttcgtaccataatactattgaccataatatcagcctatactaagtactctagtcatactctagatgtaccatctttatgttacgtgaggatgcccatattcgatgggaaattatgtcttaaggtcatgatttgaataacatgacatgggatacatttcagaccttgttt

SEQ ID NO: 86416 - DNA, 549 bp, Cannabis sativa
ggaaaacgagatctcaactacatatgctggcaaaggtgattccatgtcatccactaatagaaccacaagagatgaacacggaaggattctgtcgtgagacaaaagctcattgagccaattgagacaactcaagcctacccaccatgaggggattttgctgagggaagcaccccaatagcctaaggaagagacttcacccaagaggtctcatgctagggggaacctcgcctatggctccccaccaagagcaaggtaagtgaaaggccttatatgttagctttagtggtaagtcacccattgttcgaataagatgagtaccttccatgggccctgtgcaaaccacatagaagacccaagttcaaccgctaactaccgagaaaggatgagcgaaaggataaaggagttggaagcaaaaatgcaagacctacatcaaaagataacaatttctatgaagggggacttgaatgatgacgaggagtttgaggaaattccctctctcgagggagattcaaatggaaccacttccactgaacttcaaggagctgcaag

SEQ ID NO: 86417 - DNA, 655 bp, Cannabis sativa
aaatagctcttcccctttcaattcaaacctctttcttctcttcttcgtccatgatgcccaatttatatcgcatgatgcccaacagaattcttggatagcgtaactccgatattctcaacgggcaccgacagtagcatcacttctgtcaagatcgaaggaccaaaatggaactctttcgtcgcagatcgaggaatcaaaatcggagacgttcttctcatgaacccttgggtttttctgggttctcttctctctacctctcttcttctccttgttaaaccctaactttttcatatagcagttcttgtaatgagcaagtccagcaaccagtccgccattaaagtacgtttacacttgaatttttttctttcatttgttttgtcttttaaatttttttttgcttttccattttatttttctaaaaagttttgatttttgtgtacaggttgacgcagcccccgttgtagtcccattctcgaagtatggcagaaaggtattttttttttatttcttttacagtttaattaatcttcatatgcatgtgatcaaatcaaaatattcaaagagagcgcgatcgagtcggttcctggtttcttgtggttttactcaaatcaaaatctacataataatatatgtttattgcttattatatatatat

SEQ ID NO: 86418 - DNA, 570 bp, Cannabis sativa
ctattatggtgacctttagttttcatttttacaatttttacagttacatatatagcgactaacataaaactatgcatacgtgccttgcacgtaactttcttctgagtcctctgtttgagcaaacaatcacagccaaggcttgagcttttttttgggatatttctgggtgcacctccgtagcctacgatccattctcctttctcctcctttaaagccccaaactcagtacacaaacactttcttctactaattaatttcctctaatctaatcacaaccagaaaccagcaacaaaaatggagtttctaagccacccagtcccagtctcgaccaaatctaatttaaattttaataataatctcacctaataactaatatattttttcttcaattattaattgtatcgttttaaaataaaataaaaaatatctaacataaaatttagtatacgtgcttcgcacgtaattttttactagtatataaatatatatatatatatatacgaataatagtgtgcaaaaataaatacttgagtcttagagtttttttttaagaaatttagccttaaaatt

SEQ ID NO: 86419 - DNA, 697 bp, Cannabis sativa
aaaaaaatgcaattattaatatgagagggtaaaaagaagaaagcaagtcaaaataggcattatttagtataaattagttaaaagtctaaaaattgataatggatatatttttaagattatataatgaaatttcaccattaaaaaataacttaacaaacaacatgaaaataactataaaacaacaaaaagataactacaaactaacactaaaataacaaaacattgacctaattacaataaacaaaacaaaatcagcttttcaatatgttttgtattatgatttttttttttacttaattttgacaagttgatttatttttttgtactattacattattttttttttcatagaatttattattaaaactttattctttcaattttttttctcctttctatttttagttagtaatagttaaaatgatactttattttttaaaaattaaataaattaaatagaaaaatataaaaaatcttatgattttaaaatgaagcatatataatataatgagtaatatataattaatatattaatacactacggcacatcgtgttaactaaaaaaacaaagaatcttattattgtattttaaaaaatggtgtcaaaaaaaaaaaaaaactaattatatgtttttacatatacaaaacaacacacatacaacaagaaaaaagtatcaagaataaactaaaaatacaca

SEQ ID NO: 86420 - DNA, 3456 bp, Cannabis sativa
tgatcaagcaaatttattggcaataaaaaataactgtgtatttacattttctttttcttttttaatgtagaatgttgattatgaaccatgattacaatttgcagagttatctaatcaccatgtagcatcatctgttcaaaatgttttatgaattgttttgtgtatgcccaggaagtcttagaaaaaattaacaattatttacttatttacatctgcacccttaatattcactctattgtattgttattgtgaaattagttcggttttatcatctttttcaattaataataattgagatgctatatttttcttctgaagactttaacttgcatgaagattgagaatgtgaagttttgagtcccagcgttattgttagcgcaattcttctaagggtattgaagaggatctattttcattttcttaaattttttgtgagaaaatgaattctttttgggctagaaaatgttaacaattcaagaatgttgtaataaaattgtaatggtttttccacatgttgttacatgttttcttatcattgcagtgtttttcattgcttatcatttcaagaaactttatgtacaattgtgtgatattgaagagggactaggatttagaaattaactagatttgttacaacaatgctccttttgcagctgttgaaggttcttctgtcgctttctatctggattatgctgatttgcatgctgataattttcatctttgctacacaattattgttcaaggtaattattttaaaattcttgtaaactggcttgaaaatatttttgaataaagtgaatgagatgattgtttgcatctgtcttttaggtgcaaaaaatatcatcaacgcttgtcgagaatgcaaattaagaaagttaatatacaacagcactgcagatgtggtttttgatggttcacatgatatagtaaacggagatgaattgttgccataccctgggaaagtatgttaaatccaaatgtgtcctttacatgtcatgtaaaccattcctgatctttctttagtgatgtctctagaatttttttgatgcagtttgataacgtattaactgaccttaaggctcaagcagaagcgcttatcctccttgctaacaatattgatggtcttttaacatgtgcaattcgtccttgcaatgtgtttggacctggggacacaaatcttgtgccatttttcgtgaccttggcacaatctggttggacaaaggtctgaaagcaacttttcacattttatgcgatgaaccagttgagatatgtttcactgtatccactgaacagtttaaatataatgcttgtttttcataatgttggcaccaaagtctctctcctacacttttttatttttccctttttgagtcttttcttcactcataccatttgagatatgtttcagtgtatctactgaacagtttaaataatgcttctttttcataatgttggcattttgcactccaaagtctctctcctactcattttatttttccctttagggtctttgttttactcatacaatcagtaatccaacatgaaaattatttactaatatgctgttgatggttttttcattcatcgtttatatgtatatgtatgtatgtgtgtgtatataatttcaattcttgttcccaaaagttatgatgttaagtagtaaacagcataatatctgtatgtgctcatgcttcactttttatttatgcttttttttaaaataacaaagattctcatttcagtttattatagggaatggtgaaagcatatcagactttacctatgttgagaatgtctctcatgcccttatttgtgcagaagcagctctagattttaggatggcctctatagctggcaaggtactcttccagttgagtctttattttaaagtgttttacaagttgacgttgtatgaatgcatccacatgtaaccatctcattttcatctatttgtaggcttttttcatctcaaatcttcatcccacaaagttctgggactttttattacttattttggaaggcctaggatatcaaaggtaatcatccttatgtcaatatctgatagaatttctattttcttaatttttgcttttccatattatcagtagaaagtgtgcatccaacttgtataccgattactgacattatagtgctatgcaatttttacttgcatcaaaacttcttcatactcagtcgcaaactcattttgactgcagaccattaattaaacttcctgcaaggatggtttggcacattttatcatttataaaatgggcgcatagaaaatggggctttctagaatgcagtcataatctgtttcattatgctcaactagcctcacgctcaagaactttcaactgttctgcagctcagaaacatattgggtactcaccattggtctccaatgaggtaagtttttgttttttctatttgttgtttttatcgtctttatgatatccaactgtgtcgttcgtttaagaaaaagtcacaggaaatctgatgaactgttttatcctctcttgttttttcattttttgggaagggtgatataagacaggatgcactaaagaattccactccttcataaaatatgaaaacaagacattctatagttctttggcactaaatagccacaacgcctacctaattgtcttcataaggaatgaggactttcttcggaagtcttaaaaagaatcctttttcatttcatttagcaataattgtagtcatctgtgagctgataaatgcgtacttcttggatgaaccaaactgaaattaaaaactttgacaacttttcttgtacttgcactaaaaatggacagtgcatgaatagatgttccatcatttggcattaagcactccaaccagaagataagatgcaggacagtattttcattttgaaacacctttttggtgttcaacttcgccattgccaacaaccaataaaaagccctttaccttgaagtgataataaaagattaccataggcccttttgaaaatttctttgtttgggtcaaagcgttactggtgaaacaacatattaaatgttgattatatatatatgtatatacatatatatattaagcactacagctacatgcgactcaagtagatgatataatttaatctgaagttgcttccgctgggaattataattttattggtaaaaccacgttatcactttcgcaataaaaaagtgtttaatatggtcgtacttctattattatatttttcaactttttcttttctttccttttataatcttgaaaactactagtctttatataaactttcttgtctgttgatcggcaatgaacatgcaggaaggtgtctcactaaccattcagtcattctcacatctagctcaagacatcttttattcaagatactgtgatcgtgttgaaccatcaaaagtagagaagcttctaggtggtgggaaaggtaggaagttgttg

SEQ ID NO: 86421 - DNA, 1099 bp, Cannabis sativa
cgacgaaacttttgtagaagaatgaatgaacagctggtcaggctttcacatatattctctctgaaattctctgttagggttttgttttctttatgcaatttctgcttaattttctgtagataattgattcgacttgccgtaatccatctcaaggtacttactatcttgattcttatcattttctttctacgatgtgtgcatattttcgcatctttgcttttgagatatcgataattacaatggtggagctattaatgattttatgatttattcattctcttggatagttattgatgtcgaaattttgaatgtagtgaatataatttgattaatgccacacattctaattaggtctaattaggcagagctgtgttgtacctttgttttattggttttatagttttccatagttagttcaataatattcctatttgggacaccatctgtttcccctgtatttctatgttttgttttgaagacttattctcattgttctttcttaattagtgttgctttgcattcttctaatgccaaattatgctggatgtatttgctggtaaaggtggacaaaaaataagagtattaaagaatcaccacttttattaaagaatcaattgtaaaaaccaccacagcaatcgatatgtatgtgctttattttatttcctgcctgtaataatcttgttactatgctggacacaattggttcattcattatttagagaccaaaggaggacactttacgagaattgaattatttcttggactccttattttatttttcttgcagaattggaagtagtaaaattgaaggatagtctcttgctcatgcttcaaaggtaaactatcatatattgccctttataaattacttccacttctaaatttatgttgaaatactgaaagtggcaaatttgttcattctccgaatgaaagaattctatcttaagatcaatcatataagcacatatgtgtatatatatagtgactacttagatgaaattaataatgactaattatttatattttgtgctgtgatttcaactaaatagcaggactctaagattgttgtctcctaaaagatagactgtttagttagttt

SEQ ID NO: 86422 - DNA, 572 bp, Cannabis sativa
atatatatatatgaaactttaacaatgaatctataaatccaaaattataaaatgataccttaatttttaagaaatctaattgagcactaaaacttgaatgcaatgataaaattgtgatggtggtgatactgatataaatgtataggagaggacaatggtggtgatattaatattgtgactaagataagatagtgaggttctttagcttaagggtgaacaacactaatgatcctaaactcatctatttataggccaaagttcaactgaacctcaccctttgacctttcaaaatcctaacctccctcatttattctctccatgatttcatcttatatttttaaattgtttcaaactcaacaaaactctactctaactagcttggttggccacgtgtaattgtttttccacaaacacatgtttataaattcaaatctaaatttgaaaagatgctggatttaaaagaatataagattaaagctattacattcaccttacaactttgataacatagtttaggtaattaattgatttccttaaaaaactgaacaaacatttctatcacttaatctcta

SEQ ID NO: 86423 - DNA, 957 bp, Cannabis sativa
aattcgaaacaacccctgttttgattgattctggttgtcttctccggtgaagtcaccagaattaatggtggttctctctctggttgaatttttgtttcatttgcgttgagttgctgagtggttgaccgatggttgcctaggaagcatggatcctgagttgaaggtgtgtctaagaggtatttgtgtaaaattttttttatgtgggatgtatatttgtttatttggccagataaaagtatttttgtaatattgttaccttttttggttaaaagtgaaaaaaaaatcaaaattaaaagtataatatatataatactttattaaagaaaaagatttatatataataatgtgtgagatcataattatagcatttttgaaaagttttataccatttgagtattttagaagtaagggtgccaaaaatgatgtggaagaaagataaaataaaatattatatctatggatggtgtagagatatttagcacctttaaagaatactacattggagatgctcttatttgactaacttagttgtctgttttgcaataaagatgaaaaagtgaatatcattttggatcatgtgttttgtaaaagttacagattggatcctttattttgttaattgacaaaatgaatcctgtattttctaaaatggtataaagagaaccctaaattaattttttgttaaaataaaacttaataacaatccgatctaaaggtgttatgataaaattggttaattttttttgcatcttttcgtgttaggaattgttttcaaattagttataataaaaaaaaaaattgtcgataattgagctcatggtcctatttgtaccattttagaaaatataagatcttgtcatttaacaaaatagaaagtctaatctataacttttgcaaaacacaaggtctaaaatagtatttaccaaagatgaaatcaatattttttttaagatcatt

SEQ ID NO: 86424 - DNA, 559 bp, Cannabis sativa
cctcaatttcttgtttggcttaggaaccagtacgggattggctacccaggctgggtagaaagcttcaattataaaattgtttacactgagcttttctacttcttcctttagtgcatgtgcgtgttctttttccaacaatcttcttttttgttgtacgggataaaaattgggatcaatattgagggcatgggaaattatagctgaaacaatcccaaccttgtctttgtgtgaccaggaaaaatttcaaggttttttcttagaaatttttatcaaagcaaattttattttgagcaataaactatttcctattttaagcttcctagtcagcatagcaagatcgatttcaacttcttctaatacttttacattgcccaatatttgtacttagttccgtaaagcgaggatccatgtcttcatccctgtcttgggcaaatccctatttggcaataattttgtcctcctttgatctttgtgcgattgtccttttttggctttagttaaagtgaggatgtagcattcatgtgcagttcttttattgtctttcaaataacccactcca

SEQ ID NO: 86425 - DNA, 548 bp, Cannabis sativa
tgtaaggtttcttatactttatacgtgtttatttcatatcgttttagaagttcttatttaggatgttaaataacatacttgttagtaaatctaagatactggtaaaataattctaatatataaagcttgtcctacatgcaacgaggatactagttccattcaagtgattggaaagacatcttatgttggccatagacgtttcatatcatccaatcatcctatgagaaaggaccgtgaatttgatggaaatgttgagaagagacttcctccaagacgatttacttgttttgaaatattagaacaagtgaatgctgtatcaaaacgagctccggggaaacgaaaaagaggtgagactgaaattaactggaggaataaaagtatattttatgaacttgagtattggagtacaaatgagcttaaatacaacatcgatgttacgcatgttgagaagaatgtgatagtatccttggcactctcttggataatgacaagtctaaagacaccactaatgcaagataagatttgaaaaatatgagaattcgtcaatc

SEQ ID NO: 86426 - DNA, 599 bp, Cannabis sativa
aacttagtgtgtttccaaaccttctttgcattttgacatgtaaacaaagcatgcccaattgatttccaagcatgtgcatacaaagaacaagttgctgaatctatgattttccttcgacgaagagcggcagccactggaagtgcttcttgaatgactctccaagaaaatattttaacttttggaggtagatgtaatgcccaaaaaattttccaccatgtgagttgattatttgatgtcaaagaatcatctacctcggccaactcatctgttaaatggaaccccgacttaaccgtgtaaataccagttgtattatgatgccaaatgagctaatcttgtgtttggaagatacttaaggggatagacaaatcctgtcaacatcaattgaagaaaaatacgagtctaacatgtttttgtcccatcctctagcctttttaatgagatttgtaactattaaagatggcggtccagagtgaaagtggttgaaaattgtgatgtccaggtatccatgggtctgaagcacaattcaccgtaaaattatgtccaattttatatggcaatcccttgattagaagcacaattgtgatgtccaggtatccatg

SEQ ID NO: 86427 - DNA, 768 bp, Cannabis sativa
  modified_base (39)..(47): a, c, t, g, unknown or other
ggattggatcggatgatgattttccaaatccaattactnnnnnnnnnggatcggatgaggaaaaaaaggttggattggattggatgcccacccctaattctaatagaatgatctttttaccattttaataaattgacaattccattttaaaatgaacaaaaaaaaaaaatagtttcaataaataaaaaaattaattattttttaatcaattttttttatacattttaaattttattgcattccgtccaaaaaagaaagtcttataatattacacaattatcgttacatacattgcatcataaatcaaacatcacacctattatctctccttcgaactgggtgcttctctccttcacaggttcactgttacactccactccctccgtctcccacctccaccctccgcagttcggccttccaccggtgacctgctctctcttccccgaccttctcaactagtaagtctctcaggtacattttctgctagctatgaagttgttcacaagcatttcacttctgggtttcctcatatattttcatttctgggttttctgatagattttcttttctgggtttgatgcattttttaatatatatatatgtacggaaccacctctatcgtttttgctgtaacactgagaatgaataaactttcatagagtgaaaagtaaggctttggggaaaattattatagcggttttgattttgaagagatcaaatcaagactgttttatgccaagaaacctttctgttttgtccttttcgata

SEQ ID NO: 86428 - DNA, 999 bp, Cannabis sativa
ttttttttttttttatcttaatatcaaaaataccttactcaatctcaatctcataagctatttctttgccttttatacatatttaataacccttttttttttcatgtgtagtatttgaaattttcttttttcctctttttctcactctctctttttattttatattttcttttaggcttagcctacttttcttttttctttttatgccttcaccctatgataattttttatttatttatttgttcttttttgtttttttttttattttttttttatcattcaactttttatctttcttttctcacattttaaaaaaatatttctgatcatattactactcagttgaacttaaaaatgatattgttataatctactcttcaatgtgattatttcataggaaacatatatattcttttttatttccaaaatcaaacaaaaaaaaaaataattaaattgctcataataccaataaaattttatttttatttaagttaacaacttaagttttgaatgtttacataagatatatgataattatttttatttacataagattcgtgaaactaaagaatattgtaattatatattattatcaattttgaatgttttttttagaataaatatttaagtaatcttataaagaacttttggtatgcagtaaatgaattataaaaaatttatggagaacaaaaaattacatgttcagaactcaaaattttttaaaaattattgagatttctgattctgatcttatgattttagtagtgaaatttttgtacatatgcctgtaaaattagaaatgttattgaaaattattaaaaatatactttgtgacaataaatcaatcaggttgcatttatgtaacaatataagctctaggtcaaatacatattgactttgaactaattattaaaatgaagttcacaataataaggtgtctatagaacatataaggacaaactctagatattttcaaattcggatcattaaggatatacc

SEQ ID NO: 86429 - DNA, 599 bp, Cannabis sativa
gaaatgacccactaagatcattgcctcgtaaatctctattaggaaaatgtaaatcaatcatgagatgagaaatgaaacaaacagtaaatacttgtttgaaacatgtaattgaaaatccacatgaagaacaatttaaagtaaaaagtttttgcaaaagcttgtttgaataatattcccctaagaggagatatatcactagctattgaattaatagttacataacttttattcagaactctgtgcatatggagaatgttcttaaagctatttgttaaagtgcaataaagtagtagaattgaaaagagaaattacactaatgtcaacatggaggaagaaggaaaggatggaatttcaacactgaaaccattgtggctcagattcctacacatcacacgaaaaatgtagtagaactttgagttagagggtagagatagatttagttaaactacaacatcaatgcttaacaccacaaaatgaaattacttctttgttatcttacagggtgtttaagtttggccaacatagttatatttggaggaattggtccattaagattcattgacaaaatgttcctaaaaaatgtagcataaatgaagaaa

SEQ ID NO: 86430 - DNA, 722 bp, Cannabis sativa
aagcaagatgtgagtcacacacgtcctttgtttggcagaatgtagtatgaggaaaagaaataatctaaagtggccatcgatggagaattaggaatgggaataatgtggaatattggaagactcatggctgccaagaccaacaactttcaaagttatgatcagcctactattctagagggtctatatctagtggatttaaaagatgcaactggtatgtgggataaagattttatgcaagccatttttaatgaggaagacgctgacttgatcttaataatgccatgttcggagtggaaagtggaagataaaattttatggcactacaaaaaaaaaaaaagagaaatacttggtgaagagtgggtatagaatggctatagagctacgatagtcatatggcagcatggtggagaatgttgtggaaattaaaaattctactaaaagtgaaacattttgtgtggaaggtggtgcattcatggcttcccactcatttcactttatctaagagggggatgtctgttgacacaacctgccataggtattttgctggtgctaaagaagattttttcatgctttgtggaattgtaaggcgaactgagcagtgtagaagatgtgtggtttcaagccaaaggtccagagagttggcaaggaggatgtggttgctatccttatcagattgtctaaggattggcagcaggaagagtttgaatattttcttatcttat

SEQ ID NO: 86431 - DNA, 843 bp, Cannabis sativa
gtgttatcagcaacagtaggggctgtagtgatattgggggcatcagatatgataccagatggagtttgagcatgctgaattgttgctggtgtgatggatagaccagaaatctggtttgttgtattgattactggtgctggttgaggatatacaccagttcgtgttgtgtgtgtggacccgagatatgggttgaaatacaaatagacatggatcttgaaaaaaagtgttgatgttagaatgagagatgttggcagtgagaggaaaaatagtctcataaaaaatgacatctcgagattggaagatttgctttgttttaatatcaagtagagtataggttttcataccttgggggtagccaatgaagattgaagcacgacttctaggtgaaaatttgtgcctagtagatggtagagtagaagcttaggctaggcatccaaaacaccttaggtgttcataatgagggggttttttgtgaagtgtctcatatgaagtgctaccttgaagtagaatagaaggagttctattcattaagtatgtggcggtatgaataagatacgaccaataagggaggggtaaattggattgaaagcaaagagctctagcaatgttcaaaatgtgttgatgctttctttccacaacagaattttgttgtggtctctcaacacaagaatgataatgaacaatacctatagaggcatagaaagaatgcatgttgagttctttagcattttcggagcgaatggtttttatgggttttgaatattgtgtgcaaaccatgttatagaacatgggaataatggattgcacatcagatttatttttaagcataaaagtccatgtaaa

SEQ ID NO: 86432 - DNA, 939 bp, Cannabis sativa
  modified_base (744)..(748): a, c, t, g, unknown or other
aacacacaatcctatgggaacaacataaagttgggttgaacctagataagataaatatttttaagtgtattaccttttaatataataaaaaatacctaacataaaatttagtatacgtgcctcacacgtaactttttactaatatatatatattaattataatagtgtaaaattctggggcagggccaccctaaacttaccaatacttccgctcctgcttttaatcaatttcgacacaacaatctatgggcacacatataatattattttatataccttattttggcatacacacgtttgggtctatttgacagcaaaactttctctcacttcaatagccattgcatgtacctattacctataaagttatattatgatatatatatatatatatatatgtaatgaatgactttgagcattgtagtctcctcgtgatgtatatcatggaacacttcttaattgatattatttatgaatggtgcttactaaacaaatttaactataaatattgatattaaaaaaatcaaaccatcgaattttaatttaataacgaataataaaatcacaaatttgaatttctatgcttaatttaaccacttaattaaaaaaaatatcaaaaaatatttctttttacactatatcaaaaatatgttcatacaaaaatatttataactcaaatttaactttttttttcttatttttcttgttaaaaaactttttttaaatttttttttaccgatggannnnnctcagcccatatgatataaaaatgagagatttttttaattaaataaaaaaattaagcataaaaactcaaaatttttaattttacctattatatatgaatggttattatataggcatacttatattgggatacgattttatcccgtgatgtacttccgttatgtacggcagccgttagatgggggagttatt

SEQ ID NO: 86433 - DNA, 1191 bp, Cannabis sativa
  modified_base (1092)..(1102): a, c, t, g, unknown or other
cttctacaattagccataatgtgctcaaaacctccacattatttacattttacaggcagccactcatactcgataccctgttccaccaattggccatactcatttacaaaccagaaagatctatcagggttgtctgtgatctccatttcgacaagcacacgagcaaattgcacccttgtacgatcctttgtgtgtttatcaactataataggcttcccttaagagcactcaaagcttttttcccccgatattgaagccctagattgtggagtctgatccaaagagggatagatttcaccattttaatagcattcaaattcgaagtccaaggtctaataataacaggtttcctatcgaattgtatcactccgttttcaagaacctcatcacgagttgcttcatcattaaacttgactataataagaccttttgtcattctagcaatctgcataatacccaaatgtccccagattctacgtataaaccctttcaaaaataactgctggtacattactcccattaccataaatattacagccgacttcccattggcttccttcaattttacctcttccaaatctatctgagcaattttcctaccatccctaactaaaggttcagtaaaattcaatttagcatcaaaatttaggctcttaccttccgtgaatttcttccagtggttttgagctgtcgaacaatggttctcctccacctcctcagcccagctccgactttttactgatttcagtgactatttcatttcgagcttcctcctcaacaattagattagggcaaagatccgcagtatacaatgttgcttcaaattcctcacatgttctagcattactcacgatttctaattgtttcaccggagtcccaatcgtagctctcgtaattggctatcgacccactttcttcttctttgccatggaagagaaagagaatgaaagcaagaaggatttgtatacaattttaattatttttaatttcattttttttacattatttatttatgccatataaaagtaaactctactacattttttcatatttacgaaaaaaaactcctaatttttttgggtaaataccatnnnnnnnnnnntgttttacaaaagttaccaactggaccctgtgttttgttaaatgacaaaatggaccttatattttctaaaatagtacaaataggatcct

SEQ ID NO: 86434 - DNA, 2664 bp, Cannabis sativa
taataataatatatgttatcaattacacaacccaactaaactaggcaaaataaataaccaattataagctataataactagtatttttttctttattaagcaacaaaaaaacaatgagctatggctagtattattggtacctacatttgatatagaatttttaccattaattgcttgtgctaatatatatctcaaattaacacacttgaagaagctacatatttacacaaatagactagatgaagtatatgtttataccaataatttatgtagagcaaaagaaaccagctttttttctttctttctttttttgtttattgggttttgtctcattttgtgtcaagctagctaaaaaaatgaagaatattttatttggtttagtgtatattaattacttacatacctactatattactatttaagcctaattaattaattaacttggcatgtgtgtatggatgaacatttctataaataccaagtaatgtcctagaaataattagtgattagtggtttttaaaataagtaggaacttatattaaattgtactaataataaaatgatatctcgtagtgctagatagtatagagagatttttatcaactctggtatgtagagtattgttattaggcactaatggtgtcattcattagcactacttaaaggtaacatcttgcaattagttaagaatatttcataaaagttattaaaatattgttatttggtactagtggtgcctagcactttctagaaatattgtctggcgattgattaacaatactctctaaaagttattacattaaattatatgagactcgatacttagttagaccaataacgatattaacgaaagtattaaacactactcattttaacatttcttatcgtgtgtgtggatggttggatcaaaatgataatcgaaactaacaacattgtgacacttgtcaaatacgaaatgggccctttatgatgagaagggctaggctaacaaattccaactaaatttcactacattagaaaattgcaaatataccactactattagtctctactaactactacgacgacatagaatgaatgtaaaaaaaaaataaaacaaacaaacaaaaactcacatataacccctttaatatcaataatactattattgtaccttaacagtcttaccagaaagctttctgagctctcttccctatttaaaccccaactctcatttcttcttcctataccatcatcactatttctctttctctctcttgtcgacattgttttacttaataataacaaaatgagtggttttagtttcacaagtctcacattcatacttgtggtttgttttatggtatggtcatcatcaaattttgaagcttgcattgctggaagaggaagacattattggaacagaggaccttcaaactcatcaccattatcatcttctttgaacaataaaaagaaacccaagaaccaccacagtggtcatcatcaacatggccatggtggttcttcaaagccaaaatctccgccgcattacaaggcagctccgccaccggccattgtcaagcccggtgacgacactcctcccagtccacccaaaggtcaccagtcatctacgacgacctttaacgttttgaattttggtgccaaaggtgatggaactacggatgatactaaggtgtgttcatatttttttttcttgtttaaaaacaggggaatcctctgttttttttttaaaaaaaataataattattattatttatttaattatatatgttgataattgtgtgtatatacattatagctcatgaattttacttgcactgcattaatttttttttttttttttttttttggagataaattgactagtcatgcaactcattaatctgaaaaaggttctgttttttgggttttagttaattttattttaattttccttacccctgttaaattattaaataataagaagagaagacaaaatctctggtttggtcttggaaaattttgttttttattattttcttttgtttggatgaaatcgttttttattattttcatccacttgtatcattacatgtcctaccctcttctacaacatgcaatatgtttggcttgaaatttttaaggcatttaaaaaaaaaatcaagataattggtgtgtgctcttaaaattatacttacttttgtaattctttgcttaataatttctttatcgtcttaattagggtcactgtggctattcttgctattaataacataattttgcatttgtacttttagattcattatatttattcatttcactcatattcttttataattatttatacaccctaaaattacccttaccgtacaattttccaaattaagtgacagtttataatgaaatataacgctctatggttgtgtttcgtaatgggtgatgaaatagagttgaataaatttttattaaattttttaataaaaaatgagaaacaaaaaattaagaacttttttttttattaattttttctatattttcattcatttcaacccaaaccaacctaagtacattacactacagaatcagaaattcagaattatcatgagttttccttttcaatattttgtggccactctattttgagattctgagaatgaattaaaacaatggaataagagacagaaa

SEQ ID NO: 86435 - DNA, 696 bp, Cannabis sativa
atcacatgtcacatttatttccattccaaaaaattacaaaaacatttcaataatttttattttatataaaatatatatctttactttatagatttctttttttacttccaaatttttttttattttatatttatacggaaatacacgtaacaatttaaattgcaacccaaatctatatagtaatccacgcagcaactatcagaatgaccccaaccgtaaaaattaaaaaaaaaaaaagtaaataaatagtgtagagagtaattctcctaatttatattattttttcttccatctcatattcttaaaaaatatatcgataaaataaaaataaaatatattttaaattaagacaaaaaaatattaaaataaaaattatataatttttattaaaaaaaattaaaaataaatatgaaaaaaaaataaaaataattattaatattaagagaaaaaaatgttaaaataaaattaaaaatataaaagcgtttcttaaaaattattttaagttattttttttaatattagagtgtagttgccttttatgaaagtgtaaataaatatctcatttaatttaattaaaggcatccaaacacaatttaaaagattttcttttttgctaactccaaaacaatttaacatctccctttcaaaaaataaaaaataaaaaaaattaatagttagatattataaaatatttag

SEQ ID NO: 86436 - DNA, 854 bp, Cannabis sativa
gattggattggatccaaaaaatgaaatccgcacttagtgcggatcagatgttgtttgaccaaaaaagtgcgaattggatcggatgaacatccctacaaatatttaaagttggagaacaaggagaaggatctcaatatgagggatctcgatatcaaggattacaatatgagggatcacaataccgagcatctcaatattcaggacatgacattgaagatgaaggccaacgatctcaagatcaaggtgaaagagctgaaaatgcctcacaagtatatagtccatattatgactatctcgacggatcagaaagtagtcttccacattattgaattgttgtatgatattttatctctaaaggttcatatttatgttattacttttctgtttcatgtgtcgacgtgtttaattttaatgtttaaatgtatgtaatgcctttattatgtactattaaagtactttaattttataatgttctattgtgtaatgtaaagtatgtgtattcttaattaataagaatatgatgtctagtgtgtttaattttaattttattgtgtttaaatttgtaatattttttattgtgtaattttttagaaaaaaatatataataaatttttacttaaatcataattaaaaatataatcaattcatggtattcacatttaaatttacacaaaataaattataaggtgtttttataatgtacccctctaaattttttggcgtgtttaatctttttaaagtttgcgaaattttacaagatgtcttaaataactataatgtacatgtctatgaaaaaaatagactaaaaattctctcgagtgtcgaaacagagcatatcaatgcaccacttttaa

SEQ ID NO: 86437 - DNA, 615 bp, Cannabis sativa
agatgttgagttgtataagtgaaagaatgaattattaccaagtgttctttaagtaaatccaacatttctgccattttgagcttcatattgtgttgctcttcttctaacttacagatcttgttattagacatattaataacattcaactttgatcttgttaccccccttccttgtccgattaaacgactagattttgggtgaccaaataattttgttaaggcatcctcctctatattttttgtaatttcagagtttgggtcttcacgtataatgttatccagttctccctttatatgaatgagtaaggctaaagtacaattattactaaaaggaatgtaattataaaaattaattgataagtactcacaaaaacttccgacgctgtcgggttaattggttcaccattcttcttagtatgggctctctgaaaagcctcaatcctagatacttttccctcttttaatatctttcttctacaaagtacaacaatgtacaatataaccaaggaatataaaaataaaaaacaacatacaatcaatcaaattgttaccatatcatcgattgtttgagcgtaacctcttcgacttaagatgtgtggaacaactttctttcttc

SEQ ID NO: 86438 - DNA, 832 bp, Cannabis sativa
ctattagctacaaaatatataaaagataaacaaattaattatatgataaatataaataaaacataaatacatatttgatatttatcttacaaatatttatgtacctctttcttaatatagtcacgtcgattaggcggctgaactagatcttttatcatcctcataacctaatatttatgaatgtaaattaatcacaaaaatattaagtataaaaatatttgtcacccatccgaccgcaacatatttattcacagaacctacttcactacgaatgaatatctaaaataatcaaactcttttaaataaatattattaaagttttagtaattaccttttctaaggaagcaagctaactttgcactttcaaccaacaccaaatacactatacctatacatgataaaaattaaatttaaaacttgcatcaattgttacaattatatgaatttagagaatagggacttaatttatatttagaaaaagtaataacatatacataaataaacacatactacacaattatatatattgttttcatataataaaaaaaaatcttgcttaatcacttaattgtcacctactttcgaccacgtacataaagtgtgtctccactccacacaaattggaaatcattttgaattccttagaaacataacatgtactatttattttttataaaaaaaaaaaaattatagcataaacttatcatcatatttattatatatcaataatttcaaaatctagaaatacaaaaatcttcaagaaattataaaaaatataatgattattgcttttttaaccaaaaaataaaaaattttgattcatgtataatca

SEQ ID NO: 86439 - DNA, 1446 bp, Cannabis sativa
tcctcgatcctaaccggcatagacctaatgcgcctattagagataaccaactccttgctaggcaatagggttccaaaccctctttctagaatatcacaaggcatacacaaaagatcaattattctcggagccacataggaacgtgtagctcccgaatcaaataatacagtaaacaaagagttgtagatgggaagctgacctgtgacaacataaggactggctgcagcatcagcttgggtgacagcaaacacttgagcaggtaccggttttaccttagctttcggctcttctttctttgcatgtgggcaatctttcttgaaatgccccaccatgccacacagaaagcatgtcttccggttgcacactcccagatgatgtttcttgcaacgagggcactcagggtaagagtaatcctagagtctacctctgctttggttcccacggaacagcttgctctgccccaaaccactagatgtcgaggtaactttcctcttctgatcagtgttggattcaccaccatccctaccatagacaggagtaagaaaagtgggtgttccaccaacattcagagtcactcggggctcctgaaggaattttaccgcaccctcagcttgtagggccttttctaccatttcagcataagatgttgcttcattggtagtgatcaccagatcatgcctaatcttcaaaccaaccaagtacttttctttcttaccaaagttagtttgcacgatacccacaccgagcttggccagacggtctaactttgtagtatactcagtaaccgacatcccctcggtttgcactaactcagtgaactctttctgcttagcactgcggacggcttcattataatatttagagttaaacaacctctgaattcttcccaggtcataattgtgacgtccggagtgagggttatcaactcccaccacacaagggcgtcctcctagaactggaaagtggcacaggtgacccgatcattaccaaccactcccataaagtttagaatgcgctcaattactgtgagccactgctctgccttcgtcacatcaggacctcccaaaaacaccagaggtgcttgcttacggaatctttcgtacaacggctccatacggttgccagaaacaggttgttctgctggcaccgctggaactgcaacggcctgagcagcttgctgaggaggtacgacaggaaggccctgctgcctgaacctctgaatttcttcatcctgctggcggattcgctcttgcatttctgcaaacctctgttcccaatccggaggagcttgtggtggatttacagggcgaccaccctgagctctaccatggctacgtccgcgaccacgtggattctggggattttgatttccgtgaccacctccggtctcaaccatgttaccctgacttcttgtatttcactaggcgtccattttataggacttag

SEQ ID NO: 86440 - DNA, 1161 bp, Cannabis sativa
aacttccttcttacttactcgattcgattatattatccgattcgattttagaaaaaattccaactttgttctcttagttaaacaatgactagtgagtttgaaataagtcttataggggatcttagcttctttcatggtttacaagtcaagcaaactgaccgatgcatttttatttctcaatccaaatacattaaaagatgcttgagaagttatgcttagaccacactaaacatgttcctacccctttaagtaccacaacaaaactgagtagagataagtctagtgagttagttgattccaccttgtataagggcatgatagggaaccttctatatttaacatccagtcgtccagatatttgttttagtgttaggctgtgtgttcgataccaagctaatcctaaacagtcccatttatttgttgttaaacgcatattcaaatacttgtttggcacttttgaatttggcttatggtatttgagagataccaacatgtctattgttggtttcagtgattctgattgggctgggagtttagatgatcgtaagagtaccactaaagggtgcttttatatcagaaataatcttgtttcatagtagaatctaaactcttaactattactcatgtgtccataggtgctcaacttgttgatctgttcacaaatgtattagatgctcacacctttgctaatctccgaaattcaattggggtgtgtaccatctgaccttgagaaagttgcatcttaccatcttcacaattgtatttaagtcctaggatttattgtcaataattgatggtctttttgataaatagatcacatatattttgtcattggatttcttagtttaatgatgaattgcgtgttaccccagttgaaaaggctaccttccatggatgcaatgagaagagctacccttgtaccattgtgtaactagaaaagtttgctcctttttcttgtaactctttgaggaaaattcatagggtgatgactacatctccatggaagtgtgaaacccgcaactagttggcaagagtcgttgtgcgttataattttcaaaagacacatgttcaaaataatcagctttggtttaagagagatgagtgagatgccttgatcagtttcttggtgtctcacatgaggacacttcacacacttatggt

SEQ ID NO: 86441 - DNA, 763 bp, Cannabis sativa
tataagaaatgtataaaacggtgatatgttactctaaaattgctttgttttagcttattctttttttttttttaatatttttaagtaatattaaatattaattaatatgaaaaaaaagattaatctaaaaaaaaaataaattaatctaattatataatgatacctaaatttgtgggatatattatagttttattatctcacttataaggaaaaaaattcaaccgtgtatagtacatattactattattatatattttaaattttcaaataatgatatttttagttagttatattttataaaaaaaaaagaatgacctgtgtatacatattactattattatatattttttaaattttcaaatatatatttgtaattagttatattttatataacattagtctagaactatatatattacttcttcattaaaatttacaatcgaaaaaagaacatagtcgatcaataaagttcaaaaggtggtaaatgcatattgcttgttttttattttgatacacgtgtaactttctcatgtagtcttctactatttcttatgttattttctcatgcattcttctattatttctcactaaattttttttgtgtaaatattttatttgtagtccttaacattataaagtatggtgaacattatagaagtgaatcaggttatatccatcaatagttttcatttatttttaactagggaactaagccgcgcttcgcgcggtgttgttcaacttttataatttttatgtatatata

SEQ ID NO: 86442 - DNA, 854 bp, Cannabis sativa
gtaactatataacaggtgaccctatgtatggaaggctaactatatttatgcacatagtcgttccacattcccataaaatatgatatttttaaatcatcaatgatgttagctaaagtttaaagttaggatctgccccataagacccaatcgaacatcgtaacttttatgcatacaatggttataagtagctaactaagtgtgtgtgtctaagtgtgtgtgtgtttgtgtattgtgtaaggtaggggtgggcatctgatctaatccaatctttttcttctcatctgatccaattcaattagtatttggatttagaaatcatcatccgatccaattcaattagacctcaaaatccaatccaattactaattggattggattggatcaattttttaattggatctccaattacacacttagattttaatattaacataaaaatatgaaaaaaaatacgtaaaaattaaatatcactatttatttaagcttaatacttcatgaacataccattatcacaatgtaatgtaattaaaattttcaaataattaaaacaacaacatttctaagtaataaaatataacaaaacatcatgaaaataaatacacaaaacaaccaagtgttacaaattcaccacaaataaaaaatccaacaaaaatataattaatatatattatattttttttattatttgttattatataaataaatataaatataaatgtaattagattggatcagttttcaattagattttaagaatgacatccaataaccgatccaatccaattagaattcaacttttagcatcaaattcaatacaattataattggacatctaattttttgtaattggattg

SEQ ID NO: 86443 - DNA, 666 bp, Cannabis sativa
  modified_base (196)..(214): a, c, t, g, unknown or other
aaccgaccaatcaatccagaacctgtcttaaaactgaccgttttgaacctcggtttggtcagtttaaaccgcctaaatcgaactacttttttttctttaaaatatgatccaatttattctataagcacattattctacattctacatctacaactacaaccatacaaattaattgtcttattcttttaactttaannnnnnnnnnnnnnnnnnntattattattattatatattatgaacaatacataaaattttaaaaaaacttaataaattaatatatatgtataacgaccactttcagttaatttattattcaaaaaaactgaccattcaatgatggttttgaccgttagcggttctttcgattttcagtttcgattccaagagtgttcggtaggtcggtttgaataattttttcagtttttcagatttcatgcttagtcttaaaagaaataaaaaagaaagcttataaaaaataccatgtgatcatgcataacaataaaaatactattagtggtacttagtactcttttatatgtcaatattgctattggttcaactaaatatcgagtcctacaccactagtgcctaatatcaatgctcttgataatgtatatagaagtaaccttcatataactttattacagtagaaactctatttaagaa

SEQ ID NO: 86444 - DNA, 503 bp, Cannabis sativa
ttggtttgagaaatttattggtcaggtttggtttctgatattcgaaaaaccgttatactggtttggttcaaaaattatgaaaattcgaaccaaaccaattcgtgaacactctcaactttgaggttgcgggccgaatcatgttagtgataacagtgtgtctattgcttcagatgccagagtttgtggtaaatccttgaataggatagtcgacggagacaatgtgactcgggattttttcaaggccgaggaggcgggccgaatcatgccccccaaggacccatgaaggtgctttcgtggaattgccgcggacttggaagtccagcgacaaaaaaagctctcagagccttggttttgagagaagacccggatgtgttatttctgatggaaacgaaattaaataatagacgtatgaatcctatttggcgtagtttgggatttggcggagcatcttgcgttgaagcttcgggcagtgcgggaggtctgtgcctttgttggaaggcggg

SEQ ID NO: 86445 - DNA, 1054 bp, Cannabis sativa
acaatatctatactatatactcttcaatatatatatatatagaatattggcggcaaaattatctaaattctatgattagtaacacttaaccacataaactgattttttagtgttaaaccctctaaacttcacttttgttagctagttagcccttctgttcaaaaggctttgttaagagccactctggacatgccacagtgtacacaagtgtacacgtgataaatttttagtggaggacattggcggcaaaactacctgaactctatgattagtgacacttaactacataaaccgatcttttggtagtaaaattctccaaacctaacttctgttagctattaacctattccatccaaaacactcttttaagatggtagacatgccacggtgtacacacgtgaaaaaattttagtggtccacataactttaattgattaaatatttaaaaaaaataatttaaaaattataaaaatagttaaaaataatttgttttcttcttttctttttcttttttcctcttttaattcttttaactttttctccatgtaaccctaatttccagccgcactcactctctctttcgttctccttctcgcacaactccgacaagtcacctccagccaccttcaattcaaacgaacccgaaaaccgacttcacgaccttacaaacccaacccttcaacatccttataagccccgagacccaatccttgtttgaaatttctctttctcgcgtcgaccagatttgatctccctctcccacaactcttcgttgataccaccacagttggaagggttccctggttcgtccctgggtttgtcgtggtctggtgggttcatcacacaagaagaagaagtaacatgggaaggggagatttgatgattcaagtcgcaaagtacttaacagagccttttgaatggaagaggtaaatagctagcagaagtgagattttgagaattttaccacgaaaatgtagttaagcgtcactaattaatcatagagttcaggtaattttaccgccaatattctatactaaaaatttgtcacgtgtac

SEQ ID NO: 86446 - DNA, 1110 bp, Cannabis sativa
aattcaaaaactaagttactcaaagtatttaaattaaattagcataataaaataaaattattaatttataaaacaatcattataaaaaaaattaaaaaataaaataaaacttcaacatacatgttcattatatctataaatataccaaaacttatgtatctataaacaaaaccaacaataaagcaactacagagattaaagagacaccaagtaactaacattattacatagtgtatcaataaacaaacttatgtatcacaacatatcatacaattttattttatcactcaaatcaaagaagctttattacatagtgttagtaactaaataaaatcataatatggagagtaaaacatatgctatatatgcattattatagtagcaaattgcattagtcaaaatttatattcaaaacaacagtagctgagaatcaatttatattcaaatttatttttatttaaattataatcaacatactatttaaatatcatagtacaaacttatagtggaaccaaataatatataagaaaaaataaataaatatgtaaacaatagcaaaataaaaattaaaacttcatatacacaatcaaatattatatttattagaaaaaataaggttaaaaaaagtaagatcaagacctgagtttattgtcaccaagagcaacgaactccaacacttgagaacaatgaactccagcctttgattgaccgccgagatgcttacgaaacagaaaaaaaatataaagctccaagttccttccaacatagaaaaataaatgaaaaagattagagaagagaagagaaaaaaaatcttacaagttgaaacttagtaggtggggctagtgtgtggagagttggacagtggtggttctaggtgcgaatggctggcgaggatggagatctgaacgatggtgctcgtgcggctagggtaggagaacactgctggagttagagcctgaatgagtggaaaggaggcacagcaaaggggtaggaagatgagtgtgagggtgactgagtgagagagaagagagctatggaggtttgagtttttttttttcaaaataaaaagaaaaaggttgagtgagagagagtgacggctgggagtgggtt

SEQ ID NO: 86447 - DNA, 1216 bp, Cannabis sativa
  modified_base (102)..(104): a, c, t, g, unknown or other
aattaaaatgataattattaaaataaaagatctactattgatattttgatattgggttattaggtaatatttgaatttaaattttgaattcaaatcaaattnnnatttatcttttattttaaataaataattaatgactttatttataacactatagataaggatatatagcatcataaataataacagtttttacaagccaataaacaaagaaaataaagagcggtaattagagagaaaataggattgatatttttcactcctctctccccctctctctctactctcacacgtgtacacactattctaagtgtgtgcgagattaaaccgtaaccgtattagattccttttttctttaaatattttacgtgagatgatggttctatgaaccgactcaaccttttgctttcaatattttaagggagatgatgattctgtgaaccaactcgaccttttgcacaacttttacttatttccctacacgtgttttaggactaaccttgaggaacatccctctcattattgcaagggctctttcttgtggtactatctttaggctttcactgttttctttgactgttaggggtagtcgatcgctagtttttatcccttaactttggcgatttcaattgataagtataatgagcaagttaatcaggcatgtggagagtgatgaatgccatatgtaaagtgaaaacattccattgataaggcaaatatgtgatcgccttaatacatatgttatgttcagagatcgacctaagtgccttctttaatttagtgtaatgtactaaaggtgaacttgcagtgctaggaacgctttctcgtatggtgaatttaactttgaggagcatcttgaatgtttgatttttacgggtcgttgattggtggcttcacttgaatgtgtcggcttataagtattgggagtatcttctaataaactttgtaaggatctgacaagcttcccgaagaacactcagtggtatcttctctcaagactctgtttccttccttcacacggatgtatttatctgctctttcgtagaaatgtctaagccatccaactctctttttaatatttttccccacattccacctccacggtgcacctctgcggttatgacaaacttgagctcatctttgaatatttttcatactttggtaactttggtgttgaaatattattataaagttaataataataatagtaataata

SEQ ID NO: 86448 - DNA, 641 bp, Cannabis sativa
aaaaaaaataacttagaaaatctaaaccctaaaaaattaaaacaataaacacaaaacccacaaaaataactacgaaaaaatattcaaagttaggggaaaaataaaaagaaatagaaaacaaacctccaacccatgatcatctcaacctgctccttcttattgtcagaagctggggaaattttctgaggagcagaaactttagcttttttctttgcaggtccacgatcgtgtttcaatacaggaggagtaaagtcggagtcatcatcttctccaactggtcgttttcctttggcctattagctacagatttaacacctatttttgaattttttttggcaatggtgaaaaggtggatgaagaacaagtaatagccatgattatatatagattcacagcaataaaaacagagtgcaaacggttatcgaaatcggttaatagaagtttggaaaaaaattagcagaaaagaaagtagaggaaaatgggttttgattgttgggtatggagaatttgatttttaaaaatcaaaactgaaacaaaattgaaaatgaaaagaaaaaagaagaaaaaaagagaaggaaaagatggattgattgatagaagtcaagcttatacttgacgtgtaagcaacacttgtgttgcat

SEQ ID NO: 86449 - DNA, 1330 bp, Cannabis sativa
taaaataatttccaacaagagagtccctcccaaacatcatcgtatcaacgaagtgttcataggtgtctgaagatgaagaattcaagacaattttggcctgatcttcattctcaatcttgatgcctatgttttcaagatcaagaattatcttgttgaaatcatccatgtgatcttcaacagattttccagattgcatcttaaaagcatacagcttctacttcaagaacagtcgattagcaagggactttgtcatgtatagactttcaagcttcttccataggccagcagcagttgtctccttcgacacttctcttagtcttctccttctctgtcctttccttgatgttctcttcaccaagcagagcttcctgaatcccttgctgcactaacaaagctctcatcttcaccctccataactcgaaatcgttcttacctgtaaacttctccaaatcgaactttgcattctacattgttgcctcggatgttcttcacgcacagccacgctgagcttgcctctaattcgaagctcaaaaacccgtccggctctaataccagtttgtaaggaatgatagattcctatgcaatcaacaacattgatccaagaacactacaaaccatgattgaaccgaaagtgaaattatatcttgaccagtatagctcgttttattgaatataacagtagagatatttacagttttggggtcattaccaaaatctagttacaatgaataatacaaagctatttatagcttcgtcctaggtgtctaactagtcactaaccgaattaactgtcaaaaaggggtttaaccgaataaccgaccataagtaatatatttattttttttatttagttaagaactattcgtcgaggtaaaaataatttgaaataggttaatttttgatcgcttgataagagcttagcttttctgatttttcctctatttacagaaagcatttcaattcaattctttttaaaaataaaataatcaacacaagtaagcattttctcaaatagataaaacaataggaaaaatttatagtacccttgaaaaaagtattatttaggaaggttttatagtttatttttttttttaataattatgtacattgtacatatttaaaatttcttgtaaattgttagagaattttcaataatttactaattcgaaaataaaatttaaaaaattacttactgtatgtacatgaaaagatagttacacacataataaaatacttgaatcatatttttaataggaaaatttgaattaatatgcttacattatcttaaaactgttttcctaacttatacttaacaaaattagttatatat

SEQ ID NO: 86450 - DNA, 9989 bp, Cannabis sativa
  modified_base (8190)..(8213): a, c, t, g, unknown or other
  modified_base (8333)..(8365): a, c, t, g, unknown or other
  modified_base (9919)..(9935): a, c, t, g, unknown or other
ctatcacgagattatatgacttgtgaataaatagtttgaaaagattatcaatttttttgttttatagccttcccaccaattggatagagtcaaatcaactcgagaccacatttcaaacatgccatccaatatttttcatacaaatagattagtttggctactttctgacattcttggaataaaatctaaggacaacataaaacaagaggcgatagagaactccccaagcgagcaatatcaaaacatcataccataagttttcatgctcgatatccatggagaacaacacatcttctccaatcaacgaacatggttgttgtaacactgtcctgttatgaatatgcaagtcacttatcttgatttctcctagaggacctggcgagagatcttgaagagggccattgtaacaacgcgttcctttgaattcattgctcaacatcgcctcaaatggatacttaattgctgacaagtagtgtaaccatctccaaaagattggaatttgcgttcgcttaaggaaaaatccgcatgtgaggaagaaaagagctgtcgttgcgattactactgcgtaacctgtaatggaaaagttatatgaacaagtttagtggtgagtaatgatatttagaagggaattctcacatatttttagaaaattttaaataatttaagatatcgaaatcaacactcaaacaacttgttgtatgcaagtgcaacaggttgtttgaatatttatttcaacatcttaaattatctaaatttttgggaaaatctctttagttatgttatataccgttgtgtaaaataaatagagttgcaatttatatttgtaccaaaaataagggaaatttgcagtaaaattttttatgtagttcattttgttgcacttaaattcttatatagttaattttattgcactaaaatctctatgtaaattttttgatagtgaaaattcttatgtagttcgtctttggcaacaaaaattttaaccgttacatatttgatgcaacattagtccctgagttggagacaacaaagggactaatattaacaaaatgacttcatagagatttttaagtgtaacaaaataaactacataagtatttacactgtaaatatccataaaaataactatagatagtgattaaaatcaatcaatactatagcaatatccatatatttacctgttatataacttggaacaagagcactgacgagcatcacataagcattggtagtaatgagagaagcatagagaatgatccaaaagtaaaagaggttggctctaagcttaagtatgaaggtggttatggctgcaaatgtaaatccttgaattgcgaaaaacggtaggtaaactatgagagaggagatgacataggacgaggctctataagcattgtgtgaagtctctcttataaagatgaaacgctcgagtataaacgttggaacggcgtcgtttgaggagaagaacacaagacaaaccgaaaagatgtaaaaattcaaaagcctatttatgtccttaaatgaatcgtgattcaatttcttgaaaagactcgcaagaataagggccattactgtcaagacaatctctctagagagaaaaagctctggtgttctaatcacattcaatgctgacctccatgaaaggatgaacacttctcttaaccacggatttgcatattttggtccgagatcaatctcatcgagtacttcttcttcataatcatcatcgtcgtcgtactcttccatttcaaactcttcaacaaatgaagatgagttgaaggttgttgagggggttttagctatagagttgttgttattattattagggttactatttggttgattataaggagtaggatattgactcgaaacgaagcttcttgagccagaccttgaagttctccgggcaggtgtttgcccaggagttctagctggggtccacgacggaggtcgtcgtggagttcccttaacaccattgtaaacccaagaagagaagtctttataaaattgtgaagctaaaggaggagggttattataactactactaaaaactccactatgaagtggagtctgaggtggccttcttcggccacgctctaaagatttgttaaaatcttcatcatcatcttcatcttcgtcgtagtagtccatgaaattgttagcacttgttggtccagatgtcatgtttgatgaagagaagccttgttggcttcgaagattgaccaagtgagtacttgaataattaccgcttctgtatggtgttcttaaggcttttgggggtttgggaattggtgttctggctgcttggtctggctttgtaccgtcgcgttggtaaagcacaagggggtctagtcctatggttgcttcatcatactctttgatcacgtcgagaagatactcgaggttattttcagtgtctggaactggcctaccaaagccgtctaggtaggccgagaggccgttagggcttcccatgtatactaatcttcctctgccacatgaatatatacataaaattgaaatagttacaatgatgaatacaaataagcatatgtatatatttgtgtaaatgttattttggatcctatattttgtaaaatttattgattggactatctgttaagtaacaaattggttttcatatttttcaaaataatacttgagctgatttgttttgtcaaaataaaatttaataataactcattctagaggtgttatgaaaagactgattatattttttatatttgtttgtgttagaaattatcttcaagtttgttatattaaaaaataattataaaaaattaaactcatggtactatttagtaccattttagttaaatacaaggtctaatttatcatttaacaaaacagatgatttgatcagtaattttaacaaaacacaaagtctaaaatagtattaattctatatatttttttttaaaaaaaagttgtaaaggaagagtattttctttatattatatatagatatgcaatttgtataatcttgtttgcattttggttttcatacaccctacacttagtttggatttcagacaaaaatcattttgtttaaaaaaaatatcaaaaagaatattgttttaaataaaaatttgtatgaatgttaagaattgaagaatatttatgttataaatcattttatagttttgatatttcaaaatgacttcttttaatgtttcatttttcttttacaaaagtaggcattgagaatttttcattaggtatctaaaattttcaacaaagtattaataaaaggcctcaacaatatccattttgtaaaaacctatcaaaaaagagacttatgtagtaattatgtgttatgaaaattttcagtaatgaaaatatatgtaatttgtgtgtgcacatattattatataccttgctaggacagtgatgcgatcaaggagaatttgaatgcgaaaagaaggttgatggatggtcataagtacaatgctaccacctcgagcgatgtccttgactttttcgactacactatacgcactggttgagtccaaaccggaggtaggttcgtcgagaaacaacaatgacggtttgtgaattatatcgattcctatagaaaccctacgcctttctcctcccgacacacctctccttccttcatccccaatatacgtatgtgttgcactctgcaacatccatccatacaatacaaaacataatatttaaaaaaaaaaaaaacaattcatatttcatttacaaaaaaattaaaaggaaaacacaccctataccttaagatgtgtcatatgtgcaggtaaatgttggattttatatttcaatttaaattaaaaaaaaaaattgaaacccgaaatcattgaaaaaaaaattgaaacccgaaatcattgaatgatactatgccatattctatgatgttgacaccataggtagcttatatcgatacgatttttatggaacatttttcaatgaatattacacattcataattactaaaaaataactataaataattttagaaatattaaatcattagattttgattaatgagccaaaaagaaaatttaagcttttatgtttagtttagttacttaattaaaaaatatatctttttatactatattaaaaatatatttatattataaatatttaactcaaacctaatttttttttatctttctcagtcgataaaacaatcttagcacatatatatatattttaattggaaataaaaattaaacataaaatttttaaattttcctaatattacccatttataggtaaaactcattaaaaatattcgatatacagggccaactctggacttctgcgccaagggcccacctaacctagggcccaaagaaaagttttttctttttaaaaacacacatattctaaggcttaatatatctcagggtcgaccctatttataaatatcggtacctgcaagccaagttgagcaaggagctcatggactcttttcttcttttcaggtgtggaaatggaaggaggaagtctgacctcagctgcaaacatgaaagtctcaaacacagtcaacattggaaacaattgatcatcttgcatcacataagatgacaccctcttcatgtagcttgttgtaacctatttatagtacaaaaaaaccataatcaacaaatattagttaattactatataattgtacctctaatcaaattataatgtttaatgtgcacattatataaaatattacaacttgttacttttgataaagtgagtgttttctaaactaaataatattgttactttgtgtaatactttagtacatattttgtattcacatcttattattagataaaagatgttagcgatgtctatgatattacttaaaagtgttatattattattaatgtaatttaatatcaaattttgtttattttaatttaaaaattactataaaaaatcgtaaattacttattcaccttatattagtattgaacactcacgacatatgtacactaaaatattacaaattgttacttgacaaatacttttgagaaagtgagtcttttctatactaaatattattggtcgaaaaaagttagtacattaccatgtgtaatatttcaatgcatattttgtatgcagatattattactcgagaaatgttaaaggatgcaagtgatgcccaatactatctaagagtattatattgttattagtacaatttaacttcaagttttatttattttaatttaataattactataaaaaattaataactatttgtaagatatattaccttatgatggtattgaaaactgctaatctctaataacaatattgaatcatttttactcaaatagagatatatttgataaattaactttttagtcactctacacaagaatttacttttcgatgattttcttacaaaatagtctaatccagagacacccaaacaactttctcgataccctgtcgaaaggctattttgtaaaaaattatcgaccaaagactatatttgtttaaatatggtactataaaaaggttatttttatcacgtactctacaaaaattcatatattatttactaaccggttttccatcaattctaacagaaccctctaagctcccttgagcaattcttccagccaatgcatcaagaaaagtagatttaccagctccacttggccccataatagccataatttctcctctcatcgcttgaccagaaatatcattaagtagataagcttgcttgtcgatccaaactccttctcttttttgtttctttatgatactataagaaaggttcttgaactctaggccgtggcctggaatcatatttctcggttgaactgcaacattaccatttctcgacgtgttatccatgtcgagaagtgtctctagatttttgttcgtttcattcttcttcatcatggcgagtttattattattcgccatgataatcacaaacgaaacaataataagaagaagaagaataagagaagacttagggtttttttaaggcttaagagaaattagggttgtgaaagagttttaaagtaatgaaatttgataatgtggacaaatttagtgacgggtaaaattatttcatttcattgtagtgagacatataaagtagtgttttgagatttgtggacaaaagaaatgtagtgagaattattatgagacggctacataatatataaatgtattattttgtaatttctttggatttatcattcactagctttgataatatcactacaatcatattttggcttttatgtatttcacataaaatacatcaagtatataaatcaagtacaaatagaatattcatatgggactcactaagaataaaattatttagtgtaaacatttttattaaaacatatattattttgtgattaaaagttacttttagtcacaagtcaagttattacaattagtttgttatgtatagtgataattttatcagtaaatatcattttagatcttatattttgtaaaaatttattaattatactctttatttttcaaaatagtactatgagctgattttttgttataataaaacttaataataatttgattttgtggtgatgtgacaaaattagttatattttctacattgttcgtactaaaaattatttcaagttggttatattaaaaaaaattcaaaaattgagcttagggtaccatttggtatcattttaaaaaatacagggttcaatttatcatttaataaaacagagagtctattatgtatttttacaaaatatacataatccaaaatggtattaatactaattttgttataataaaaaaatatatttaattacaacaaattataagttttaccacttataattttaacaaaatatattataagtatgattaatgatatattatattgtgtaaataatgattggttggttgtaattaaaatatatcaatcaattggtggtgttagattgttaaaaaaaatggtggaattgtacaattaagatttttgccaccacatgtactaaattaaacttttcaggtcgttaatttttttttttaactattaaaattgtttgatttgaggattttcgtttaattttactaatgaaagtctaacgtggatgaaagttcaggagatgcgttttagtacatgctaaagtttggagacatgattagatacatattaaagtttgggaggcacaatttagtacaagagcaatcatcacgttagtaaaattaaacgaaattagataatagtacttgaatccaacaatcttaatagttcaggaggtatgatttggtatatgttaaagtttgaaagtcaaaaattctaattagcttaaattcaatacaaatatataaggacattgtttgggcctactattttattttatattttggaggtcgttgtttaaaagaaatatggtaatattgagaattatcagaaaaatatgtagatttttgcaaataattttttttttgacctctaggcttaatggttataaaactttaggctttgtctattgaggaaattacattgtatacctattttttttatttcttattttaatttttacctttcttttattactaatttatacctagttttataggtcatatccctattatgtacgttagggattctaatttggataaattatgtgaggttatgtttgttactttgatcataaaagagagaatttatcaattaaaattattttgtagttatatttagtgaaagtgtaataaaaataagttatcaacttatccctggtatgattggcattcccaattgttgcatgagaattttggattagttttttttatcaaaagtgaagatagtatatagaaatattatttatgaacacttctccttcatatttctcattgatcattgtttagattctagggtttatgagagtgaattataaaatcattgatcaaatttatgaaaatatggaggtttttaatcatatttatttgcaaattactcaatagccaaatttatttagtattctatgtttgtcttttgaaatccaacaattttccttgtgcattttacttcatgtaaataatttggttaagatatgtcaaattctatactaagtatactacatacctagtaaaacaaatagaatctatccatacaatccacctctttcaaaatgtatggataaattggctcaaatttaataataataataatannnnnnnnnnnnnnnnnnnnnnnnttattattattataaaattttagatattgataaatcttaaaaacttaaatgcattaattataatcccttaaaattctaaattaaaattatataaaataaaactattattattattattannnnnnnnnnnnnnnnnnnnnnnnnnnnnnnnnttattattattattatttgtcaatgagtgcattacaagatataagaaaaaagtctattgatcatctagcaataacaatgtcaattagtggttgcatatagattagttgtacatttttttcggattaataaataatttgtttagttggatattttttcatattgtctttgagatgtttagtttcattagttatattatatattaggttgttgaacatattaatttttagttcaatgatatattcattgttttcaaaaaaataaataaataaataacaatgttgtctttaaagttaatctttagtaacaagcaacaaattaagtcacttctagtgacaactcgttacaattagcaatcacattatttcctaatctaaaaaaaaatgatagatttgattataatatcttttttagtttagttattcaataataattaaaaaaaaatgaatactaatcaaataaaacaacacatatcaataacctaagtttacattgcatatatttgaaatattatttgaaagtattgtcttaagttataagtagaaataattaaaactaaatctaggcacttcaaaaaatcttgctcgaaagaaaggcaaagacaaaactatgaagaaggcaaagatctcgaggctctcgtagggcactcaacatacttctccatagttttgctttgtttgcatttcctcgccaagagcgatagatagaggcagaggaagtgcatatgatccagtctatcatttcatatgctaacatggcaaccaactcccgttgtatatttgtggcgagtcccaaacactatagaagaaatggagtcaccatctctttcgattgatcgtaacttgatgatgaagtctcatttagctaaaaattgtaacaagaaatcaattaaaatttaaaattaaagtacaaaaattaaataatacaaaagtaaaaaaaaaaaattaaagttatataaagttattttaaagatacatttaatcaaacatatatgaaatgaacaaagtccatacaatactaactaatataagctaataataataataataatccatttcaaattaataaatggaaatcacgcgatattggcgcggctcaatcaaaccatcgaatcgagtttcacatcgatttttttggtaagattaaaccacaccaatgtcgagtgtatgtgagaaagaaagattttgtgtctcaactaatgaacttagaatgagtgtaaataacattgtaataattttcaagtatatatattaacaatgatttaagttacttgggaatatgagtgtaatcaacattgtaatttttcaagtatttataggttcaaaatgtggacttataattgtaaaagacaaacacaaacttatgaagcttatcatagtattaatattgacaataatccaacaacacatgtactaaccttaatctatacaaatttatttataggccggccaagtcaccaaaaaacaaaagccggctcttctttttctttctcaaaggatcaaaattgattttctctaaaaagtgagggatatatatagggaaatttacatggtatnnnnnnnnnnnnnnnnnttttacaaaaatactgccagacagtatttattacttttttactttgttttttta

SEQ ID NO: 86451 - DNA, 505 bp, Cannabis sativa
gcctggagcgtacgatccttgggagatcagggcttatgttattcagtcgctgggcgacaaatcttttgtaaatgagtagcaaacttttctaattgtattttgtaaacgggctcccaaaattttataagtataatatgttatgttttaatttaaaagcaaaattttaaccattcacgtttttccaataacctcgttgattagcaacgagctgcacagtacgttaacaatcactctagcatgcttatactagttagggtgttacacatagtgcaaggcaaacccagataagtaatattttcagaagcaggagccataccaagtaatccacacaaatgagtccgaacatcttgctgaacattattattgaaaaaaattgaggactttgtaaagttaattttctgtcccgaagcccgctcataagtatcaaggagtcgaagaacactagccacttctatttcatttgctttacaggaaatataaatatcatctacaaacaacatatgag

SEQ ID NO: 86452 - DNA, 749 bp, Cannabis sativa
acagtgatgcatgtggagtataaggtagtccatggtggtaggagtatgggtcctattattcctactcgcggtattagacaaggtgatccattgtcaccttatttattccttctttgtgttgaaggtttttcttctttgatcaagcagttcgaaagaaatggcgagttgaagggctgtaaagtagcaaatggagctccaactatctcacatatgctattcgctgatgatagctacatttactgtcgtgctactgaggaagaggctcaaaatgtccttcgattgcttaatttgtttgaagctgcttcgggtcaaagggtaaactatgcaaaatcttctatctttttcagtgctaatactctgacggatttgcgagacagattgtgtaaccggttggggatggtagctgctgatgaaaatagtttctatcttggtctaccttgtattatgggtcgaaagaagacagctattcttggctttctaaaggaaaagatggaaaagagaattctaagttgggaaggcaagttcctctctaaagctggccgtgaactattgctaaagacggtagcacaagcactcccgagttacgctatgtcagtgtttcttattccacttgaaacttgtagtgcacttgagaaacttatggctcagtattggtggcgtaattccaaaaagctagaggcataagctggatgagttgggatcgcttaagcaaacacaagagttcgggagggattggttttaggaattta

SEQ ID NO: 86453 - DNA, 2323 bp, Cannabis sativa
aacttaatctaaaattaatactaaaagtaacttaacaatcagtcaaccggttaggggagacctgtaggaaccgttcgatcaattggtccccaggaaaccccacaaaactagaattttggttggggaaccggtctaccggttggggcattttagggaacccttatttttcccgttttacgatatttagtgtattgccatgttatccgtcgataggaaaatttttagtttcaagtttatgtccctggaaagtgatttagcgtgtcactcactagttttgcaaataatgtattttaggggcctgtaaatcgtcaggcagctattccactcaggttggctagcacacctgaatttgggaacgaggtaaaattagtacaatgatatgcatatgtgtttatatttttagcatacatgttcaataagcctattagattatattatactagcgatatcattatatttaatattatattggatatcgataaatgtatgttggcttaagtactattcgacaatatcacatcggtacaattagagtatgactagcgtattgagtataggctgatattatagtcgataatactgtactacttgatagtacacatcggtacgactagagtatgactagcgtatcgagtataggctgatattatggtcactagtactgttgtttgaacgttcttgactcagcaccgttttggacatggggatagggttatggttggaggtatgggtgcctgattctaatctgggttattgatacattatttattatacttttcttactgagtctatcactcaaaaatattgtttgtatgtgtaggtaagggcaaggctaagggtgagcaaccgtgagatcgagctgatgaagattgtacatgtcggggaagttagggctagagcgtacggtctttgggaagtggcatattttgtagtcgctgggtacaaacttttgtattatgcactgtagaaattttgtaaatattttgtaaatgggatccctgtttaatataagtaagttattttggcatttataattagttaaataaagttttaattactcacaattttcaatcgttgattagcaacgagttgcatgattaagttaaaaattacattaacacgcctaaactagtagggtgttacagtttggaatcaaagctgcgaggttgtcttttgaagatcgtcacgacatgtacaatcgtcatcagcgatcagctctactcgcggtttagtaagcctttattgctttagtagttaaattaatagtatgttttaagaaaagcatgatagaaagtatgttagtagcctgatagctgaataggtgcgtgttttaaatttccaaaataagcgataataagtaagtttttcttgatcgcgatctgatcagactagctcttggttttccaggctgttctaataaaatggatgccagacaaaacattaggagccagggtaactcgatcaggtctactggcagtcagggagcacagattcccccgaatgttcgtggtcgaggtagaggccctacaggcagggcacgcggttagggtaatgtaaacccgccacaagttacccaggaatgggaaaataggtttgtagcaatgcaagccaaaatcaacgaataagaggaagaggtcaggcgcttaagacagcagggtgcccttacaatgcctgctccaaaaatgcaggcggctgctgcccctactgtgcaggcaggactggttgctgcaaggaatcgaatggaaccactatatgaaaggttctagaagcaaacacctctagtctttttgggaggtcccgatgtgaagaaagtcgagtagtggctgacggttattacaagaattcttaattttacgggtgtcactggcaatgatagagtggcatgtgccacattccaatttcaggaggatgccctggttaggtgggatatggtgtccctgacttgtgatgttactattgttacttgaaaagaattccaagagttgtttaacgtaaagtactacaacgacgcggtcaaaagtgcaaaaagaaaagaatttacccagctgacccagaaggagaatataagtgttactgaatacataaattggtttgatcaattggctaggttggcctcgagaattgtgccaactaatttcactacgaaagaaaagtacctagattgattaaattcgaagataaaacatgatcttatgattactactgacgacaacaccacaacatgttgacatggtgggaaaggcattgcgagctgagggcgtagttgagtgcacccaagagtctcgagggactcaggttgctggtggggcccctactcctccta

SEQ ID NO: 86454 - DNA, 626 bp, Cannabis sativa
ttcagacctcttgagtggcggaagcttgcagcctccctgtgaattgttaggacatgctctaggatatgtggatgaactctgaagatgtagaaatatctctttgacacttggcaattaaaaagtctaagggctttcacgaactatttaatggtacttgcgtgtcaaatattctacaaacccgtgagtcatacgtgcctatgttaagtgtgttttctgctgggaaacttaactagtggaaaagttatgaagtgacaactctttagtatgcatggggcctgttatccaagttttcattaggcatgatcagagggaaggatacaaccacaacaagatttatttgaggtaaccaagaaaaggaacgactcatggacctggaaggcaacgagaggcgatggcctccgggagtaacttcccttagtaaagaacccagaaggcgttgagggtcttagagacattggccacgtcagtatattgcaaatatcactccatagacgattacacctttttctaacataggattcgattttgtcccccgtgcaaggtcctgatagtacacgtatacaccctcaaatatgttttttgcccaatgactaggttaaagagtattttgaaaaggaaagaccttt

SEQ ID NO: 86455 - DNA, 848 bp, Cannabis sativa
aggtagtagaaagatgtagtagtgtgatacttaaaaatggttggtatattagtattcaaatgtatatacttatacaaaactagatctaccaaaaaaaaatgaagtaaaatagtgagaatataaattatatagtatgtctaaatgtgtgtccattaattagcaatactcttttaaaaatgtgttaatactatattgacatgctcatcaaaattaaatcaaaagttttacctcacaaaaagaataacaataataataatatattaactatgaaagaaaaatgggacataaaattacttacacgtaatgtcgtcaaatacacttttatgtgttctaaattaaatatagtctagctttttacaaagaaatttaaatctattacttttatatatatgtttaatatagggtccatattaaaaaacttatatatgatctccaaagaggagaggaaataaaagagaaaagaaagttattatagtgaattatcaaaacaattttatattaaagttaaaaatattgtaatataaaatagaattgtttatataatattataattcgtaatttatatggtcctaaacttcaattaatttggaccaaattattcgagaatgaaacaaatgaatctaaatctagaccccttaattaaatttctctggttttggttgcagttttaggattctcgctaacaatttaaaccaaacaaaatcgtctatttctttatgtgttctaacaaggtggaagtgtaagatataattttgaatgatataaagaaaaataaatagagaaagtggtgtattgtgtaatataaaggtttgatgttaaaataaagaagctataattttagtgatgta

SEQ ID NO: 86456 - DNA, 570 bp, Cannabis sativa
taatatttaaactgatatttgatgttaattattcgagagtcccatccctctttccgccaattcaatcgcataaattcaaatttccccaatcgcgaatccaatcacaaacaaagtaacaattttccattgaatgtcgaattccgcaaattcaatcgcataaaatacccctacgtattcctagaacctttagggaataatacaagtcgtatccagactttctgaaatgataacctataagtctccggttgctcctgcggagtgtagtcgtatgaggggatcactctcatatgaacttaggcaaacggtccaactctcgtcatgcgagcaatcatctgggtggggatcggtaagaatctttgcttggggtttatatactccaagacggcgacatctgtaccctgattgaaataaaaaatcatcacatgaaacatcttcatcgcacctatatatataggtataataggtataataggggggtcgggtttttacctcattatcacgtgaggatgataattgtaataaaatatctgatttttggataatttttatcaaaaattatcgatgagtgag

SEQ ID NO: 86457 - DNA, 521 bp, Cannabis sativa
aagagttttaacaaaatatttatcgtcatcttcttcaaagcatccttaaactgaaatattcatcaataaaatattaattttctccaaagcatctcaaagaatcaatcaaattacatccgcattgaaaaaaaatggtcgccaagagtttagtacacgttctcccaccgtcttcctaaatctcagatcttgatgtcttccatcatctctaacttgcattctcagatttagttatcttcgagctcgtctccatccccaatggcaaccacccttgaggaaagaggaggaagatgaagaggtcccaaagatgagagagagcatgctttcaaatcatttttttaataaaaataaagaaatattaaataaattaagcttttgttatttgaaacatatttttaattattaaaaaattcatttaaaacattatatatctattaatataattctattgttagcatatatatatgtaataggttaaagaagatggatcggtaatatgtatgaaaacaattaagagagagtat

SEQ ID NO: 86458 - DNA, 1012 bp, Cannabis sativa
acatcaactaatttaatttacattaaatatgttaagtgttaattatttttgtttattttattagaggtttaattttctaataaataaaaaattaattaacgtgtcaaattttgattggtgtaacacagtataggacatcacttttttaatgggagatcttgattcctaggctatacctactgccaattgagtactattgagtatgggtgttcataaaataatcgatttaattcaatttgcataatataacctgcaaagtgcagatatccaatctaatctaatccagtaaatattagatattcaattacaatttaattagattgtattggaggttaataaaaattgaattttaattgaattggattaattattagatgttaattttaaaatgcaattaaaaatttattcaatcaaattgcatctaatacatattaaaaaaaattatttatattttatatataataaaagaatgttttgattataatttcacttgcttttttctttcattgttattgttgtatttgtaataattgtttgtttgtgtatttatttttataatgttttgttttattttattagtttgtagcgttgttatttaaattatttcaaacttttggttacattaaacttgttttaagaatttgattttgatttctatgttttgtcgggatatggctaggattggggtggtgtgggaagaagtggaaggagaaaaaaagtttatgattttaaaatatattttatagttctttttaaaaaaattatattatttttaattaaaattattatttagaccaataatatttcgacacacgctaattttaaacaaattagcaaatcaattaaaataaaaaccaacagacttactaaagtaactctaatggtacgtttactacacactattcataatcgaaataaaataatggagaaatgtaacggaataaataaaaaataataagaatcaatatttgtaatatgttgtttactaaaattgtttggaaatagaatgata

SEQ ID NO: 86459 - DNA, 593 bp, Cannabis sativa
aggaattattaattatttagcataaagaaattgaatatacatacaattaagtcattatgtctcccttcatacatgtattaaaatttattatacgtatatatttttgtactttttcttaataatgctaatctaacacttttataagtgtcatatcgctattgatataatatcgaaactcagactcatgtaatttaatatagagaaattacttcatatactgttttttttttaactttttttttaaatttacggtttagatttctaaagtggttaccgcactagttgcaataggggtttctataagattttttgttgcgatttacgttgcaatgctaattcaatagagaattctatatagaattccgtaaaaatacaaaaaaaaaaatcgttttgaagcgtaaaaatgaaaaagctcctctaatatattagtttttgaaaaatattactaaccaattataaagtgctagcagtagatagtgctaaacactattggtactcaataatattttttttttgtgaatataaattatttctctcaaatttattaaatccccatatttattcccaacgtattaagtgctagtatattattc

SEQ ID NO: 86460 - DNA, 831 bp, Cannabis sativa
ttatttatggtaaaattgataaatcaatttgggaccttaaaatatagcaaggggaacatataaagcccataaaaattttgtttgattattttattattaaaattaataaaattaagttaataattatcgtttatttattatattgaatatattattagataatgtatttaaaattaaaaaaataatattaaataaaagattataatttatttttgttattatatttatattttaatttgaatttagaatatgaattaatataaatattatattttatttaatatgattaaataaagggtttatttataatattatgatatatatacatatataaatataacatgacaagtagataagtgaacaacttttgacagatcagttttagggttaaaaaataacgattgaatttttccaactctctctctcttcccttgctcaccctcactcaggggcggagctatattgagctccacaggggccatggcccccctcatctttctatatatgtatgtttatacaactaactaatgtgttcttgcaaaatcaattattgtatttttatattttgtttgtgttgacttttcaaagtttttctttgtcgatcaataatatgtatgtataattactgtataatataatagtatatgtggagatcaatttcttaataaaaaacaaaagtacacctaataaaataaatgtgaataactgatataaaaagtctagtgtacaatatattctttttttattaataaactttatttggcaaaaacttttaattctacaccaaaaaatttatttgttgtacttgtattgagttcaagaaatgctaaa

SEQ ID NO: 86461 - DNA, 501 bp, Cannabis sativa
aaacacattaaattaaaatattttgacaactaaattgctaaaaaaatgacctaacacaaataattataaaaatataagtaaatataagttgtaaatgttttattaattagttgggtgaaagaggaagatatgaactgcgaacataggcctttgcaatcactcaagtatagcattgcacctaacatgttgcaccctaaaccctaaacgcaataaagtacctaacatgcacctatactactagtaatattatagacaacattaatttctattaagaaatttatggtaccaataatccaatattaaaatgtaattatttaatgaaaattattagtttaacgattttttttaataaaagtaaacggttaaaactaatattattaaattaattaattaattattttttttaaaaaaatgttttaaatattcaatttaatttaaaagtattaacaaaattagatagttatttttttatgtatgtataaattctaaattaaatttaaa

SEQ ID NO: 86462 - DNA, 506 bp, Cannabis sativa
tatatatattcataaagtataaaccatcgaaatcaacaaagatcttaccttaaaacctaatcggcaaagatttcaattttctcggaaaattggagagcaagaaaatgaaaaggttcggagatcaataaaaaactaaccaagagaagaagtgacccgtttatatagttgggattcaatggagcctcagattctctacggccggctgcccagagacgcgggagcttggattctcatactttccacgctgcttctatgaccttctagaacttactagccaaccatcacatgacacgtgtcctccacaattggaaattagaccacgtcattaatttaatttaataatacttggttaacgttaagttaacggagacgggagaagatacagttcgtgcggtttcgctttattaactcggtctttcgggaagcggtgacattttttttttatttttcttatattctatgtaattatgagagttaaagggtaaactaagcaacaaaggaacaat

SEQ ID NO: 86463 - DNA, 614 bp, Cannabis sativa
ccaaattctctccaagagctcgagaatgtatttttttaggataccccgacaacatgaaggcttatacccttcttgatcttcaaactaattacatctttcatttcagggatgtaatttttatgagccaatttatccattactcaatacatccaacaaaaacaaaactcaaattgacatttttttctcaacctcaaatcggcatcaccaatctgatgcccctcatgatactgcagcttcatctgctccatttcagtcaattgccaaagaacagcttcctagtgttccaaacattactgaagtaacaactacatctaaacctattgcaacaacctctgagtctgctgcaacatccaacaaccaacctataaaaactacaaaatctagtagaacactcaagaaacctggttttttgcaagattacatatgccaaattcacatcataccctattgccaattatatctcctaccataggctctctccaactttttgagcaaccatccatgctgctcaattaattgaacctcgttcttatgcacaagcttgcaaagacaaggtctggaacaaagccatggacactaaaatagatgcacttgaagccaataacacttggatc

SEQ ID NO: 86464 - DNA, 738 bp, Cannabis sativa
ccatctttaacttggagaggaattgtttggggtaaggaacttctccaaaaagggcttcgatggaaggttggtaatggtgaaaacattttctgtgcatcaagtccttggctgcctggaatcacttcatttaagccgctggttttcaatgggacaaatattaatatgaaggttgctgatatgataaataatgatagacaatgggaccatgacaaactttccttgctatttcttgattcggatgtcaccaaaataataagcttgccattaacattcacttctcagcaagatcaacttatatggcatcatgattctcatgggttctatacggtcaaatcggggtacaaacttgctacagatttggaagaacaacaaccgaatggcagcagtattcaagctcagcaatggtggcaaaagttttggaaaatgaaagtgccatcaaagattagaattttcttatggcgtgctattcatgattgtctcccagttgcggacatccttcactatcgacacatttcggataccgatcgctgctctttgtgtaacagaactaaagaaaccatcccacatgctctctttttctgcaaaagggccaagaaagtttggcaaacttcagcctttaatatcgctgatctgtttgcaccagaaatgaaattgatggaattttttcttcatatttcatcctgctggtcttctctgcagcttgaacaatttgctactattttatggagcatttggaca

SEQ ID NO: 86465 - DNA, 916 bp, Cannabis sativa
ttgaaataagttttatttagggtataaaacccaacagacccgactaaaagaatcctcatagtccacaccttctctttgggtataaccctttacaacaagtctagctttaaaagtttcgacttctccaccaacacatctttttttcttgtagacccatttacatcaaattggatgataatcataaggtgcatctacatattcctagactttatttcttttcatggaatccatttctgaatccatgccgactgaccattgtttctattttggaatttccattgcctattcataaggttaatggatcatcatcaataccgtcaccaatgaccatattgatttcaccgtccaagccataacgagctagtttcgtggaaaccctcccactaagacgaggagccgtgaccttctgaataggaacatcagtggtagatttctcgattgtatcaacttgcattagttcaactgagggagtgggatcatcctcaatttgggtagaagacgatggaacattagttggagttttatctgaaagcatttcctctaatactactttactttgcggcttgaagtttttaatatagtcatcttcaaggaatgtggcatttgtagattcaaacactttattatccttgtgactataaaataaaccacccctagtctctttaaaatttccgacaaatatgcaaaccttagttcgtgcttctaatttgccttctttctttcttaagatacgagcagggcacccccagattctattatatcataaactaggtatacaaccattccatagttctacaggtgtcttcgaaacatatttagatggaacgacatatagaatatcatttgccatcagaatagcatatccccaaaagggtgttgacaaagttgaattgcttagcatagacctaaccatttc

SEQ ID NO: 86466 - DNA, 727 bp, Cannabis sativa
aatatttgtactaataataaatttatataaataaggtaaatatacaaattagtacaatttaattatatgaaatgaattaaatacaaaattaaaaaatatacttaatggaagattatccattaattcaatcaataaattactaaattggtaaataaatataataattgcgcacttaattgtagaataattaaatattcacattcttacaatatcacaattattataattacatgtaaaaataaagcatctaattaatttaccaaattaaaaaatttccataattttttcttactaaataacatatctaaaaatacatgttaaataaaaatggaaaatttaaataaatataatttaattgactaaattaacaaaattaaggaaataaaataaaaattccaaaataaatcaaaccaataaattttcgaaatttaaatatttcttaatttttttttaaaaaaaaacactgcctcaaaaatcatttaaataataaaaaatgacacgtcattttatatgaacgacggctgcccaaaatgacaaaaaacgacatgtcgttttacataaacaatggctgccataaaattgaaaaacgacacgtcgttttagatctccttcaacctccaaccgggtcgaaattggactcgatttcagctatgtgggtccgacggacgcgacccaaaacccagccataaaactatttctcgacgtccaaaattcatgaaactaattc

SEQ ID NO: 86467 - DNA, 871 bp, Cannabis sativa
  modified_base (787)..(811): a, c, t, g, unknown or other
tttttctttttcttcttctttctccttcttcttctttattctttcttctttcttcttctttttctgcaaaaatcctccagagtagacatcaacctcagttatggcgttaaatcgaaaggtcttaccacaattgtactaccaactatacaatttaaattctacttataatatatattcgaaatcttctatgttcaacaagcaaagctcaagtattaactcaaaagaaccacaaaggttcaggccctataacacctacacgcctacagccaccaatctaaagtcaaactctcttcactcacacactcaatcaagagaaacggcccaagaatcaacaacccaagaagacaaaagagtaaccctaagatgccaaaccctaatataaaaggtaattttctaatccctaaggctcactactcggcacccaccatttctctcaaagttcaacattttttaaactttctcttcttctcatcaatagcagcacgaaagaaaaattccaggttatgattttctaaattttcaaaacaaactttcagtagagttttctagggttcaaagattttttttcattcttgctcttctcttcttctagttgtagctgcactagggttgtgtactaatggcttctttcatttctttttcttttctagggttaatggttctaatcggttttggtttctaaagtttgtaatcgtcttacttacactaacagccgcaccagggtagacatcaacctcagggtttctgcagaaaaagaaagaaggaagaaagaagaagaagaaagaannnnnnnnnnnnnnnnnnnnnnnnnaaaaaaaaattaatttttttaattttttaaattaagaaaaaaagtaaaaaagaaaaaaaa

SEQ ID NO: 86468 - DNA, 1143 bp, Cannabis sativa
ttatggatgatgtttccattagactcctgaggttatataaattatatgctagacttaaataaaaagtaaaagtatattacgcaatccactcaaaaaaatgagtatattttaatataaaaacaaaataagagtatttttgattaatgtataaaaaaagaagtatttttcaaccaatctctatattataagttttgaaaatataaatatttagtgttactcaaaaaagacaatgaccatgtctatcaatttttttttaggaaaaaaaaatatttttaccaaaaaacttcattaatttaacatttaaaatgtgatggtgagattatagtggacaactttttgagttatcaattattggagtattttttgtaaaaaaaaataccaaatcttatgtggatgagaatgaaaattaaaaaaaaaaaatattttgagatgatgtgttaccttttgacaactataagacctctcattagagatgttctcagggtgttggacacaagtggtgggtaacaccttttacaagtgacaccttataattataattagtaatatttctcgaaagttattgtcttagattatttctaatgcaagatgtaaaatttgtattaaatttggcaaaaaataagtttgtattatatttagctcattatttataattgtgcttcaatatacaaaatgtaaaataagtaaataaatactcaattatattgatagtcatttgatattttattgagaatatataaaaatcattatttttttattattatttaaataatggtaatatagtatatatagagtgtaaaatttagtaaaagttaatttttttttttaaatgaatattgataagctttattaaacttcaaactctgctaccaaacatgatagcagttcagttggaatattccccatactaaaaatacattcaggatataaactagaagctcgagcaaaagcatgagctaccacatttgctgaacgcataacaaaatgaaaagaaacatttcttaattctgcaagcaacaatttatactctttgataatcaaaccaaacaaagaaaacatttcaaaagaattccgcaacgcttgcacaacgatcaaacaatttgtctcccctacaacttggagaaaaaagtaatatttattata

SEQ ID NO: 86469 - DNA, 855 bp, Cannabis sativa
ataaacatatgatctggacttaacagattttgtgtataaatataataaacatattaaatcataagcatgtaaaatttagggcttttttcaaatatatacttaaatatgaaaataattacatagaaaacaaacagtaaattaattatctatacggaaggtaagcataccgaaatttaaaaagttattagtgtctcctatatctttcttattgatatttatgtttttagttatatatgccaaaagtctaaattatgcggatattattcaatttcttctcatttcaagagaaaaaaaaatatattattattttttttttgtctaccttatttatttatttattttttcaaaaagtatttattttttcttcttaatttaatttaaaagtaaattccggacacaccgttaattatttggacttaaaaataatattattgcaacctacattttaagacagttattttgacatgttaaaagcatataatatattatttttctcatcactaagaaaataaccataactaaaagcaacattttagttttctttataatttattaaacaataaataactaaaagttaaacttaaacaaaattagtatactactaattttgtgagttactacaaatatcttattattttatatttaaattatcttttaaacataataaaattagataattaattaattacattataaaattcttgttttaatttttttttaagttattttttagcaacatttgagttactttaaaaaaatttatgaatgtcaataattattacatagcaactttttaattactcttaataactatataaaaagtggagtaaattaaacaataaggttagatagttt

SEQ ID NO: 86470 - DNA, 568 bp, Cannabis sativa
taattttttaattaattaattttttttaaaaaaaataaatacttttgtccgcgcattcttgcaccggtaaaaggtggccaaaactgttggcaccaatagttttgccgacgcatgtatagggccggcaaaagcttatcaaagcaggttcatagtggataagggtattttttaacaccgacgcttctttttcaccggcgtgatttctcgccggtaaaaggaagttttactggcgcgtagagtaaaaagtcttttactgaccaagattcacagataagctttgccggcacagttagtgtacttttgccgacgcaaaactgcgccggcaaaagaggtttttcttgtagtgacacaatagtttagtaaattattaagaacattaataaaacttttaattggacacaccatcaagaccatatattgggaatcagtcctatggaacaaaacactaaacttggataatttgacagacaatcgaacactatatcgggctctatcggtcctatcgaacaaaacactaaacttggaaaattaaacacacaatcagacactatatcgggccctacatcgg

SEQ ID NO: 86471 - DNA, 879 bp, Cannabis sativa
tttgaatcgagaggagacacgcacttgaaatcacatatatacacatataaattagcataaaaatatatatgtatatatacatatgggttatatatgagtcagattcactaattaaatgaaaaaaagaacaaaacatgatttttctcaaatctgatgattcgttatattatatatacatatatgtatgtgtactcaagtttttattttgtctgtattctttccaaatataaatcccaaagtttcaatatatgccataaaactctcatggatatatacatatatatatataaaataaggaaagtcaaaataaaaaaaaaggtgtgataagcatatatatatacatgcacaataataatgtgccaagtaaatgtaggatcacatatacgtatatgtatatatatattaacactattatatagaacctcaatatatgtatgtataggagggtctaacagaaaacttgtggcattaccgaacttgtggcacagacgattatcgtcaaagtttgacagtgggaaactcgttattaaagaaattcgtgagttttcatctagtgctacaacaaggtttatatagagataaatctaagcaatagattatatctcagatttaatttaatttaaaatttaaattgaattaaaaaaatggtaatacaacttatcatataaaaactaataattaatttaattatttccttttgagaattatattaagttaattaaaaatatcagtcaaataatctttttatttctaaaaataataaaaagattgtaaaactgaattttatcacaaaaaagtggtaaaattctaaagtttataaaagataataaaaagatccccaaactcaaatttatcaccaaaaagtggtaaatttctaaa

SEQ ID NO: 86472 - DNA, 954 bp, Cannabis sativa
tctcgagtccaatgcacccttgtggttctcgtatggtggcgttttgttatttatttatttatttttttacttttctattgtaataatagtgtttatcaatctgctcttttaatatttttattttagtaaatagcaatataccttacctttgcatatttattttgttatttacttttttaatttagaaaaaaaaatacataaattgttattttttatacttttactttttttttttatatatttttacaatattctacaaaaacacacacaaaagaaattatatgaaaataataggaaaaaaaaaacaacaaaacagcataaaaaacaatatataaataacaaaaaattaacaacaaagacaagattacaacataaaaattcatcaaaagatcgtatttttaaaataaaaattttaaaattctgtacaactgcattttataattttttttattgcttttgtatatttataaaattatccctttaatttatctttgaaaaacaaaattatttaatatatgggttaattgcgacgaaacacttttatgttttaattttttacacttaaccctctattttttagtggcaaaatttatttatatttacttttctttgcaaatttgaagtgtagctagatatcaatattaaataccaattggattattactatatcagttttgaaattttactttcatgtatacacatgagtacacaatagttattcatttgatatttatcggtaatatttaactgacacctaatttataaaaaaaaaaataaatttaatggagtttcaccaaaaaaaagtagaattaccctatctatattattttttaattttttttttcaaatttacgatttgggttctcttatggttttgggttgctatgtaaatttttgttacgatttaaattgttttattagttgctatgcgaatttttataaaaatataaataa

SEQ ID NO: 86473 - DNA, 796 bp, Cannabis sativa
gatggtaacttaaaacagctcatagcataagtgggtattgattgaacaactgctttcaacaatacctccttaccaccaatggagaaaagcttgttagtccatgaatgaagaagcttccagatttgatccttaatgttgttgagtaaatgtttcttatctcattcagagtaagcagggagacccaaatacttttcatggcattcacaaatgggcatacccaagattcgttgaaaggattgttttgctgcttctgtgatattcggggagaatgacataacagatttatctgtattgagttgttgtcttgaagccctatgatatatatatatccaaagcacgctttaaggcaccacaagaccaaccatccgcttggcaaaataaaagactatcatccgcgaagaataagtgagtgacaactggggcatgacgagatactgataatcctttaagtcgaccaatggattcttcaaacctcaataatcgagataagccttctgaatagataagaaacaaatatgagaataatgggtcgccttgacgtagaccctgttgaggagtgactaaacctgatacaaccccatttatgagaaaagaaaactgggttgtatgaaggcaaatcattatgagagagatccaccgaacattaaaccatattttccccatgactattgcaatgaaggaccattcaaccctatcaaatgctttactcatatccagtttaagtgcagcatatcctttccgacttcgtttatgcttcaaagagtggacaagttcaaaccccacaagaacattatcc

SEQ ID NO: 86474 - DNA, 803 bp, Cannabis sativa
aactcctttgttcttgctgctagagttacatagaacaatttttcattctacccttttgatattctgattcggtgggaaatttccttcctatttcggacgtgagagaagacattgcagaggcctatagaaagatattcgagtttttcttcttttgatttgttcgaaatttgatctggtgttgtcattagcaagagtctaatctaaaatacttatgtattactttaaaaccaggtagaagtagagaggttgttgtcattgagtcaaacgatgtgacaaatgccttggcagccaagctagctaaattagctcgtcattgaagcggcttctcgtagtaggtttggaagttcttttattacaatggttgatatctttatggaaatttcatttgattcttctatattacttctaaaaataatctaaagggatctcataatagtagtttagaccatagggacatgttgctaacatagtgaagggactcaatctctgacctgtcctattcagaagagcaacagatttatttcttttgttcagctaaaatatgtaaacaaaaacctgttggataattccaaaaggcatgaagaaattattgtggaggaggacaaaacaaaagcactagcaaaggaagagaaagaaaagcattaggctgccaaaagacaagctatgtatgtgaggcaatgtgatgaaagagaagcctctctgaagaaggatgcagagatgaaagctatgcatgatgctgaagactgaagagattgagaagcttgagattgctctcacatgtaatttgcaacaataccagcagt

SEQ ID NO: 86475 - DNA, 764 bp, Cannabis sativa
gggtcgcgtatcaggcattcatgtgctaacaacatagaactcgcgggttctggtcgagttgtcgtgcacattggtcatccggaccaaatgccgataaagatgcagtatttacataggcttgagggagaaacaccgggtcatcgcatatacttgatatatgtcgcgactgtgctaacttccctctacgtcccggtctttaccatgcgatgcatagtgtgcgattagaccctgtcttagtcgcattttctcacaagtttcaatcatacgaggaaattttttgggaatcgttcccctaccatgcccctagttcttgcgatgacatgctgttgtctactcgttgaatttttggtgagggacatttgatctgtcacattgcaggtgatctttggttttaccttatcagagtttttataatgactatcgatcatcatttaaatttttaagatgccctgtcagcagaactctttggggtctgtacttcccgtttggacggggaagccccttttttttcatgaatcgtccaaatgagacatagatttggccatatatgcgatgtgctagtgttaaaagtactgagcaccatcggttgtttgcaataaacttattattattttatcatgcaaaaatgagtctttggactcgcctatttgtgattattaaaataattattgcaataatctttctaaataattatgcataaataagcacacatagctcgccaatatatgaatacatgtattaagagtataattggctcctaaata

SEQ ID NO: 86476 - DNA, 550 bp, Cannabis sativa
gctaaaaatttagacccaaaaaatctgaaaaaattcgttgatctggcgtgcacctttggagtgaatttcagcagaaaatgttaaatccattgggattgggtgggaacccaaaacctaaaaacttgacctattttaagccctaaataatataatttatttacaaaacactataatatatattattctcataataatatatatttgtcacattttaatgaattatattatttgtgtaaaaaaaaaaagtataacataaatgataatacttttttttcttaaaaaaaactaatttaatgaattatatacaaccatttattattagaatttgctacaatatactaaaaaaaatattacaaattacttaaaatatgttaaaaacaaagagtgaaaaattaaaatattcataacaatattattttggtcttaataaaatagactaatataactgttaaaacctaaataacttaataaactattgttcaaaaagttcattattatattgaagctaacaacttcatttactctattttttttttttaacaaagtgatt

SEQ ID NO: 86477 - DNA, 518 bp, Cannabis sativa
tcactttcaaataacactaaaaaatctagtataaaatttagtatacgtgcctcgcacgtagctttttactagtatttataaatgggttaacgaatccaacctgtttaactaatttatctaaataattatttttaattttggctaagttatcaatatgtttacgagtttaacttatttataattattttatgacatatttatgagtaatttaatatgtttatgttttatttaaccaacttaaaacatttaacgtgtaataagtataagcgtattttttaataggtcatagtgttattttttggttaggcacttgaacctgaatatttaataaatcgattagttctctcaactcaaaaataacccaaattcaattaaagaaaatcatagccgtttatatcgtgtgggtttcaagtcgtatttttgtgtctaatctatttttccgctcctatgggtcccctgttagttttcaattttttttaagtagttttcaatgttgaaaatagaatttattgtagtaa

SEQ ID NO: 86478 - DNA, 579 bp, Cannabis sativa
acaccaaattttatattatttattattctattattttattaatataataaaaatattttaatactaaatatatataattatttagtctaatatttaattatcaaattttttttaaaaaaaatagtgtggtctacctacctcactaaatttggtgggattttgtagatgaaattatttataaatataattttagcattttattggagtaaatatagtataaatttataatatatatatatatttagtgttttgaagtagagatgtttttagtatcacttgataaggtaaaagaatatcggtcctctttataataagagagacaaaaattaaacagtactagcagaagcaccactgtcttatcattttgagagactaacaagagtaaatacatttttacaaatatataattttagaataacgattgagacactcttacattatatactacttttaagtataataatatataataaatctcagccacacaattaaaaaataagtgtgtacttaaatgtacttatcattgcttataattttatctatgtgcatatccatagcaaaagaatactaaaggaaact

SEQ ID NO: 86479 - DNA, 796 bp, Cannabis sativa
tatacttaaatatatacaagagataattaattagttatggaaattagttttgtggtgaatttgatttcagcataacaggaaagtctataataatgttgagttaactcttgagttcactgttatctggactatgaactaccttacgaattttcataacaaacagcaagtggtggttggccccccgttacggctgagagtgactgattctcgtgatggtgcttcacttgcaaggttattgggttatatgctctttcaacatccaaatgggttcctccctcctcgtgattttttaaaagtgaatacaaatactactcttaatttgataaatcattgcagtgggttagatatggtgatttgtgatgaattaggtgtggctaaagcctcgactatttggcacttgataagttgctttgattcataaattgttgaagttttggctattcgaaatgctatctctcaatatctctcctttggccatgacaacatcattattgagtttcaatattgtgctcaaaattaaaaataaaatttctatcattacttctttgggtcttgttttagatgatattgataagctttgtaataggatccatgttgttaggtttattcattgttatagaccttgtaattgtgttgcttacactttggccaaacttgctttgtcggcaagtaatagtattatttggtagttagggatctcaattgtattcaggacatgttgatagcggatgctatccttgaataaaccctcacccccaacctttattgagtgctaataaataaataaataaaataa

SEQ ID NO: 86480 - DNA, 553 bp, Cannabis sativa
ctatttcttgttgtggcggtaatctcgataacttctcaggaaaaacgtcgagaaattctttaacaaccctgactactttaggcccaaatgtttcgggtctactggagtcaatcacaaccgctaaaaatcctacacatccactgtgtagtaaatgtctagcccttaaaaatgaaataatcgggcttcaagacccctgaattgatcctacataaacaaatggatcctcaccctctggttgaaaagttaccattttccgcttacaatcaatgttggccgaatacttggatagaaaatctatcccaagtataatgtcaaattctgttaaatctagctctattaggtcagcactcaactccctatcttcgatcctaactagcatagacctaattcacctagtggagataaccaactccccgctaggcaatagggttccaaaccctctttcgataaaatcacatggcctacccaaaagatcaattacccgtgttgccacatatgagtgtgtagctcctgagtcaaatcacacagtataaatggagttgttaacaagaag

SEQ ID NO: 86481 - DNA, 593 bp, Cannabis sativa
ttaatttagtttgctattatattcttttttaataaggagtttgctattatattcattatctcttttttttatttatttctccattcaatattattttataacaaattagtcctttgatacttgtccacttatttattttttattttgtaaaaacgacccaattaaactgtacctcttattttttttcagaaaaacacaagtttccgcttctcaccaaagaccatttatttattattattgttaatattcaaaaagaaaagaaaagaaaaaggccgaaaaagttggtttagttgcttctcagagggagtgtgtgtgagagagaagtggccgaagcccgtggagtgtgttgttgaggtgggccgtaccgatggagacgagtgcccaaacgacgtcgttcggagaacaacgcggtgccggaggtaagctcaagaggccggctcgcaagccaccgtcaactccctactctcgtcctccggcgctaccgacccaaatcgataggggtcagcggcgatggttgtccaagctcgttgatcccgcataccgcctcattagtgatggcgcctccatcttctttccgaatttcttctcaaaat

SEQ ID NO: 86482 - DNA, 639 bp, Cannabis sativa
tttagtgtagggttgacttgcttctaattttcataggacaaccctatcgtctgacgacatctatcctaaagttgatactagcttggaatcgtttttgcctatatactctcatttattattgacttggagaggaagtctttttccttggtccatcaacttggatacttcattcatctgagtagctcctcgtttaggtatctctataggacactctgctgctaggtctgaatatgagtatgaacctaagttagccatatctaccccattgacaaacaaaatataaagttagctataacagtgtaactacttacataaaaaaaaagtatcacaagtaatctataacaaatattaactacataaacaaacattatcacaagtaagcaatcacaagtaagttaccaattagacacattttcttttcttttttcgtttatgtttgcctgaatcacaattgacccatattccctcattgatatcgttcataatgtattcagaattgtcttcctcaaggttacggtcaatttccaaaaattgttcatgaattagttgcccaacaatgaagtcattataacataaatcaacattccatacttaaaatctactagttctacttattggagaatttgttcccctgacagt

SEQ ID NO: 86483 - DNA, 713 bp, Cannabis sativa
atatatatatatataaaattaaattatagcaatcaatacctaaaatatagatggctctacatatttttttttaaagaaagaatttatattaattcaagtttgagtacataagagttttaagttctatcggagtattgaactcagaaaaattacaatccgaggagtatcgagagctacgtgcaatccaatgagaagtccaaagactaaagacatagaggtactacctcgaattgtttggacaattataaccatatactgtcagtttctagtgttgcttcttgcccgccattgatctttatccaattaagggcttctttcacccctatggtttcgacaatctccactaacaaggcacctgctaagagatattttaatgtgtcaaacactataaaaagtgtcatatcattattaatacatctcactttcagattacattttaatttaataaataatataaaatatcgctattcgttaactaactataaaatattataccttaaaatatcaaatattattgctataaatattggtccccatataaatattattattaaacaatattatttataatgtatagtgtgcgcgtgacaaataaccataggttataaaagctgcaatatacatcatgattaattatttttcttttttatttatatatacctttctttttatgtttgtatatattagggaaaattaattaacacatgtgatga

SEQ ID NO: 86484 - DNA, 582 bp, Cannabis sativa
cttcagactcttaagttgaattagcgatggctaagtcagccaaatttgttggtataggcgctccagatttagctgaagcaatcggcataaaggaagtgctaagttgggttaaaactcaaccatggcgaaaagtggagatggagtcagattgcttggtagtccaagctattcgaaatttattacctacgctttcttcttttgggattattatagaagattgttgtaaatttctcgcatctttaaataatatattcttattttttactaaacgatctgctaacatggctgctcatagtcttgctagagcatcttgttctattccagatcgagtgttcaacaagggtgatattcctgttgaggtacagtcttgtcttttagctatttggcaaattaaaaagtttatatatattttttttaaaagaaatagggtatctatacttttaaaatcttttcttcccaaaaatactcttacatttttttaaaaaaacctctctctaactctctcactctaactaagtctccctgtctctacctcaaagctctgagctcaaccaccccaaaactaccaaatttccacccatc

SEQ ID NO: 86485 - DNA, 653 bp, Cannabis sativa
ggaccgtaaaaattcaacatctatgttctatgatgtgggtcactaagaaatatgaagggtcattaaaaacttatttatttcaaaaatataaatatatatagtggcgcgcactatacaattcttaaagtgttcagaatcacgcaatggaggtaactaaatacttaataaaaaaattatgaaaacaaacaaacacacaaaaaagaacttataaaatattaacttaataaaaaactgaaatgaccatgtggccaccaatccctccttttagccttttttttcttactttctttctaatcgatctgaaaaaataaaaatttataaaaaaaattaataaaaggacatctcttattgggtcctttcacacgaacccaattttttttttttaaatttctttttgtctcgctctttctcacctctctcactttctctcccatcattgctacgcagcactcctccggcaactggccaaaaatgcccatcacaattgacttctggcctctctccgacttgccgtctctcccctcgcctgagacaatgatttaacctccagtacgctaatcccatatccacaacccaaaactcgaaggtcaacacttgttctccttttcttttcttggtttctctacttttcttctctctctctctctccctct

SEQ ID NO: 86486 - DNA, 950 bp, Cannabis sativa
caactaacaaaactaacatttgaaactgtccaatccgagagtgccacatgtcctgaatattagacttatgtctaaaaataccacaataaatttgaagaatcagacaaaggttatgtaccttctaatatgcagtctgactcgggttctgaagatgaagaagacgataaggagtcattggtagaatcagaatgacgacgagaaagcctctgaagaagaatcagaggaagacgaaggaaaaacctaagaagaattggagagtgaagcaagttatgcaaatagggaaaaaggagatgattcagacagtaaacaagaaagaggaaggactaagattaaggcttttggaaatgctagagcgcctgaccagagaaatttgagaagcagccttagcaaaaggcctaaattaaggagataagaggtttcttattttctttctcttgctctttccatttagttatttgtataactgcgttttacaaagatgttcatgcttgtacttttatttagtgttattataaagacgtcaatctatgtctgagttataaactattcttaattgtaagatggtgtttgatgaaagttttgcatattttattcttggcaacatttagtttagctgcataaggcctttaatgaaatactacttagttacgtactagtacctaaggaactttgaactctattgaaagcttcaaaacactagctagtgatccttcgcaatgagaaaaatgttatcatatgtttgtatattcgaattccttaatatttttgagtatttgaggccctctgtagaaactatttagggtgggcatccgatccaatctaacatttttcccctcatacgattcaatccaattagtaattggatttggaaaatcatcatccgatccaatctaattagacatcaaaatccaatccaatccaattcaattactaattagattggatcggtt

SEQ ID NO: 86487 - DNA, 693 bp, Cannabis sativa
attttcacctttatgccctttacttcttcgaatgctaaatcctacattgtaagcataagtattatagaaattatatgcttcttcttctgtttcaaattccatactaacctttggtatcatttcactgcgaatatttgcatgatttatttgaactatcttctcactttgaagagtggtttcaacatctttgtcatcatcttgtaatacttcatcaaagcttgaaatatagttttcatcattattttgtaactctaatctttgacgcgagagaaattcttcatctaacatattactctccatatctatcatcaataattaaaagtaaatatttccgaaataaaattcaaaataccttattaaacttgaacatgaataatatctatctatttttttattattacttttatgtaagatcatattcatctaaaaaagatagtgtgaatgaaaaaaaaaaattgataaattgtaaatttctatcttaattgtttatatataatcatataaaaagataataccagttgaaagaaattttttgaactttacagtacaataaaaataaatttaaacaaaaaaataatatagcagaatattaaaacttatcttaataacacaatatttaggctaatcagtccatattcaatcaatcatgttataaaaaagttcatcatctattttatctaatcgtaccaatca

SEQ ID NO: 86488 - DNA, 646 bp, Cannabis sativa
aaccaagaatttcagttatataggtacactttatatagaatagatttataaagatatggaatgaggagaaaatagaaagaatagataaaaaataactttcatgtcaccaggtaataggttaaaataagaaatattaaattaaaaaatttaatataaatatcaactattagatttgatccaatggcatggctaataatagaatacaatacacatcacattcataggtaatacccattaagagtatacccatatttatatatattgctaagtttgctatgatcatattatatttacatttataataatttttttagtattattatataaatattatatttttcttaaatggtttggctgatagattttgggtagcttatcttttatatggatataataatatagtttatttgtgtttctaatatgtacaaagattttatagtggacattatgcttcattttataaccgacacaataggtaaaaaaagtatttcaacaaataatgtgtcattttgttaccgaaggtataactttttagtgacgctttcgaaatgtcacaaacgatttcgcgttatttccaaactgacgcaaaaaataaaaaagaagaatgtatattttgtgataatttttaaataaagataattgtttt

SEQ ID NO: 86489 - DNA, 823 bp, Cannabis sativa
aatcaagttaacatattgtcaacctgtgctgtttccaatcaagttcaccaaaaagtgtttcaggcattttttctgtcatcggaaataattaagattccagaaaactcaaggtgaaaaacacaaatttgagcccttttcaaataggacccagtgcctaagttgatccctggtgctaggcctaaggcccaagttgacaatcaacctggggcgctgctttagattgctcatatgccaaatcttattcaaccaatgatttcgaaatggtcaaaaatagggtaggaaacctcgtcttcaagttcacgaaccttggaactaccaaaataagatcccaagagctcaagattagggttcccagtgcccaagctgacaaatggcctagtgcgctgagtttcacttatctaattctgattctgtttcgactgtccatcttgtttttcacaataactaagatccatgaagttagtgaagtcaaaatcacaactttgcatttctcatttctaacattggaaactcactcgaaaatgaagaattttgagtctctcttttctgcagaatagcaaaatctctgagagttggtgaccagcttcaccaaaacacataaacagactaagtgatgtcaaaatctcccttaagcatcttaaagtacatcatttggacattttacacttacccagtgtctaagttgacatcatatgtcaacctcggtgctatgtatgctggttttatggtactaaatcaaatacgcaatggaagaatttcgtattatctaattatcattataccatattgttgggaattaatttatcaggatctagatttacta

SEQ ID NO: 86490 - DNA, 1028 bp, Cannabis sativa
tttatattaattgcaattcacataacaaattaagagtaattactttaattgtaatttactttgcaaattcatttgattgctactactatttcaaatgagctgtctcaaatgactcattaatagcagtgttagcgtataccatattaggtaatagtctatataatcaacattaattataaacattcattactaattatgtttatattatattaggaaaagcctatattatctactttaattgaaattcacatggcaaattaattgtaatttgcttaaattgtaatttactttacaaattcatgtttgaattgctactaatattttaaatgagctgtgtctcaaagggctcattaataacagtgcatatcatatatggtaatagtcaatagaataaacattaattataaatattcattactaattatatctatattatattaggaaaagtctctagtatctacattaattgtaattcacatagcaaattaatgttaattccaccaatgactcaaatgagttgtgcctcatggttggtgtgttattatataatagaaagtgtttgcttgatattttaaaatatagaattcttcctttatttctcaaatattttttacgtttttaaatcaaaatgaagcctcattatgatgacctttctgaaaccatcaagctccatcctcaagagttgggttttaaatctgcaacaaataatgcaactgaatctggtccaatagtgttgcccaatattgtgtatgaaaaactcctatctgacaaaccttttaatcctcaatcatgcagaaacttcttttcaggattgtggaggaagcaactaggaataacgatggaagaagctattgatggtatgtttctcgtaacttttcaatcaaaatttgttaaacaaaggattattaggggtcaaccatggtattttttaggtcattatttgtcgcttgttgagtcatctaggattaattaggttgtagtggaggattttaagaatatttccttttggatccaagttcatggtattc

SEQ ID NO: 86491 - DNA, 519 bp, Cannabis sativa
aagttactaataaaatttggtggcctgtctattcttcttgtattcatgcacttatttttagtgatatcattaattaataaatttttatcccttctcttttttttctaagcaagttgctcgaaaagttgtttagagattttcttctcgaaaaaaaaaaaaaaaaaaaaaaaaaactgcacaaaattaataatcacataaaaaaaaagtaataacatatttaaaaataattgagaattctttaattagaatatatgaaattattttttttaaaaaaaaaaatcaatgatatcataaaatttcttaaaataaatagagcaaaaaactatgggtaagaaagaatatcaccttcaaaaaatatttattgatacaattattgaccttttccttaagacttacatggaaaataattattaataatccaaatgttaaatttaccttaaaaaacaaaaataaaataaaatcttataaggactgtacagatttttttatttaagactttcaccttcagatttttttttt

SEQ ID NO: 86492 - DNA, 700 bp, Cannabis sativa
gtatgataggagtaataagaaatttctctggattgaacgcgttcatacactcaaatagtgtattgcaacagatactgtgatgccctgcctaggtggcaatgccacgagaatttagaaatgcatattttgcatccaatatgttagtgttaaatagtcaagcctacatgtagctgataaaaatagataaattaaaatcaaactccaaacaaaattattaagttaattaagagttggatattatacttgcaccaaatttctaatgtctgggctcttatgatcatcattttgaagacatccttgatgtcagtgtttcgaatcaaaattaagtcgttcttttgcccaaacacatctttaccaacacggaatttgactgatttttcttatcaccatgctgctcttatgagattttccctatccaacttatttcatttctcaaatccggtaaaagtttcaaatgaacttgttgtctttttatataaaatttcttttagtgcaaaaataattaatttggttgatgtcatttgggagtgaattgtctctctttaaaagggtaagaaacttagccttaatcttatttttcttcccttgatttaaaatattttgtataaccaaacgcagttgattcttgagaatgaatccattgaagctcctactgttggtaccactttcaaagtcccagaaaaacctcctcaaagaaaat

SEQ ID NO: 86493 - DNA, 607 bp, Cannabis sativa
tgatggaatcctttggcgactaatctggctttgaactggctaacactctcatcaagattttctttgattatataaacccatttgcagcctatgggaattctatttgggggtaaatccactaagatccaagtgttgtttcttcttaatgcagtaaattcacagtccattgcagcaaactactttagatcttttaatgcagcaattatggactttggagtcagggatgccatcaacgccattggttttcgaattcttgactttgctcttgtttgcattgggtgtgtgttggtttgagactcaattggttgttgagcagtaggagcaatgtcatgtgtaacagctaaagcaatgacatgagctgtattgacagtatgaactgtggctaggatttgcatattattctgtatacaacctgcattagaagcattagtgagactaataggagaaatattaatgttggaaacatgtgcattatcaaacataattggtccattgttagactaagatgaggcagtatgagtaggatgagtggtgtgtatacaattaggaggtatatttggtggaggagaatgagagggttgattactttggaaagacaaagtggggg

SEQ ID NO: 86494 - DNA, 889 bp, Cannabis sativa
aaataattttcataattaaacataattaactgctatttttaaattaaactaagcggtctttacagttgtgttgatctctttaagaattttaccagaagccaggaaagatgtaactgccctgtacacatcctctcctaccagctcccaattatcctgaaagaaatagttggaaaaaccatctggccctggcgctatgtttcctgctatctcaaacactaccttcttgacatcctccatagaaaatggtctactaagcatctcagcctgctcaacagtaacttttgggcctctattcaagatcttgtttgatactttcttcctatttgccatttttgatcccaacaatgacttgtaataagcaatgaaagcctcggtagcctgttctggctcaaaaaccctcacccctgcttcattctcaattaaaaatactttattctgcctgtgtctttgcttaatgctcgcaaggaagagtgctgagttgctatctccatcacgcatccagctaatcttagcttcctgctgtaaaaatgaatggtagtgctgctgagctaagataaaagcatttctggcattaatttcttgtacctgcagagcttcatttaatggattagtgtgcagcttactctgagtttcatcaagtagttgcttggcttgaatccatgtagcttgcaagtccgagaagcctttctggttgatctctctaaggacaggctttaaggccttcaatttgtgcaccacctgatacatactagtgccactaattcgttgtttccatacatcagcaaccttattgtcatattcagggtgtgttttccacatcctaaaatattttaagggttttttcccacacttccatttgggaaataaagacagaatacccggggtatga

SEQ ID NO: 86495 - DNA, 1129 bp, Cannabis sativa
taaagacctgtccaacaccaatgattgttggcaaacctttgtcgctcactgatgggaagccaatggaaaatgctactctttataggagtacggttggtgcactccagtatctatgtcacacacggcttgacattgcatacgccgtgaacaaattgagtcaattcttgcaaactccaactgacattcactggagtggagtgaaacgcgtactacgatacttgcagggtaccgaaacaaaaggtcttaacatcagctgtagcgacagacttagcatcactggtttttcagatgccgactgggcttgctgtcctgatgacaaaaggtctattgcaggttattgtgtttatttgggtgacactcttgtgtcatggtcatccaagaaccaagctgttgtttcaaggtcgagcattgaatcagaatatcgtgctttagctcatgtagctgctgaaatatcatgggttgagtcattgctgaatgaacttcagtttcctttcccaagtccatctgtgacatagtgtgacaacctcagtgccactgaacttgcagcgaatcccgtcttccgtgctcgaaccaaacacatcaaaattgacgcgcactatgttcgtgataaagtactgcagaagcaacttgagattcgatacattccttcacatgatcaaattgccgactgcttgactaaaggcctatctccttctcgttttgccttccttgtagacaaactcggcgtgaggaactcaccttttcgtttgagaggggatgtcaaggaataacaattcagctactgtatttctacacctgcaataccaggaaaatacattgcagccatacaattcagtggtctcctgtttgtaacagaattgtgccctttttaattgtgtaatttgtcttgtatgaattcggttatgccttgtcattgtgtaatcattaggggaatatttaggctgaatattctagtcttttgctcatgtaatcacagccaggtgtccagccaagcggctgtttttgtattctgaatattgctgtaaatatactgctctggctcatacagcaaatgagctgagattcataatttgccttctccttaaaatccaaattgtggccatggcccccttaatattttggggaatca

SEQ ID NO: 86496 - DNA, 2133 bp, Cannabis sativa
  modified_base (73)..(75): a, c, t, g, unknown or other
  modified_base (2107)..(2107): a, c, t, g, unknown or other
tgtaaatatattgtaattgtatagttcttttttataggcctatttgggtgctatttgggtgtaatcaaattgnnncttgtgctaatacaaattctgattcatcaaaaaaaaaagaccacatcaaagacttggggcgatgcttcaacatcttatgagaatatcgaatgaagcttaaccctctaaaatgtggctttggcatccaatcagaaaagtttcttggattcatgtcaagtcaagaggggttaaagtgaacccgaagaagatcaaggcattataatacatgaagtctcctttgcgtataaaagatgtgtaaagccttactagataaattgctatgctatgtagattcgtctccaagtccactaacaagtgtgttcccatctttaatctgctaaaaggtagcaacaaaggattcgaatggactagtgaaagcgagcaagatttctaagctctcaaacatcacttagccagacctctaatcccatataaacgaatagatgacgaagaattattcacctatttggccatcattttagagggttaagcttagccaggtattcccctattgagaatttggcttattatttagtattggcctgaagaaaattaaggccatacttttaagcccatccagtcaaattattaactgaccaaccaccaaggcaaattttgatgaaaccagaagcatcaagatgtctactcaaatgggaagtagagctaggttagtttgatatcacttatcagccttgcacaataattaacggacatgtattagtagatttcattgttgagtgtactggccttgaagaagaagacaccatggtctgtaaaattcaaacccacaaacctgacactgtaactcaagagggcattgggccttcttagaatctctatgaagatggatcctcttgtgagcatggctctagggtaggactcactgtggttactcccaaagggtttcactcttaatgtgcattgtgctttgaatcactgcaacaaactatgaagcagagtatgaggcaatccttgtaggacttcagttggcactagcaatcaaagttgagtcacttgaaatttatagtgattcccagcttgttgtcaatcaaattatcggcgaataccaagcctgaagactaaaaatgatagcatacttgagctaaatctatccgagctaaaacactactccatccaactacctcgctaatagaatgcaaacacggtttccccagctaaactagctagtgcaacaaattttaatactctcagtattgttctcatcatatacctcaccaagtgaagcatcaatgaagacttaaatcccatcctcatgatcgacaacagtccatcatggatgattttgattgcacaatacttcaattaaagtattctctcaatagatcgtaacgaagctaaaaaagtgatgagaaaagtagcttgcatcatcatcatggatggagtaatgtacataagaggctcctcaatgccacttccgaggtgtgccacgaaggaagaagccaagttactcatggtcgaagttcatgaaggattctttagcaaccatgcttgggagaaaagcctctcaaagaagatattgatagattcgtatttttggtcaataatgattgaggattctatggattatgttgcaagtgttagaggttctccaaaatatctagggttgccccaaataagctcaagagtatgcaaactccctggccatttattgtttggggaatcaatctcataagttcactacctaggggaaaggtagagttcaatatgcagtagtggaagtggattacttcaccaaatgggtcgaagtataacatttagccactatcacatcaaagaaagttcttgattttgtgttcaagaacatcatttgccacttcaaactccaaaaaaagatagtgttagacaacagaacatagtttgatagcaatctctttactgacttttgtgacagacacgtaatcattaagagttttttggaagtttcttacccacaagcaaatgagcaagtgaaaatagttgaccaaactcttcaaaatacgctaaagaagcgcctagagaatgttggaattatattttaccaggaacttagatntactcacaagtatgttgatttaagaa

SEQ ID NO: 86497 - DNA, 694 bp, Cannabis sativa
gattgttttgcactttggtagtttgcaatatagttcaaagcataagttgcaagagaggagggatctctatgcgaaccaccatgcagtaccttattcctatcatttcagatactccacataacacatattattgcttcaaaatcagctttatccattgttgttgccaagtgaattagataatccccgtttaacataccatgagctaggtggaaatcaattgtggaattagtgtttttccaaacagccttggcatgcttgctcgtaaacaaggcatgtccaattgactcacaagcatttttacaccttgaacataaggtcgaatctatgactttcctccaatgcagtgcagaggcaaccggaagggcatgctgaatgactttccaagcaaaaattttaacttttggtggtaactgcaatgcccaaaagaatttccaccagctcttgtaatcttccgaagaggattcttgatctttctcaatgattgagtttgcaaggtgaaaacctgttttaacagagtaaaccccagttgtgttatggtgccaaataagctgatcctgcgattggtagaagattaagggaatggtaataattcgatcaatgtcaatttgtgcaaagtcttcttgaagagaagccatattccattccatagtgtcaagtatgtaagaagatacaggtgttgatggatcaccagtat

SEQ ID NO: 86498 - DNA, 583 bp, Cannabis sativa
tgtttgaagaagtttattgtaccgtgtcatatcttaaagattgtgctttcttttgtcctgcaaaatttatcaatataagcaatcaaaattgaagttgatgatgcacccaaatgaattataaataatccacaaaatagaaaaaaaaaaaaaattggaatcttagatttataagacgccacattatcgtgcttagcattaggaatatatagatagatatcgattagcatagacaaatatatatatatgtatataatttcttagtcagaaaaaaatctctaaaaaattattgaataaataaaatctcctatttataaattaaaatataagatttgtaataatactccttacaaaaaagaaaaaagatgtctaataatgctaatgatagctttattagaaaatataaaaattaaataaatatattatctatttagtatagtctaatgatattgatttatagctttcttatttaatgatattgatttaggtaatgaacaatatggcaataaaatattgtatatgcttctttttatagtctaatgatattgatttatagctttcttatttaattttattttcataggac

SEQ ID NO: 86499 - DNA, 1793 bp, Cannabis sativa
tgctttacttaaattctggtatttttttctctaagcatgtttctgtgcactttgattttcttatggtatccttattaaagaatcagacagatggttattccatgtagctctaatatgaattcattagctggaaactgcaaagtgattaatcacccagaaactaaaaatttatctcatctcatattctcattgtcatttttaaaaattaatcctgcagctgcccaaggcatcagttctcgacccggacaacttagaactatggttgaaggtgggtggtagtttctctttctcatttgctttataggtagctcagattttatattgatgaactcaaaactgattgaccataggtagacgaagaaataaggcagaaagggtcgaccaaggatatgatatttaagatcccatatctcataagccacataagctctttcatgacactttttgaaggggatgttatacttacaggtatgttgccctcttcgtaatgctcccccattttgtttttttttttctcccttttgtacttgtgaaaatgactaatgatagctcatattatacaattgaacaaccataagaatgttttacaagatgtaaaaaatgagattattttcctaatttatttacttagaatgcagctaattatcattgattcctcaggcacacctgaaggtgttggtccagtaaaagcaggccaaaagattactgccggcattacagacctccttgatgttaacttcaacgtcgagaaaaggaagaagcaatagagttcacccatgtcttctacatcataaaatgcctactattttgtttgcattttatctgtctgctaaaattgtttcaagacaactttattgtgacactcaaataaattgcgggggtataataagcttttgcacccaacaacattgtctgtaaattccatccatatggtcagaattttcattaagaagaacacaatcacttccatttaaccttatttacaatcataataatcataaaatcaatgtttattcctcaatgagaatacaaaaacaaataaaaatgtgtaatcaaaacttcttgaagaagtcataaatatgtgtggtaatctcatttggcctttcctcattgataaaatgaccaacaccttccattattatcagctcttgcagaaaaggcacatctttcttgaacccaccattgtgtatgtaatcctttgcattaaaggaattgtaaaccaggtccaactcacctactataaacttcactggaacttttatctgtgtccctgtccatggcgccaccagttcccaatttctggtaccaaaaacaataacttaacacaatataaattttaaccaatacccaattaaagaagattaaactcataccgatcaatgtttcgataatagtttagccctccagtgaaaccagtcttgtcatatttggttacataatagttaaaatcttcttctgataaccaagaaggcaaagcaatcggtggtgattctaaggcttttcctttgggccaaaataatgggcctggagttcgatacgttagaatttccttcaacactttctcagtaccaatttgggcaaactcttcttctatgattccactctcctatttttttttaattaatcaaaattaggaatgtaataaacattaattaattaattaattaataataatactgacctgaaatctgatatgtaataatcgtggccacagacagctctcatggcactgaggggttttctcctagggttcctgggattaaagggcgcgctcatattgaccaaagctttga

SEQ ID NO: 86500 - DNA, 815 bp, Cannabis sativa
aggttcttcaatgacctgttcagtttcttggatagttgggctgtgactttgatcactagttatactaggaggatagtcacttatgggagagttagtaacagtggaaggggggagaactaactcagaaaaaggatcaacattagtaacactttcattaattttgtgaaaaggaaaaatattttcatgaaaaacaacatttcatgatatgaaaatttgtttagtgttgatatcataaagtttataccctttaacaccttgaggatagcctatgaaaacacaagatctagctcgaggatcaaacttggttttgtgcacgggtagaattgaagcaaaaaccaggcagcctaaaactctcatatgagtgtaatctggttcccttttgtagagcagttcatcaggagttttattctttaagtttggtgtaggagtgcggtttattaggtaggctgcagtcatgatacactcggtccaaaatttaattggtaagtgagcttgaaagcataaggcacaggccacattaagcagatgctgatgttttctttcggctactgcattttgttcaggggtatcaacacaagtaaagtcatgtaagatgccatgtttagtaaataaatctttaaaaacaagttcgagagcattgtcagatctaaaacacttaatcatacaatcaaattgagtttgaacatatgagatgaattgaggtatgacaattaaggcattcgatttttattttagaagatatatccaagtaaaccttgaatggtcatcaacaagggtaagaaaatatctaaaaccagagtgagagacaacatggt

SEQ ID NO: 86501 - DNA, 1375 bp, Cannabis sativa
gagagaaggctaacctgttgaaacgaacatgattgaaaaaaccatgatgacgacgaggaaaaaactccaacttgattctttccatgcccaattcatctaggattgtaacaaagcaaaaaaaaaatacccacttcaggcgtcgagttttcttctcaatagaatgtttgttcttctgtttcagtctctggaagggagagagagagaacagagagtctattacttacagaataaggtgagtttgagtggattagtggactttttaaggttgaagcactgttaaacgtatatatatatataaggttccacgccagtttagcaaatgggggatactttggttactttccctttcgttttcccttttttttcttggttagtaacgtttattttaatagtttattactttatttgtgtgctctgcttgtacaagttttgcttttgtttttattttggggtgtatattaatgagagagagttaaatacggctaatatagtgaattggagacagttgtaaggatataagaggaaaagatgtagcaacactttctagaaaataacaactgtgccattagagtttgactgtgtctgtctctgtgttctcgagaaaactagagttaatacaagcactttcccccatataacgcaaactcactcttcaattcttcatgtcttcttctgcaatgttaaaacttgtaattcttttacattttcacttcaagtgttttggtgtaagatgtctcggtccccttaaaattaattagtaataagaataataatctattaatcgataatttatttccacatagaaccgggactaagtctataatatttggttctttgtatttacttttactttttcaacatctcattgctaagattaggggaatggaatgatgtatatttttcttaatttccaatatagagataaagatagtccaagctgttttggttgattgatttttctcctattagaaagaatacgtgggggtcattttctccaaaaacccaatgttacagaaaattgctcttttttttttttttctcttgcctaatatttttttaagaattattttataacattggccagtggccactgaatagctattgaaaaatacattaggaaagtaaaaaagagaaggaaatcttgaataaataaggaaacgcggcgattatggagatcttgggccaaatgagtaccacacaaacaaacagtggaaacagctcatgtgaattgtgatgacgtgtaattaaaagctccgctaaactccgcgtatttgccaagtgtcattcatatagtggttatatatttaggtttgcctaacataataagttgagttgagaataatacgaattttcaaatatactagtgacctccctg

SEQ ID NO: 86502 - DNA, 593 bp, Cannabis sativa
ttaagggggttctctagaaaccatattgatgtcattatacatgaagatgagtcgcgactttggaggttgacaggcatatatggtgaaccgaaccgtgctttacgaaggaatacttgggatctgttttgttctctgagtttggaaatacatctaccttggtgtttgattggagacatgaacaatcttgggggtcaagatgagaagaggggaggccgaagctatcccatgtggctagtggatgggtttcgtaatgctcttgaccaatgtgggttggttgatttacacttggaaggttatccatttacttgggaaaaaggcaaaggttcaagtaattgggtcgaggaaaggttagacaaggctctagtgtctcattcttggcttcaattattccctttggctaagctatataatgtggagatttcaacttcggatcattgcccaattcttttaatgcccgaagcttacgcttttgggacgcatagtcgaacgtttcgttttgagaatgcttggttgcgtgagcctatgtgcaaggaggtggtgaggagtagttgggaggggttgagtggccgtggcttagtggaaaaaattgaagg

SEQ ID NO: 86503 - DNA, 648 bp, Cannabis sativa
gtagacaatggtgtgcaatggaatacaagaaaatgttgaggtgaagcgattggactacaagtgaaatgagaaatgcagttcaatgtttattttcggtgcatgtttccgctgagtgcaactgcattacacgatttacttggaggcactgtaagtaacaatttatctaaaaactctcactcaatggcatatacattttaatttctccaacttcaatctaatcaaatatggttgagatgttccataaaggatccaaataacttatgtaaacaaaagaactccataaagtacaaagaaataacttagatcaagagtaactcaaaaagtaacaaaaaaagaacttaatgcatagggaaacccatcaatctttgtaacttatttcttcaaaaggattgttgggttcatagtccacatacctccagtagtatatttatggagttgaatcatatggctcttgtctttaatattaccacgaaactagctaccctcaaggcgccgctcgttctcatgagccggtatcttgggcccggctccacgagaacgagcatggaaccaggaggtagaagtgttcagctgcggcattgtcgacggagaagaaatcaagggcagggattgcttcagatcctaataataatgcaattacatgataaa

SEQ ID NO: 86504 - DNA, 1076 bp, Cannabis sativa
cagtattcccttggtatccattttgctagtactaaatttgactctacaacctttaccaagaacgcaatactctaactgctcaagttttacttttctaagtaatctttgtttgtttagttcatgcaatcctcttttactaacatggccaagcctcttgtgccatactttagttttatttatgtacttgcttgaaacacacattttgtaaaactcgaaactcgaacccgaaaaacctgaaactggccaaacctgcctaatatgtagccctaatatatataccaaagtatactacactaattaattgccatgatttttttgtactattactctatatattcaaagctttttatttgtatataaaaaaacaaagttagttgccacaaatcaatatacatggactttatctaatattaattacttgtttcaattgctttaaagtttaaatatatatatttgtgggaatttcctttagccacatatatataacataggagagtcttaatcaaaaatatctgcagctgtctcacccgaggtacaataatattaagtatgatttgatcgtataatatgtaacatatgtcatatattatcaatcacttttaattattaactaattatatatatacatttatatatatgggtaagtttagaaataaaacaggcgattaataaacataattttatattatgtagagacttcaaaaattttaataaaacttacaaaattaatttgatataataaatatgtgaaattttatattacgtagagacttcaagattttaataaaacttcataatattttgtttttgctaactaaaaaacttcattcaagaccaactaaagttctgaacgaaaaagttaagaataaatgtatttttagttttactcttgtaaccattaaataaatacatcaaagaagtttaatttaataactttttaatcatacataatatacatttttttaaggaaaaaaaaaaagctaaaatgacgttttgttaggaagaatgaaaatatagaataagaataggaataggaataggaataaaaataaggataaaataaaatttaaaatgca

SEQ ID NO: 86505 - DNA, 818 bp, Cannabis sativa
  modified_base (400)..(404): a, c, t, g, unknown or other
ttcttataattagatttgaaatatgaaaagtaaaaataaaaatacaaaactacacaaaaaattggaaattaattcaatgaaatagcatgaaaaatcgaaaaaattgtgcgcgcccacaaagtgcaaagctgagaaaactcggcgccagaggctgctggcaggatttccgcgcacgcagaacgggacttcagacatccctgcacgtgttccttcggacaaaacgtgtccaaacacgctgctgaccgagtgcacctcggttccgcgcgcgtgagggagagtgatcactctatcctttttcaaaacttcaaaaaatcataactaaatcaaataaaatcgaaattaagttctgtaaaacggtgaattgcttaattttttctaaactatccaacaaaaataattnnnnnaacaaaaattcaactatttttcataaaatttcacaagcatcaatcaatcatcaaataacatacagatcaacatgaaaccatccaaatcacacacaaatctttttaagtccaaatttcttgataataaatcaattatcatggctctgataccagtttttggaaatattttaccaagatcatagatttactaacaagtatgtcgtttaaacatcataaatatgaacttttaaaacgatattaaataaacacttataaagtatgagaaaccttacagtggttgtagtagaatttattgtctccttccacttagatctctaaccattgtatcctttctgtcggtgagtatcaccaagatctgagcttgaatgtccttctcttgaatctggattcttcacaatcttccacactatgatt

SEQ ID NO: 86506 - DNA, 872 bp, Cannabis sativa
tggtcttctaagaagcaatctgttgtttcaagatcaagcacagagtctgaatacagagctcttgctcatgtcagtgctgaaataacatggattgaatctctgttgaatgaaatcagatttccacttcctgctcctcccataacatggtgtgataacatgagtgcaagtgctttagcctcaaatccagtttatcatgctcgcacaaaacacattgagattgatatacactttgtgagagacaaagtattgaacaaagaacttgaagttagatatgttccctcagcaatagcagattgcatgacaaagcctctctcacactcaagatttctctacctgactgccaaactcggagtgaaaaactcaccctctcgtttgaggggtggtgttaagaatattgattagttatctactgtgctaatactctgtttttctactcttttctcattagtagttaattactgttttattaatgtttaagggctgtacagattcagttaagcttgtttcctttggctcctacactagggccacttgtcactctgtaatttgttcttgtaataccttttcagagtataaatacaaaatgatgtacctcagcctcctttgagctgagaattgtcttcaatccttttttgtgtatatttcaacttggtatcagagcgttgtcggcccgtgccaatgtctgctcaatctcagactcctcagggaacaaccacagctgcagcaggtgctgcaagctctccgatgaacacctcaccgtcaaattatactcaacccttcaacactctaaatcaaccttttcccttgaaactcgatcggaagaactatgttctttggaagacaatggtctccactgtgatcaggggacatcg

SEQ ID NO: 86507 - DNA, 879 bp, Cannabis sativa
ctatatattttctttcaaagttatatatcttaattaaaataaaaaataataaagggaactagcaataaaaggagcacaagtactactaatgtttcctatgatgagatctcaaatcactcaccaagagaaagattgtgaaatatgcgttcccagtactattacaataattaagactagatcgataataaaaggaatgttaaaaaatatataaattgagtaaggatgtttattttattttaaattaaaatatataaaaattgtaaggaaaatcttacattttgcatggaggggatatcatgagattctacctacgcgtaatgatttctttagacggaatatcgcctccagcacctcttgccaactatgtggttttggaggagagtcgaatgctcatgtaatattctggtgtcctgttgcacaaggcatttggaatcttatggaattctcttttctacatgaaagtaaaagaagagattaatttcaaaaatattttactttatgcttccgaagtggtggaaagagatgcttttgcaaagttcattatatgttcctgggcaatatggacagaaatgaataatattactcatggccaacagataagacaaccacaatatgtggttgagtggataattagttattatgagtcgattatttcaatgaaggatggttccaaaaaaagtctccaaactagtgaaaggaatagatgagctttagctataaattctagaggtgctcaagaagagagtttacactctaaacttatggtaaatgaagcggtattgagcaccacaagtttagttggattaggtgttgttatattgtcagaagataatagagtccacgttgtgttgagcaaacccctcaaaggttagtcatagt

SEQ ID NO: 86508 - DNA, 665 bp, Cannabis sativa
atgagtgattttcttgaccgtgtcgaaggcttcatcaagctcgaagaagctattcaatgagcgaaaggtgagcaaaagagtggcaagtcaaaggctcctcctactgaaacatccgcccaacttccccactacccaagtaattcgagctcaagtggtaagcattccaacaacaaccacaagcaagggaatgggaagaaaggaaagttcactagcaaattcgaacaagctccccgggaaaaccatgccaaatacactgcattcactattctgactgaagatatagaaattgtgtacatggcaactcagttgctggccccatataagaagctcaggctcttgaagaaagatgccagcaagaaggacatgaaaaagttttttcggttccacggagactacggccacgacactaacgaatgtcacaacttgaagcgggaaattgaattcttgataaggaaaaacaatccacacctgcagaagtatgttaggaccaattagggtcaaagagacgacaataaccaagatttgctgcctccaccggtagatggacatctgcaagtcattgtcgggggaccgcacattgcttgagattcgggcaaagctcggagaggtatgcccgaacagtgcagcacgagcaagaagaggttatcctagccgtggaagaaagg

SEQ ID NO: 86509 - DNA, 782 bp, Cannabis sativa
ggccagtttttctagcctcgacagacaacgtttcgagggcttggctcgaggaggtagaagcttgggtcgctttgggaagaggctcgtcggtacttttagggatcggaggaggaatcgaattctgtatttcaatttcagggacctcaagattaacggtcttggaggctcgcttcttgttagcaatggacttcttatgccttttaggggtttccacgtcaacatttgatggagcctcagggatggtcctcctcttctttccctttcagtgaacgagaccctcaaaattcatttctgtgagataagataaagtgttaaacatgtatagaaagacaaataaaagtggagattggggcatagtttcctgcataaggaatttaccataatcactagaagatgaggaagtaggactataatatccactaaaatccctacaacccgtgatcctgaatatatcatagggattaattggttctaaattcctgctctagtctaagtgactcgccctatccatcatagtcccgtactgctcggctatcccgtagtacgactcagtacaactaatttggacatggaatcttggatactaactatcaaatctatgcgtaatacgatctacgaggaggggatgccaagtataaaagttataaaggctatcttgaaatgaaactagagtgttacactcgaccctgagcactgtgggtgaccaaccacattgattacctcaggatgctccttctttggtttcccgagggacattattctggaggtattatgcccgagcc

SEQ ID NO: 86510 - DNA, 817 bp, Cannabis sativa
gtcattatctttggaaatcaaatcaacctaaagataatcaacttaacttggtaatttggatctttaaaatcaacaagctgtactttcacaaataattaagcgcgccttatcatcctttttggaaaggaggtacttaagggcggagtgatcggtgaagatcgtaataggtgatccagtcaagtaagctcagaatttgttaagaacaaagactacggcaagcaactcttttttagtagtggaatagttcatttgagcactatttagagttctacttgcatagtagacaacaaaaggtttcccctccctttgttgtccaagatcagctccaacagtaaaattactagcctcacacatgattttgaatggaagagtccaatcgggtgattgaataatgggagcagaagtgagtgagttcacaagtgttcgaaaggactcctcacacttcagtgtccactcaaaagtagcatctttggctaggaggttgcataatggacgagaaatcattgaaaaattctgtatgaacctcttataaaaactagcatggcatagaaatgaccggatgtatttcacagtcttaggggtagacaatttagagatgaggtcaattttagacttgtcaacatcaatccctcttttagaaacaatgtggcctaagacaattcaagaagataccatgaaatggcacttttcccaattaagaacaagaccttgctcgatgcatcgttttaaaacggcttcaagactcagaaggcatgtgtcaaaagattttccaaagacggttaagacatccatgtaaacttccatggtgttttcaatc

SEQ ID NO: 86511 - DNA, 1875 bp, Cannabis sativa
  modified_base (43)..(76): a, c, t, g, unknown or other
  modified_base (1844)..(1849): a, c, t, g, unknown or other
aaccatgcaacataaaatgttgtttctgatctttattaataannnnnnnnnnnnnnnnnnnnnnnnnnnnnnnnnngggcacaaaacccaacaggataatcatatttaaatacactgaaatgtatttgatcaccatcgaattcgatcgttaatattcttgacttgacatctaatttcatactcttcgttctcataaatggtctacctaataacatcgatctagtgcatggaatagagtcttcttccttgtctagaatataaaattcagccgtgaaaaccaagttttttaccttaacaagaagatcctccactactcaacaaggatagacattagatcggttgaccaattgaatgactattccagtttcttttactggcctgagattcagcaatacataaatagaatatgacatgacatttatagaagctctcaaatccaacatacattccccataatacaagggatcgtaaaacttagatcttcacatttaggaggaagtttctttttacgaatcgtagacacattctcctacacacttattttttcttcccctttcagcttttgcttgctcgtacataattcctttaaaaattttgcatagcgaggtacttttctaataacatgaagtaatggtaaatttacctccactttacaaattgtctcaaggattgctttgtcaattacagctttcattgctttccttaatctacaagggaatggaggaataagaacataagtaagcagaggaagtttaagcattggtgcttccttgggaggttgaatctcatcctcttgtggtgatggtgcaaaaatagattacatggatgaggaaaatggagttgatggtgcataacttgtgccacttctcaacattataacattagcacgagctcttggaatttcaataggttgagaaggaaatctttcaaaaaatttggcttttatcttggccgtagatgaagccatttgtcctatagaatttgccaaactcttcaacggggcttcagttgtccgttgaaaccgtaatgaatttttggccaaggaagtaatcaggtcttcaatagagggcttggaatttgatagtggtgcttgttgtgcttgtggcttttgttcatagtttaatccaggtggtctaggtggtgcagcttgttgtttgtttccataacaaaaattaggataatcacgccatccctcattatatgtctttgaataaggattatactgctgcctaagttgacctgggaaacctccaatagcattaacaacttctgttggcccttcatatacattttgacaagtatgagtagtatgcccccacaacctagcatatcctacaaggtcgcgtttgttggcctaaagtaagttgttgtactatagacactaagtgagcgagttgttgccaaaatttgtggtcaataggagcgctcactttattaactttctttggtggcataacatcttggtgaatgccaaattattgtgagttgggaaccatattagaaatcaagctcctggctactgtaggagtcctgtcaactagtgctcctccactagctgcatctatcatactcctatataatggtaagagaccttcataaaagtattagattaggagttgtttattgatgtggtgatgaaggaaactagcacactatcgaaacatattttaccaatatctaaatttactgacatgtttgtttgattataatctataatctaacatcctaaatatgaatggttcgccaaggccttcaacacaacacatgtttggctaacctctaaaatacactctctcatagtatggcctgccagaccctagcacatcctgttgggttttatgccnnnnnnaaaactctatttcaatgtaatccaga

SEQ ID NO: 86512 - DNA, 577 bp, Cannabis sativa
tatattgatgaagcaaattgaataagaagatgggtggttgaagcacaatggaccctaggaagtgccatagaagctttctcatcaaaatcattaatagctaaattttgaccacgcatggtcccccaaaataaatcataaataaataatgttggtaagatatgtggatgtatctattttatattaaatgtgactatttaatagaaattattagttcaacattatttttttccggttaaaattaacaaaatatctaattaacactgttaagtcaattaataaattattattatttttttaaatatttaattttaatttaaaagtattaacaaaattaaataattattttttatataaattataatttaaattgaattagacgttaattcaattgcatattactaacacttagtaaatatatatatatgagttgttattagatatcagtagtacctaacattttttataagccgaggtgtcctattattagtgtaacgtccccgctttggcttgaagcagggacgttacattagacaagagaaaatatcacaggtgaatataaagtggtttgaatctttgt

SEQ ID NO: 86513 - DNA, 797 bp, Cannabis sativa
acctctttttatagtgtttagattatcaagcttagaattcaaacataccacacttcatttctttcacataaaataagtattaatccattttgtaacaactatatcttcatatttttgaattctttaaatcaaattgtgtaataactcttttatgacacaaattatgtgtgatcaacaaaagagttacaagtgacaataaattgtaactcctctccaagttacaacatatgtatgtaggctacaaagtggaggttaaaatcacatgccacatatttatttatcatacacttaatatatattattcacacaataatatatttattacattttaatctatacttattatattatcaaataatataacaatccaccactaaattaaaatgtgtgccacagttataacatttatttaatcaaataaacatcatatcaaaatataatattatcccactttgattgaataaatatatacttttaagaagtattgcttatatgcattagataaaatatatttcgacttgaattttaccttagtgtagttaccacaaaatttgataaaattttaagtttcgtaatttctttagtataaaccaatgataacacacacccttattaatatttacttgagaccgcatgtctcactcttgcacccgttaatgaccatgtgtaaaattccaattgatggactctctagagaataactctcaattcttataagaggcggtaccatctctagtctatataagtggagttttagtgtctcacaactcttagacacttcttaagcttaagtgagt

SEQ ID NO: 86514 - DNA, 594 bp, Cannabis sativa
aatagtttggtgattgagttttggagatttgtattgatatttgatttaattgagattttatatctctatggaatttggtttgttacagataatgaatgaatactaaatagaatttggtttgttgcatggcagtgtagtgtgctttactaaaattgcttctccgtatcacttcatttactaagtttaattagattttgttcatatgctatcatcaattctagaatatgaaagctatagtcacttattgatactagatcatttggctgctattttggtccgtttaaaagtttaagctatagattggaacaggattgtgttctatatgtccgtattcatcaaaatcaaggttttcttcttcttcattgctcatatatggacttaattgttgagaagtaattattgttattttgtttttcatatcgattactgtttttgaattttgatttggggagatttacttctttagggttatgagatattgatttggggcaatacccttctttaatgaattcattattcttcaaaagatgtatttttttttctcatcatgatactcctttgacgacgttagtaaaaataagaaaggactgcaga

SEQ ID NO: 86515 - DNA, 500 bp, Cannabis sativa
agatcactatttatagggctatatacatgagagaaggtttcccttttgcttacaatatctataattggttaatacattcattacatattaagaatacatgaaatgggagattaagacagcatgccatatccctttgatacaatcccatgattgtagggattgcctttgtgcttgggcttcacgataccattctaaagtagtcaagtcttgacacggctcggtgaactaacttttttctttgctcagataattttccttttgccctgttcggctaggcagactttatgcgtgtagatatattgcttgaagtctgttcggtatacctctctgcccaagtgcaaggaatgacagacatgtattactcgtacatgctgccacgtcatagtgtcaaaaatgggataacaagagccaaaatatagcaatattatataccgaattgaagatctagacgagatgaatctaacgctgtaagaattgcctcaatcggaggtctaacgcac

SEQ ID NO: 86516 - DNA, 1590 bp, Cannabis sativa
caagaaacgtcaaaagaatagggtggaatcacccgtgacaacttctacaaattactgaacactataatgaatcatgaaaatagatgtaatgaaaatcttttaggggttgtttggtacgcccgtattgtattaaataataaataacaatatgtttggataaagcaatgtattatattaattattacgactaaaatttttaatacaatatatgttgtattatttaatacataacaaatggtttgtattagcttgtattataatatttacaaaggatttggggtcaacaccaatctctaattcggacctgggacctagacttggacccccccgaacttcgacctggacctcggactcggactcggacttcggacccgaactcgggacttggaccccgacttggatcccaaacccagaccctgacccgaaccgggacccaaacccagacctaggactcggacccggattaaataatactaatacaatacaatataatatattaatacaagtcaataccaaacataatattgtatttaataatactaatacaatataacattgtttcaaaaaaaaatacaatataacataatccaacacaatacaatacggtgtaccaaatgagcccttaaaggattcattaatcaaactaacgaaagagcacaacaaacaacaacactacacaaccggcaacctcaccccaccccaaagttacatcttacaaacaaattcaaaactagctttgtcaagatattcatcctatcaagctttaagagaatgttaattttcttatctaactaagaaatcataaacactttctgttcattccaccaaatacaatataccatcctttaaaaagaaaaatacaatataccacagctgccatggtcgctaccgtaatgtaatgatatttttggttttcattttatttgtaggtaattgtggcgaaatatttttatattttaatttctatgcactattttttcttgtgatttaacttcacattctttaaatttcaagtactagttaaattttattattaaacgctaattgagattacacaaatacctcaaatttaacaataaaatttaaaatatttcaaatttgtaaagaaaattgaaggtaaagggtaatgccaaacaaaaaaaaaacaaccaaaaacacaaaacaaaaaaaaaaaaatcaatgattaagtgtacaaaatcaaaaattaaaagggttttaccgccagttactttttatttaaatattatactttatataaaaatgtttattagtgttcactgtattagtataaattttttttttaatttttaacataatattgttattatttggcgtaatattatcacttataatgtttttacttttaaaattaatatttttttaaaataattaattttgattaatattcattttatttattatatatattttttattttgtattacaaatatgtagtgacgtaccagatattaaagagaaattttattttttatacttcataaaaatttaatttacaaaaaataccatattaatttttttatacaatactatcctaataattcctcattttacccaaaatactcttaccat

SEQ ID NO: 86517 - DNA, 1609 bp, Cannabis sativa
atattatgacaaaaaaattaaatttaaaagttatatgaaatagaacttagaaaaaaaaaatatatacatgagtttaaaaaatgatgaaagagaaatcaaaataagtattgaaattaatataaaataatataaggaaataaaatttatcattttatggggtgtatttaataatagggtgtatttatcattttatggcgtgcaaatagaactttttttttttttttgaaaaatgataccctatctgattttattctagttaattactttattattaatttatttaaaataaagtaaaatctcatagtaaaataagatgttaaaaataattttttccaacagtttaaaattattgggaatactaaatatacccaacagtttataactgtggggaatacttagtattcccaacggtttataactgtggggaatacttagtattcccaacagatattaactgttggcaatcattgttaaattatttagtattgcccacggttctccactgttggcattggttttcccaacagttttttttgcttcagttctaaactgttaggaaaaacctctccttactttttccaacagttttcataattgacccttttattaaccgttgggaaaagccaattttgtagtagtgagatttctaacctttgcagcaaccgtactaaaacgacttaagtatgccttaagtgttttgccactagccttggtgacttgcataatgtggttgtatttggacaggtgggccctggggtccatccatccttcatacagctccatctatggcattctgaagcatttcaacattggcatttccatgattctctttcatagggcttcgtatcttcttcctcagaatctaggacagtgccactttggtttttagaaatcttctccgtgatcttcatcaactccccgactttacattccaggtattgagtcttgtcacttaaagattctctttcgtgaacaggatcattgatgtgatttctcatatcgttcccacgaggtttagcttttttctactttggctcttcctttcttagaattcaatcttcttcgaagatcatttgtgggaaggattctaccactgtcatccgatactggatgtactccgtcaacatcctcattgagattactggaatcagtgagaggatgcttatccatctaacactctggcttctaaactccggcatcagtcttatttttctacctgactctgcctctagagttggtctggtcaccatgccccggagcatggtttcctttcctcctctatttgagaatggtcagcagctttagacattttatgttgcttggtggaaggattctttttcgattcttcgatggatattcctttgcctttgtctttacgaacacctaaagttccaagatcttttggatctactttcttagaggcatcaattgttggagaagcttgtacgttaggaactatcttagttagaaggatcattatggcctccattttggtcatctttgtgaccactacctcgttgaattgatcccgtcaaattaaactactttttaccatttgaagttgttcagccatgatgaccatggggtctgactgttggaaatattttac

SEQ ID NO: 86518 - DNA, 650 bp, Cannabis sativa
agtcaatttctatcttcttttaatgagattttaccaatggaaaactattttttggagtcagcgtatgaggtgaaaaaaactttaagttcgatagggttgaagtatgagaagattcatgcatgtcgaaacgattgcattttgtatcataaagagtatgcccacatgcacacttctctagactgtggtttgccacagtataagcccaacaatagtaaggagatccagaaatttatactagagaaagtcttgtggtacttgcctttgatttcgcggctcaagcgctttcatcgaagtgcagaaacttctaaaaacttattttggcacgagaataggcaagtgaaagatggtaaactctgacatcctactgattcacaagcttggaaaaaagtatattatttgaatccagaactcatagctgaaccaagacatctacgccttggtttatctgccgatggagtaaatctacatagttctcttagcatctcacatagttcatggcatgtgctcctgattatgtacaaccttccaccttggttggtgatgaaaagaaactttacgattctattactaatgattttagggcctaaacaatcagaacacgatgttgatgtttatttggcaccgttagttgatgacttgaaagagttgta

SEQ ID NO: 86519 - DNA, 665 bp, Cannabis sativa
tttcattttaaagttcattcgaaataaaaaaaaaaaaaaaaacctagaaaattctccgacaatcgcaaatctccatcgccaaatgcagaaaactccattatctataacctccattgatgagatcttttgagcttaaaccttcagcaaattagcaaccattggttcattacctcaatcagaacataatcaaacaaaaaaaacatcatacagctatttgcgattctctgtcgactaatcgcagagcaactccttcgtcaaaaacctccattgatgaaaaatactcagaacttagagcttgcacgaaatagcaactgctaatgaatcactgcaatcactaatatcaacaagagagaagatctatcaagaagtatatacaagaacagaggataaccaagaaattgtgaagaacgaaaaatcttgaaaaagaaaagaaaggaaattgaacaacaaaggtatgtaataccaaacaatatatcttgcacattcataatctaaacaaattcttatttaatattctattattttgatatattaaacagataataaatcattccaagctacaattacatcttacaaacaagaatcctagacaaatcatatatatatatatatccaaggaatttactcttgaaaagttgttacttactgttatcaatctttaacat

SEQ ID NO: 86520 - DNA, 1176 bp, Cannabis sativa
  modified_base (181)..(181): a, c, t, g, unknown or other
  modified_base (858)..(869): a, c, t, g, unknown or other
taaaccataaacatgaaaaactacatgtaaaaatgacttctagtcttctattgataacaaatcagattatattaaaatgtgttttatttagggcatatattcccaacaaactcccacttgcactaacataaaacaagtagtgcgttttaatgaatctattgtcttgatatccagatcaagngtagtgtatttgactaaacccaaataacaacaactataagtctatggtaagcaaatgctttctccaccattacttccttcgttttcataaaacattatgcaacattattttctatatgcattaatcatctagggatactaaattttttattgtttattaagtgcatctgaatatatagaagacatatctctaattctataaaaaaatataatagagataaaacagtcaagaactttcttcagtttgaattttttttattacttttcataaacaactaaattatttagcctcactagtggaactaaattattatagatgggtgtttacatctttcttgaataattcctccaccccaagagtaaccactatcttgaatattctaagttggtgtagatataaggattctaatgtacacccctatcatctaacatataggtctttttcagagatttcttccttgattatctcctaatgttccttgtttggttacatcttagaggaccccactcaatagtaggagtctggttaagttcgtacataagtgtacacttagcctcttactacttgttctcagggacctcttattgtgacatattatcttagtctgaaactataagttccttctagactaactcctcaacatagcaatctagtattaacattaatgtaaaatactnnnnnnnnnnnnagtaatcattagagataccataaatattttataaggactagggatttttcctaagtcattcaaattttgtcggaatatcaccgcaggtcatgtgtcatcgattgaacattgacccagaagtgtgaggcgtccgacagaagcagcgtaaaatggaccacgtgaggtaccaagcgcttatagaagaagttgatcgccttttggtatgtggcttcataatggagtcattctacccatactggttagcaaatcccgtacttgtgccaaagccaaatgactcatggcgcacatgcatcgatttcactgattt

SEQ ID NO: 86521 - DNA, 1318 bp, Cannabis sativa
attctaatatttgttgttttttttgtagaaatggagcataaaaattactgagtatgttgatagcgattggtgaagttgttgcttatgcttgcttgggaatgtatgaaagtgttgatcaaattggaattggaaattccatccttattattcttcaactcttctttgcttccattattgtcatatccctagatgagcttctataaaagggttatggcttaggctcaactatttcacttttcatcacaacaaacatttggtaagtactaattagtctttcttattttatagccattttattaatgattcaattaatgattggataatgtcatttgattttttagtgagaatataatatggaaggcatttagcccagtcactattagcagtagtggtcatggagttgagtttgaaggcgctgttatagctcttttccatcaactattaacccgaacagacaaagttggcgctcttcgcgaagcatttttaaggcgaaattcgcctaatgtcacgaatttgctctcaactgtcatgattttcctcgttgttgtctactttcaagggtttcgtgttctttttcacgtgagatcgaagaatgctcatggacaacaagactcgtatcctatcaaattgttttacacctccaacatgcctattatacttcaatctgcacttgtttccaacatttactttatctcacaggtatgtgtgatcttgatattttttttttgtcataatcattttttttcgattaaaaagtttaaaagagcaccattaaaatttagagggattacgacaaaagtgttttaatatttgtaattgttacacatgaccctaattaaaaagaatgattgcaaaagtatttatcttatgattttgttgtagtcgtattattttttggttgttaagtgcctattaagcctgttaagtgtcagctcagaaacaggtggcgatatatttctttagcttatttaatatgtggttctataatatatcaccacatgtttctagctaacccatggccaaaaaaagtgtacgaccgcaataaaatcgcaagataaaatatttttgtcgctacttttttacttaaggtcatatgtgtaacaattgtaaagatttacgaaattttaccgcaaatatctcaagttttaatatctaaaagaaacgaacacctaatacattttaacacacaaaaatattagccaaagctaacaactaatacaccatttttattgatatattaaacactattttcttgctttaccaatcttacattttcttattattctccatatgcgtatatacagttgctctacaaaag

SEQ ID NO: 86522 - DNA, 1306 bp, Cannabis sativa
  modified_base (484)..(494): a, c, t, g, unknown or other
  modified_base (1236)..(1265): a, c, t, g, unknown or other
aaaaaaaaaaaaaagtattttgaaaaaaataaaaaagccccaataaaaaatcatgttgaatacacgtgcagagcacgtgtgcctcccactagtatatataaatataatgaaatctaacaagttcatcagcccaaaaaaatcgataaaataagttaaatattttcgtaggaaatcaactctaatagtcttaacatattttataaagtagttgtaaaaattaattttttaaaatacaaaatttaaatgaataatcgcacaaaacacaaagtccaaaaaatatatataaattatttattatataactagtaaacacttcatgctttgcggcggatgtttaaaatattttaaattatatataaaaaataaattatgtattttaattaatgataattacttaataaaagtatattaaagttttaaccttggaagatgaaggttatggctataagttcttgaatgggagcctaaggatcacaaaaggttnnnnnnnnnnnatgaaaggaaagagagtacatgggttgtatgtactcgagggtgaaattgtacttgtggtcgaggcaaatacactaaaaggtttagaaagtgatatgcaactatggcatcaaaggattggacatatgagtgaacaaggcatgagggaatcacacaagaagggagtcattgaaaagatttagacatgtgcatcaccattctgtgagacttgtgtttatggcaagtaacacaagatcatgtttacaacagctactaacaacacgaagacagtcctagagtatgtgcatactgacctttgggggccaagtagaatcccaacacattcaggtaaacacttattgatgacttcagtagatgtgtttggacatatttacttaagaccaaagatgagtgtctagaataatttaagatatggaaagttcaggtggaaaacaaaacaaatttaaaggttgagacacttagaaccgataatggtatagaattcatcaatagtaagtttgatagattgtgtaatgagcatggaataactaggcataggacagttataaaaactccacaatagaatggagttgttgggcgtatgaatagaaccttttgaacaaaatgaggtatttacttcttagttcggggttaggaaagctatattgggaagaggctttagctactacttgttaccttgttaataagagtcctaatagagttataaacttgaagataccttatgagatgtggtatgggaagatnnnnnnnnnnnnnnnnnnnnnnnnnnnnnnatgtgcagcatatgtacatcaacctgatgataagcttgatg

SEQ ID NO: 86523 - DNA, 986 bp, Cannabis sativa
  modified_base (689)..(706): a, c, t, g, unknown or other
aatagattttattgctttaatggagaatcgtgttgtttgtagcgccatttatatgtgcaatagcaaatgtcataaattctaatgatatctgattctcatttatgtaagtttgttatgtataaagtataatagttgctcattaaaaaaaaaaaaaagtataatagttgctttcgggaaggtatgtatatatattaattagggaaaggtatgaaaaataattttacacatgacatagtttttcctgaatcttacatattaaatagttaataagtgatgatttgtctgtctaccacatgattgtatatccaatgattcaatgtcaacaaatatatgtatatttatatatcttggtcgcagtcccaatatacgtacagctcagttgggatggattctctctttagtttattagatctaccaacatgttggactcaaaactgacagtttaagttctctttagcttttcaataaaacttgagtcttctatctctttctgatttcaaatccttctctctctttctcttttcaaattcgaacccttacacatagtaagttggtactcaatcatagtgcgtaagactgtgaagaatccaatcaattgaaggacaatcgggctcaaatactctgctacagaaaggatgcaaaggttagagatctgagtgtaaggactcatttaattccgctgcaaccannnnnnnnnnnnnnnnnntttatatgtgtttaaattccattgtttaaaaattcatatttaagatgttaaacaacatacatggtagtaaacaagagctgatgtatgttgatgactatagaggccatgactcccctaagattataatagcctacttttatatgtatttttttttttttttattaatgtgtatcttagtatgtaatatatggtggcccatcaaagttaaataatttttgtaacgccctaatgttaaggcacgatacagtgcttttttcaataattgtgcaatctttgctaa

SEQ ID NO: 86524 - DNA, 980 bp, Cannabis sativa
tatttattatattgtatgtcatttactacatcctgccaatagcggtattttgtcgatttatgatatataatatgatatgctatcaagttaaatgtgagattcaatttatgcaaaattaattaatttgtgcttttaagatatatatcttccaattgtaattaatggtgtagaattgcaactatattttgaattaatatcgctatttgaataaaatttgcataactacaattctaccttaccaaactctttatctaatcaactttctcatctcatcatttttgttatttttagttcacatatttatatcattttttatttataataatctttagtggtaatttacctccatgtggatacgacatagcccgtttactacagcggccgcagtgtaactaattgggcgacatcagtgtgtgaagctaagcatctttatttttgggttctacatggaatggaatagccttgaaaatgaaattatgttgtttaattcagccttgaaaatgaaattatgttgtttcaagtgcagtggatctagcactagtaatatttgaagtgtagctcaatgataataaaatgagtaataatagacatactcttaatttttacactcaaattaaatgttataatgtgtaatttatcattcctcaaatgaaaaaaaaactgtactatgtctatctgcattttaattggggaaagtattatattgaatgacccttttcaagtttctataaatccactttagtgaagcttcaaattatcattcgttattaaacaacatccatatatagacgtaattgtagtgacagactttttaccaggccaaacctgaaatttgtttattgtgttttatcccatttttcttctacataggcattcatatttatgttagacatttatttgtatagactaaaacatacatgattatgaataaagtgcggaattaataaatcatatatgcactataatttaaggatcgaaat

SEQ ID NO: 86525 - DNA, 682 bp, Cannabis sativa
  modified_base (427)..(427): a, c, t, g, unknown or other
actcactcctatttctcaaacacacttccacattcttaaacacatgtgaattcttatcacttcagtaaaagaattaagtaattacttcaaattaacaattgcatataattacagaataatttttcaaatacaccttactatttagggtcgttcatcaaactgctcaaattacctgtaccgcaaaaaaacacggtttgaaattctttgcggtgcggtcgctgtttgaatttttcctaaatcgcgcaatagcggttagatttgcagttttaaattgttaatatgcagttcaaatcgcactacaccgcaccgcatattataaaaatactaatttttatatttatttaagtccaatatgtgaaggcacagcccaatgcacactaattattgttttgttgaaacttgaatttttttttcatatttattttcnagtcttatggtatttttgacaagtattgctcaaactttgttgtatttatggtagtttaattatttgatgaagtccaaaccgtagaaaccgtaccacaccattttttgcagtgtagtttatgcagttttttagtttcgcgatgtgcgtacagtttgagaaattaaaaaaactacatgtgcaggttggtttgaaaaaatagtcaaaaatcgtaccaccaacaatgtaaacaacccctactattattgtcttaagctg

SEQ ID NO: 86526 - DNA, 3028 bp, Cannabis sativa
  modified_base (2983)..(2984): a, c, t, g, unknown or other
aaggccccgaaagccgctaaccaaacgagccacttcctcatctctaactaacttgaaagattagacccttttgccactaaaaacctctagtactcagacttttcgaatgtaccttaataagcaccgtaaggcgaaaacaccatgtcagtgctcttgtaaaagagatactcggcggctacattccgaggccggcttgcgaaagcgagatcatgagttttgaaagcttctttggctagtttggctgatgatatgatgacagtagggatgtggcctagatttaagtagaatattggaccgtattttcgtgacaagtttaggagagagatgtgaggactacttgtggttccgaattgatgaaggtttcctatgattggaagctttggagggcttggtgggagattaatgaaagttggtttcttctttaagatgaagtagtatttgagaataatagcaaggaagatgattgatgagatttgtaagaagggttctcttagatattcaaggacagtcgacattggagagtaagtactacaaatattgaaatgataatgaaaatattaatcactggaaattagtatatatgttaaaaatacataaagcaaaagcagctgcaaaatgataaaaaagaaaaagacttggagatgatttaattattgttacaaaacaactacttaaagatatttttaactacataggaaattatgccacgaacttttctttagttattttgcattaaaattttaacgttagctagctagggagatatgcatccaaattttgtttaggactttaagggcaacaaactgatatgaattttctatcattttagtacaacagtagcaaaagtagagataatagagctgatatattgatattggaatgaaaagagaacaagttgttgggtattcgagagacccagctctctcccaagagctaaaagctcacttaactaaatcattcactctcccaaccctttccaatacactcttatatatactacttcaataccccatcacaatgacccatttaccctcattatttaatatcctaaggcctaacaataattatttaacagtagtaattataggaaataatgagctgatgatatattgatagaaaaacgtaaagagtacagtgttgttgggtattcgagagacccagtgctctcccaagagctactgctcattaactaaatcattctctctcccaactctttccaatacactcttatatatactacttcaataccccattacaatgacccatttatcctcattatttaatatcctaaggcctaacaataccggccgcccgaaattcaccttgtcctcaaggtgaagagcaacaagcttctacaacagtctttgttcgtcttctgtcaaagaaccaagtcaacagatgcacgttgttcacactgcgaatgtgaagacaccatttaacaagcaagcatcgctcaaaaaaccatcagaggaaagtcgtaattctgcctttggtaggatgagcaagtgatcttcgaaatgtggcagcaaggttaggcgtcttcaaattggtacgtcgatggtctcccgatcgaaaagtagttgctagctgcatcaaaaggcccggataatgataatagtgagcatgaaaaacacaccatagtgtctcttcaatagcaaaaatagagttggcgggctctaattgctcgtgtagcgctcctcctctgtcaacaagccagttaagaaatggcactccactatgatagtcaattggaagacgtatctccaaattttatgtgtggcataacatatatctcggtatgactctaggaagagcactagtcgagctattaaaatttgtaaccgagcattgtagagcttgtcttctccattgaaactccttattatggccattctcagaataagttcctcaactctaaaagtagaagcccagtgtaaaggaaatacactggttgcacaagcataaaagagaaatatctgccccttactattaaatttctagctttgtaagtgatgctactgcaatccgtggtacaagaggttcctctgaaacctttcaaacaaactaacataatgttcccaagcaaaaggagcttgagtaactgattggatgacaagatgtggccaacttaaatagattaattcacaactaattgtgacgagtgcaccttctttagatgacagctgtatcccaacatcatagtgcaaatttagtggcaacaaggagtcacctcttaactccacttggctacccttgtccaaagcttgttctttcactcttttgttctttattctcaaattaatatttatagaaattgggtgccatagtctattctcttccactgacccaaatctatgtgcttcaatatttaagagagtgaacattttgagagaatactccgcaagtaaataaaacccatagtaaatggattctacactcacccctaccaatgagatatcacaaattccatgccaagaatacatgcatatgaaatgtatgacctgattaaaggccgaagcacaatcatctaaggtccaactcttgtgaagaagtttgtctaaaaacccctccaaataaaccaacctagtccagaataaagatgaaggaaagaaacaattaccagagacaaatgattgaaaggttggattagtctcttgaactgtgattaccacaaagttgacacttctactagtaaaaatccagcgagtagtgatcctccgcacttcatcgaacaaaaactccacccgtgtttcctttgtcctagtcaaccttcttaattgctccgtcgccggcggtcctgaagtagggtctataagtcgcaacccttcttgtgaccacgtgcgattaaaagacgatataaccttacgaggatcccatttttttaacccataataatctgaaacaaacattaggcccatattattactaactaggtgtaatatcctggaaaataaagtgatatttaaatagacatattttattnnatatgtaattattttggtaatggagtaagattatgatcttactt

SEQ ID NO: 86527 - DNA, 1109 bp, Cannabis sativa
agagagaaaaaatcacacacttttgaaatagttaggtctattttaacctattcaactctgtcaacgtccttctgggaatatgctattcagatggcaaataatattttaaatgttgtgtcatctaaatcagtaccacaatttttttgtaaaagcttattttttttgtctctaagcactaagggaattctctaaaaaataactttgggaattataatgccttgtgttttctagcaagtgcttgttgatagaaagctaaattgtccaaaatgaacaccttagacctctatatatagtggttaggatgatcacacttaaaaatcaaataccatgcacacatgactattgtaggttcttaattaggtataaattggattatttagggtggttggggtttacacaaaatctatgattgaaaactaaacgttcaagaccttttttgtccaacaactacttcaggcaacatgtcgcgcctagtgtaaattccacaacacctttttttgagttttgtaactcccactttgaccaaactaaaaccaaacatttctaactcatttataccatctaaatgagtattaattcaattctcctaacaaccatataaacatagatttgaattccaacaattcatttttataataactcttttattacacttaaattatgatcaagtaaagaaaagttacacatgataacaaattgtaactcctctccaagttacactgtaagttacaaaatgtagattaaataaatcatatcttatataatttattcataagcacttaataaatattattctcataataatatatttatcatattttttaatctatacattttatattactaagtgtttggaggacatgccctagacacgtaaccccgtcaaaacttatgatgctataaatacaaaactcaaaagaaaagaacaaaactcattgacaatcattcaaaacaaaaaattgatagcgcgcctggtataggttcacttattgacaatcatacataataaaaaaattgatgctaaaaattgatgtaaatatatcacaagttattttttgccaaatataatacaatttttacatatctccagggccggcccaagcattttg

SEQ ID NO: 86528 - DNA, 522 bp, Cannabis sativa
aataattttgacttagaataatcaataattggtgaatgattccttcataaaacatttagaaaattaaattatcttttcaacggtaccaagatctttagaatcaaattattattcagagagatatttgaattttactgagacaacttatatagaaaatatgaaaaaaaaaacgatttacaacaaacatcatagaaatactaatttttgatatagataaatttcgatttagtaaaacctctcttcataagaattatgggcaattcaataagctttctacaggcactaggattgtaagaatcggatgagtatttaaagtaatatgatagttttactgagacatatttcattctgaaaaaaataagaaaaggagacatacaaatattctcctattgtgatcaataaataagtaaatgtagaatatcttaccacaattacatcaagttgcccgaatcaatagacatgagatgatggcaatcaaagatgagagtgaagagtggtatagatttggctaaggatgtaatg

SEQ ID NO: 86529 - DNA, 902 bp, Cannabis sativa
tggaggcttgaagcggggacgttacatggacggtattggtgattctaaccttgaactgaaggatctcaatgtcagtggtagtcaaaattagtaatatcattcaacaaatgcattatatcatcatgactccttctaaacaaagcctctccagttacctttgcattataatccatccaaatttttgtttcatcatccaagctattataaaagaagaaaataatacaactacttgaggaactgtgatagcatctctctaccagttcattaaatctccccaagcagaatagaatggctcattgtgttattggagaaaactcactagcaaatttaggtgtaaatttttttttatgtacattgcaagttaaacacaataaaaacattagtcaaactaaaataaaaagaccaaattagaataaaaattaattttattgatattaataaaataatccccgacaacgttgctaaaaatttattaatgtaaattcaacacataagtatatgtatcgtttataagtaataactcacctgagtgaggtcgatcccataaagactgtagctagggttttagggttagtaacaagtgtcaggttgttggtattggtaccattgccatcaggagctatgatggcactatcaaaactctcagtaatgttaaacacattcctgaattaaagagaaattcgatatctcttggcactcttgatgatgaaggatttgagtacaaaactggtaagggaactatgaggatcactaagggttcattacttgtcatgataggcattaagaagcatggtttatattttctggatggaaaaacaatgacccatgcacaagctgcagcagtcaccaaatgcaaaatcgattctaagttttggcatgctagattgggtcacatcagtgag

SEQ ID NO: 86530 - DNA, 647 bp, Cannabis sativa
gtactatttcttttacataaagttttacatattgatctactgaatacattgtttttactagcagaaagtgtgttgatttggtaaactgacccacaattatccatatggaatcgaacatacccatggtgacatcctcccatttccactcaagaagtgtcaaaggctgcaacaaccctgcatgtctttgatgttcagtcttaatctgctgacaagtcaagcatctagtcacatattccaccacatcatttttcatactacaccaccaatggtagggttttgaattttgatacatcttggcagtatcgagatgtaatgaatagggagtggtatgagcttcatcaagaatctcatttctaagttcggtactactcgaaactcgaactcacgttttataaagtaacattttgttacccgacacagtgaattctttagcttgaccagctaagaatccatttcggatcttcaccaattctagatctaccaactgagcatttctaattctctctaacaagtctgattgtagtgtcaaattttaagtctgccaaccacaaattcaatacttgatttgaccatatccactgctaattaagaggaaatcataatcgtgttcgaaacctccagggcctttcttgcttagggtatccacc

SEQ ID NO: 86531 - DNA, 609 bp, Cannabis sativa
tccttagctttcaacaatgttattgtcggtatgcgtgccccctgaatcttacccacgaacaccgttgggttagcactattgggctcaaacaccaccatcttccgcttatagttaatcgttgccccatgtttagacagaatatccattcctaggattatatcaaagtaagacagttgtaattcaattatattggcgatcaactcacagccgtcaattcaaaaagacaaagaccgaatccacctagttgatactataaggtctcccgagggtaacagggttccaaaccccaaagcataaatatcaaatggcttatgaaaactttcaataactctactcgacacataagagtgagtagcccgcgaatcaaacaacacagtatatgaacaaccattgatagacaactgacggactagcattagcgtcagcttgagtcatggttaaaagttgccccgggttctgggtagtattcttcctaggctcctctttcttgtcctgagggcaatccctaataaagtggcccaccacgctacattagaaacatgccttggctcgacactcaccaggatggtgtttcttacatttaggacactctggatatgatcggaatga

SEQ ID NO: 86532 - DNA, 612 bp, Cannabis sativa
gaagtgtcctctgaacaagagacatagagtttgttgcgaaaaacagagaacttattgcttgagatgggcttggtaaggcagtcggctagctgatgttcagatggaacatgctgaacttgaagttgtttgttgagaaccttgtctcgaacaaaatatagatcaatctctatatgttttgttcgagcatgaagtatcgggttggctgctagcataaccgaactgatgttgtcacactaaaccaatggtgaaggtgtaggaggaacatgaagctctgttaacagagattgaacccaagtgagttcagaaacaacagctgctaaacttctaaactcagcctcagtggaagatctggagattgtaggttgcttcttggactgccaggagattaagttttcaccaaggaaaacacaaaaaccagtagttgatcttcgatcatcagggtcaaatgcccaatctgcatcacagtatgcttcaagttgcaaatttgagaccttatttagcttgagtccatagtcaagagttccagccaagtatcttagaatccttttgactgcaacccaatgagattgaagaggattatgcatatattgacataccttgttaacactaaag

SEQ ID NO: 86533 - DNA, 847 bp, Cannabis sativa
tttcttggtattaaagcattacctacagctactggtttattattgtcacaaaagaaatacattcaagaacttttatgcaaagccgaaatgcaaggagctaaaacacacaacactccaatgaacagtggtcttaagctttccaactatgggatccagttactgatcccactttttacagatccatagtaggagcattacaatatgcaacaatcacaagaccagacatagcctttagtgttaacaaggtatgtcaatatatgcataatcctcttcaatctcattgggttgcagtcaaaaggattctgagatacttggctggaactcttgactatggactcaagctcaataaggtcaccaatttgcaacttgaagcatattgtgatgctgattgggcatctgatccagatgatcgaagatcaacaactgggttttgtgttttccttggtgaaaacttaatctcctggcagtccaaaaagcaacctacaatctctagatcttccacagaggctgagtttagaagtcttgctgctgttgtttctgaactcacctgggttcaatctctgttaacagaacttcatattcctcctacaccttccccattggtttggtgtgacaacatcagtttcggttatgctagcagccaatcccaaatacctttcatgctcggaaacaaaacatatagaaattgatctatattttgttcgagacaaggtcctcaacaaacaacttcaagttcagcatgtgccttctgaacatcagctagccgactgccttaccaagcccatctcaagcaataagttctctgtttttcgcaccaaactctgtgtctcttgttcagaggacactt

SEQ ID NO: 86534 - DNA, 764 bp, Cannabis sativa
  modified_base (705)..(708): a, c, t, g, unknown or other
taaaagtggagggatctaagaatacgtaccagaggagtcgcatccacttttagctcagacagaaacacaaaaccaggagagcgcactctaatcagggacttcagttcgcgaactgtagaggtctgccctaaccccctacagttccacgcaatccctctcatggcgcctgtggaggagatatgacattctcctccacagggttttgcgagtacacagacacgctggattccgaatcatcaatgacaaaagagccaatcagtgggtttttcatgataccttcattacagctcggtgaatcagaagattcctcagatggatcatcatcaatcaccttagattcccgatccgtttctatagtatcccacggaaaatcacgaaccacatccgggttagttctaataatcttgtgaggtcttgaacacaaggaagcagagccttcaaattttcttttcttaaaaggagtagttctagcattagtatccgatgtggtcggcacaccaatgtcccctccaatccttttaatctcatacaaatcaagcttgccgaaatgtttcaagtcatgaagcaactcctcttgtgcataaggaagatcaattacaagacttttcaaagtgcatcaatcaaaacataatactaaaaataatttataataataataataacaatcatgttaacatcaaaaccctcatattattattattattnnnnttattattattattattttgtgacccaaaattattatattttgcattttagtcctt

SEQ ID NO: 86535 - DNA, 542 bp, Cannabis sativa
acaattggtagaactgtggttttttgacttcacattgtggtcgcgacgagatgttcagtacgagaattatgggaagtttcataacttggccattctgatgtgtaaaagggatttctataaaagggtttcaaatttttatgccatattattcataaatagaaccctaaaaacaaagaaggagactgaggaagcgagtgtggcgatccagatcaagtttaccatctagttctttctttttcccttttttgaatttcttatgttaatttctatttcttgtttaaacatggatttgagtttagaggttatgaacttgtttctcaacttagggatatgatgaatgttgattgacttttactccaattacttaatgtgatttgttaatctttctttctggatctttgtgatttgtttatatttgtgttaatacatgttttagattagctacctctaacatgattcatgactaatatgaaatctgggaagtaaatattaggaatgctctaattaaacaaacataggttttgatgtgaaacgagagtctt

SEQ ID NO: 86536 - DNA, 873 bp, Cannabis sativa
  modified_base (88)..(98): a, c, t, g, unknown or other
  modified_base (160)..(174): a, c, t, g, unknown or other
  modified_base (360)..(366): a, c, t, g, unknown or other
  modified_base (398)..(417): a, c, t, g, unknown or other
aaaatgttacttgtgactaaagtatagtctttacacaagttctcactaatttagttttaatcacaacaagtattgtgactaaaaatannnnnnnnnnnaacaaattgtaatttttgttactaatacttttatctatacggactttttagtcacaacatannnnnnnnnnnnnnnaattagttacaatttttttactttcagtttcaagttttattgtgattaaaagtaagaatttttaattgtagtgaggggaggagagggcaactcttgaagttgatcgattaccaaataaatacattcaacaaagtagatgataaaactgtaacgagaaataactaaggtaaatactattttggaccnnnnnnnttgcaaaagttaccaattagaccctctatttnnnnnnnnnnnnnnnnnnnncctatattttctaaaatggtataaatatgaccctaagctcaatttttaacaattttatttttttaatataactatctttaagacaatttctaatacaaatatataccgaaaatgtaaccaattttatcataatatctatagatcaaattattaagttttattttgacaaaaaatcaattcaatgtcctatttgtacaattttagaaattacagaatttattttgtcatttaacaaaatagagagtctaattggtaactttcgcaaaacacaggatctaaaatagtatttacccaaatataactattaggtaggaaaaaactaaattaccttaacaataagaagtttgatagcaaaagccctacttctctccactttatgctcgtacacgtacaaccttggctttgtctcatctgctctagccgacaagagttggaacaactccacaatccacaata

SEQ ID NO: 86537 - DNA, 672 bp, Cannabis sativa
aagctgcacattgtcttgctcgtagctcttgtttgtatccagatcgtatttttagtgaggataatgttcccgctgattttctttctattgtaatggttaaattttcttattaataaagtaaccatttttcctcaaaaaaaaaaagattttttttcctaaacacatgtaccaaattatgtccttaaaattttttggccgttaattttttttttgaattattaaaattgttagatttaagaacttttatccattttcattcaattttactaatttagtgattgtctattactaatctctaaattttgataattaccatgtcctttaaacttttacatgtaccaaattatgtccattaaaatttaattcatgttagacttttcttactagaattagacaaaaatctttaaatcaatagcataatttaatacgtgtcaaattcgaaggccaaaaattttaattagtcttttttcttactaacacttatctattttttaaataaataaaaaatatatttttttgagaaaaataaaaaaaaaatatataattggtagatattcatataattttgcggctttaataagggaattatcaaaataattaaaattaaaaaatactaaaaatccaaaatatgattaaaatcacaaaaaaatataagaaatgaaataataattg

SEQ ID NO: 86538 - DNA, 562 bp, Cannabis sativa
tgcaaaactattggcaagtactcaatatgaagtcttgatagcacattagacactagcaatgatctagggtagggatcccctataagagctaaaacacctgcctactgtctcttttgtttgagatagtcaggcattgtcattgatcctttcctcactgtttggatcttgaatctgtacttatccattttggctttggaatgagcaccaaacaaggcctctaaggcgctccagacttcagctgaagaagaacatcccatgacctcagtagttaaactttctgtcatcgatccataaaaccaacccatgaggagttggtcatggacaatccactactcaaactcttgcaatggccataaccatttgtctccacaaggaataagtgttcttatctagtttaagggcaaaaggttgattcaatgtgctcccaaactgtggaacaacaacactcgaggatgaagcatcttttctgaaattttggttagcaacattgctaccagcctaccagttggtgatagagctgttgatctatacccatgagctggtgttttatctcctccggtgg

SEQ ID NO: 86539 - DNA, 1481 bp, Cannabis sativa
  modified_base (1270)..(1273): a, c, t, g, unknown or other
agaaataagagtttttgaccgagagctgacctgttaccactgaaggggtggcttctgcattagcgtgagttattgcgaacacccttgctggagcgggtttcgctacagtcttctgtgctttagttttgatttggggacaatccctcgtataattccctgacatagtacactgaaaagcacctctgccctttacactctcccagatgatgcttcttacaactggggcactctgggtaagtgtatcgagtttcagagctaccttgacgattgcctcgaccctggttccttcggaacctcttgttctgacctaagccactggatgcagtaggtgtctttcttttctgatcagtggttgagccactacctcccttactaaaaccggatgtaggaggagtaggagccccaccaacaataagagtccctcgagactctatggtgcactccactgagccctcacagaattggcaagcacattggctttcccaggatggtaaaggatctcacagtgataatgcttaaccaactctaaccaacgcctctatctcatattcatgcatattcatgtctttctgagtctttctgagtaaagaagtatttgaagctcttatggttagtataaatttcacatctctctccgtagagataataccgccaaatgttcaaagcaaatactaccgcgacaagttctagatcatgagttgtatatcgctgttcatactatttcagctgacgagaggcataggcaataacctaatcgacctgcatcagtacacaccatcgacctgcatcagtgcacaccccagacctgcatcagtgcacaccccagaccctgtctggatgcatcacaataaaccacaaacttctctttatcagaaggtagggctaacactggtggtgtgattaacctttatttaagctcttggaagcttacttcacacttatccgtccacgcaaaatgctgattctttttcactgattctttttagtaagctcggttaagggtgttgaaattttagagaacccttctgtgaaccgacgataataaccagccagacctaagaaaattctgatttccgtaactgttttcagtctcgaccaatccttgacgcattttatcttccccggatccaccttgatcccgtctttgctaacaatgttcccaaggaagcacacctgatatagccaaaattcgcacttcttgaattcggcatacaacttatgttctcgaagtcgctgtaaaaccatccggagatgttgctcatgctcctcnnnngattgagagtacacaaggatatcaacgataaacacgataacatagatatcgagaaaatccttgaatactctattcatcatatccacaaaagctacgggagcattggttagtccaaaagacataaccagaaaatctcgtctcggaatgtcctcttctcggattctcaactgatgatagcccgatcagagatcaatctttgaaaagaccg

SEQ ID NO: 86540 - DNA, 855 bp, Cannabis sativa
tgaagaagatgaataaatgaggctagctcttttaatttcagtgttttaacaccatatgtcatcggttatttttcaacagcatgggggacacgcttcagtacaagcgtgtcttatggttttggttattacaaaataattgacgatattgtttttaatttccagtcacactctatggcgtcaattattacaaaataatagacgccgtatgtgttttttatttcacactctatgacgtcgataattacaaaataactaacgccatatgtctttttcattccagccacactctatgacgtcggtttgcttcttgttttattaacgagatgaaaaaactatcactaacggtttgtttaatttgtagtagtgtgactcgtaataaaaacttagttatgttgtaataagttgacttttatggggatttaattcaagagataatattgagtatcggtgcaaccttcatttagtaaaatattttgaaccaaatgatgttgacaaaattaaacaaataattatttttctacaattgagttgaccattgtatgctatatctatttatgtattaattttgaattttttgccccaactataattaccaaatcgtgtttctaatttttcttttatgttatttttctatgtcaattcatttgaatatagagatgtgatttggttgagacatgatgttgtagtgataattgttgggaggaaaaaaatttgatctataggtataggtatgtgtactcaaatttcaatataaaatatgcagtatattcctaagtacacacagcattttcaacttttacacacatattaatgttatttaaattaaagtaaaaaatttcatagtaatagttttac

SEQ ID NO: 86541 - DNA, 809 bp, Cannabis sativa
agaattgagccatatataagaacatactcattgccaattggttttgagatgaaacctcataattctcaacactaacctcttcctgttaagccacaaagaaaatgtatagagatttctggctaaccaccaggaagtagggaacaataggaaagccactccaaagggtttggaaagtagactccgtagatagacaaaactataagttggattcaccaacacctcacctcatgttgagtaaaaggaaaatcaccttgatttagttttagacactaaattgatgggagtttcttttacatagataactcctgagtttttaggaatgaatatcaattaaaggaaagaagtcatagtcataattatccaggaagtaacaatatggtcaatgagctcaaaaataagtgttcttcccatcttatttaggcatcatttcttatttattatagttaaattagaacttagagtgttattgagaacttataaaattgaaaattgttgtagaaacagagaaaattttgtccatttattttaggattcattatatgaaaatgattttttataatttaatacctaagcatgcctataattgtttttgcaaatttcaagtttctagcaaagttgagtgaagaaagtcatagagtgttgaaagagttaaaacacatcttttggaccaatcagtcaagtgataaaggaccatcatcatgcctaaattgttgggttaatttttgttggaactttgtatgaaattatgtaaaaatagaaaagtgaagtgtgtgagtaggagtcccacatgggatagaaacactacattt

SEQ ID NO: 86542 - DNA, 1100 bp, Cannabis sativa
aatcactatgagatatttagatttcaatccttcatcgatgtgacgatgaataaatatcatcacctttgctcgatcttgcaaggggcttggttattctctttaattgtatctccaagattcatggcggcaagatgaatttatgtatcaagaaactattccaaataattttttctataaatgtcaagagtaacaaattcaagtttagtaagatttactatgataaaaagaagactatatcatatgataaaataaatataaatgagctgacaataaaattacataataaaattaattattggatcatatatttataaatatgaataaagcacataaaataaaagtaaaatagaatgactgtagagtatttgatatgaaatgtaacacatgttcaaataataaatatattttataatcataacataatataagaaaattacataataaaatcataaatagaaagaaaatttccctcacgaaaatattatcatgttgatgaggtgttgaataatattataattacaactattaatatactaaaagaatttaagaataagataaatgagattccatctcaaaatcaattgaaattaggagaagtagctcattcatcttttatatcacaatttattttcatatattaataatgtgagactaactctaataattacacactactatactattataacacgagaaataaagaaaaaaaaaagaaaaaataaaatcacattaaagtgtatgcgtaaagctaatccagtaataaacataggagagagagaaatctctaatcatctatatatataaacgagagatatgaggatgaggtggtgacatgacattctataattactcataataagcctatttgttctttccttaattatctcactttttaatttcttatccagttcataaatatgaatagattaattaattaaatatctacatatatattttctatatatatttttttaaaatttaatatcttacgttaaaattaaatctatataattaatctatgtatatatatagggatatgattttgtcccgtgatgtactttcacggaatgtattttgtgatacattagatgggtacgttt

SEQ ID NO: 86543 - DNA, 1141 bp, Cannabis sativa
attttgataattttttcttaatttgtggccagttttatatgatagttatggtgtttttcgatctagtgtggtgatggtggttatgtgtgttctcgattatttatcgacaaattctcaataggttatcgacaagattttgttaaaaaagtttatttttggtttttttagtttgatcgattatatattatgtgtgttgaaatataattcattttgctgataatttcttttaatttatgtaagtttgattatcgacatattgtcgatggattctcgatagtagtaattagtcttttagttgtcatgtttgatgagtgcatactgattatcgatgggttctcagcatgttctcaataggatttagtggttatagtattttctgatctagtgtggtggtggttatgtatgttctcgattatttatcgacagattctcgataggttatcgataagatgtgttaaaaaatgtttattttttgttcttcttttgtggttaatttagagagattatatattatttgttttgaaatgaattttattttgataattttttcttaatttatggtcagttttatatggtagttatggtgttttgcgatctagtgtggtggtggtggttatgtgtgttctcgattatttatcaacaaattctcaatagggtatcaacaagattttgttaaaaaattttatttttggtttttttagtttgatcgattatgtattatttgtgttgaaatatatttcattttgatgataatttcttttaatttatgtaagtttgattatcgacatattgtcgatggattctcgatagtagtaattagtcttttagttgtcatgttggatgagtgtactgattatcgatgggttctcgataggatttagcggttatactattttctgatctagtgtggtggtggttatgtatgttcttgattatttatcgacagattttcgataggttatcaacacgatgctgttaaaaaaagtttgtttttttgtggttaatttagagagattatatattatttgtgttgaaatgcatttaattttgatcattttttcttaatttatggtcggttttatatggttctcgaaagtattaattcatgtttggtgagtgtttactgattatcgatgggttc

SEQ ID NO: 86544 - DNA, 757 bp, Cannabis sativa
aaacttttatattatatcatacattaatttttttaaatattatatatttatatattattcatttttttaaataaaaaatatgagaaagaaaaaaagagaaatgaagaaaaaataataaaaaataatagtaaaataagtttgaagaatgaatagtgcttagcttaactcctagcactatgataaagtgtcactttataatttgttaacaatgttctataaaatttattaaaataagtagaactccataatgaattatatcaataataatattacacatcagaatggtactaggcaccatgaatgccttttagcatttctcttttatattttatctcacatttttatataaaaacatgcattggattcactatatttttatctacatcattaaaatagtatatttttaatacattaataatatataaattaataaaaaaatattatattatacattatatataattataaaaagttaataacttaaataaagcagtaataaaacaataaaaaaaatttagctctctctatagctacatctagagatgcattttattagagtttgtgcaaatatattatagctaagttataagagcactcacaataagtgagctataatagctaaaagctaaaaaaaaatagctaagactttaaaattaagctccaaatgctttaaactcttagctattataactcatcccaaactccaagaaatttttctctacatttagctcatgaatagtgaagaggtaaaacatat

SEQ ID NO: 86545 - DNA, 1180 bp, Cannabis sativa
aatcaatggagcaatggtcaatgaagcaaaaattcaactgtgtaatctaaaattatcaacaaaaacaaaaaactcaaactatcaaatatcaaaagcggaaagaaaacaataatctttatatccatcatatttttctgatatgcccaacaaaattattgcactgatttatatactaaatagtatataaatgataatttccaatataaaacacaataataaagatatggaaaataacaaagaataatatatatgcatataagtaaaatattagaactaattaaaataacgtcatcacaaatagtgataaagacattcttataaccttattaaatattaattagggaacaaaaaaaaaagttttttaaaagatttataattaagtcatccaaatttcaaaacatgtagataagaaacataatactaaaatgaaaaattgtcttcacagtgggtaattttcacactttttgaatctttctaggccgaaagataggaagattttggcatgattttctgttgtgtcctttcccttgacaatgactacgtctatttgtaacttttttctccaatcgactacgatatctttgctctctaggtcttcctggttgacgccttgtggatggtggtagtatctccattatcttgatttcattaggtacattccatgttgcatgatctccaactgggagtacagagtctttgtatgttgcaacgaatgcttcttttgtgtagtaataagaacaaaaaccataacagttaagagatctcttacctaaaacagccattgcgtgcgaacacagcatttcgtcatattgaaatttatcacatgaacatgttttattttgtaagtccacaatgaataatttcctaccatcaagtactgtgtaaatgactaggtttgatgtctcaacctatccaaaaaaatgtgatttgttagataaatgaaatccatatcattcaaagggataataatggtttattttaccttcagttttctagacatatttctgttagtttttaaatcagcttcagcttcagttgataggtgtgtgaatattgatgatgctttgtctttgtttgccaaatgccatctttgtaccaggcatcttagagcttcaaccaaagttcctactggtaactctcttgcagccatgagtgcagaatttattgactctgcaatgtt

SEQ ID NO: 86546 - DNA, 1203 bp, Cannabis sativa
ctatattataattttgttagatttttttatttgaaagttatatgattttttttttatttgaaagttatttggatattttttttatttttttttaatttttttaattttttatgagttgttctgttttgttgtacagtatatttgttgtatagtatattattattctttcttagatgatatttattttttattttattatttataataatggtggtatataattttgttagtacgtattatataaatattttaatgtatgtatataattttattgggatgctacatatatttaattattattcatatatatttattttaaataatattcaaatagtttttattttattatatacaatggtagtttataattttattgtcatagtgtatatattttaattgtgatatataatttggttagtatagtatatacatataatttggttaatattgttagtatatatattttggtgaataataatatatgtattttttgttataacggtatattaatttttcaaataatatttaaattctattttttattgtacttttgttgacatgatatataattttattagcatcttatatatatattttatttttatttgctattattatatattttgattgtaaggtatatatttttttgttatatggtatattataagttttattgtacagtatatcattctattttagatcatgcatgtttaatttttattttattacatataaatgtgatatataattttgtaagtatgacataattatattacggttgtatataattttattaatatggtatatataatttttttttaataatattattatattttgttttattttttttattgtaggtacgtatgtatatatattttgttgtttggtatatggtttttattgtctatagtagtatatcatttatttaaaatgatatttagtttttattttattaaataatatttttggtatgtatgcctattttaatggtagtatatataaatttgttgacatgatatatatattttttagtattaatttagtattattatatttttttgtggtatatatagttttatcactacaatatattaattttcagagacatacgatatatcaaatactgttatatatatttaataatttaatatatttatttatttttgttataatataataatatgtaatactaaaaaaatt

SEQ ID NO: 86547 - DNA, 615 bp, Cannabis sativa
gttgacaacacaatagcaaacacccaccggctgtaatccccaaaccttgcatagcaaacaccgcggctatgaaggttccttgtgttttcttgttagagtactctgacatgattgtagccgaaagggggtaattgccaccaatgccaaacccgagccaaaatctaaagaaacatagtgttgtcatgacagttttggggtcatgactaaaggaaaggccagaacaaactgaacaaatgaccatgatcaagagtgtgataccatagactctctttcgccccaacttgtcaccaagccaaccaaagaagagttggccggctcaggtaccaacaaaggcgacgccattcacagcagcagagacttctggtgggagtgtgcctggattggttgaaccttcaacatggtagtaaattcggccgagcattttggtgacgagtgagatgcaaaagaggtcgtatgcatctgtgaaaaatcccataccgactatgattatggctgtggaatgatacattgtgttttagcaatgtctaatgcgttaaacacttcattagccattctttttctatttgttacaacaaaatgttatcaaaaatcaaatacaaaaacgaaacatgaatt

SEQ ID NO: 86548 - DNA, 720 bp, Cannabis sativa
  modified_base (694)..(694): a, c, t, g, unknown or other
gtgttggcttcaattatatttgtttcaagctcgaaagtgaatgttcaaccaatacaagaaactaagaaaaggaaagaagtgaaggcggaagatgatgatccacttgggagatccttgcctcctttaaaaggcaaacaatggtatctcaatcacgaagatgaaagagttgttgcatcttacaaagtagtatacgaagtggctgatttcaaagtacaaatcaataaggctttaaaccgattcacatataccattttatttcataaaaaggagactcacacacaaggggaaccaacacctccatcttcttctggaacagatggaaccagggagataggttttttgcaagtccgtgtaatatatttatataattatttacttttgtgatgacgattaagaactcaattttgtaatatgtttcttcctattgttgcttatgtaatttttccatataagttctttttatattcgatgttattgcaaaattacttttataacttgaatttttatgaaaaatgcaatttcacttgtatattgttctttttagaattggttccccaatcagaagaaatgcgttcatgttacaaattagaataagaattatgatacttcttccgttatgataatcaaaataactaaattatatatattataatgaagtatttgttggaaaactaccaagtatgtttcattaacntcctaatatgaatttctaaaacaaag

SEQ ID NO: 86549 - DNA, 1527 bp, Cannabis sativa
ggacaatgtgaaatgtgaaattttaaattttaattttaagtttgggggaagggcttaattttatttttcgttgtttcgctttatttgtttgttttagttattaattaagctaatgtcgatttttctgctgttgttatttgtggaatggattgaaattttaaatcgtcagcttaatttttttactctttaaattaatttagatgcttgtaaaatttttgtattgatgtaaattgtcaatagttggattgtatcataattattttacgttgctttgtggtaagattgattgaataggatagaacttgcttgaattatttttttgaggaaaaatccttgacaatgcttatttggaaaatgatgaggcaatttttttttggatcgtttgagcctttgaagcttatctttatctttattatccctagtttgcctgtttgagcttagcctgctcaattgtttttagccactttatgctactaactttgaatccacttgcaattctctatctttgtcccttgaattataccataagcttagaaataagtttaggggaaatgaattgtgtgtggatgaaattattattttaagtgggtgattgagacaatgtgtgaattataaaagtatttttcaacatcactaatgttatttatgttatctaaaaaacgatgatgaaaaaacaatagaaaaaagaaaagaaaagaaaaaaagtgttgaataaacaaagtgatgttggaactaatagttgtaatattctcaatcattgaaatttttgggcacaatttgagatatgcaatttattgtgtgtgcttgatggttgatagtgtgcttatagtataatataacttaaataacttttcatctacctattacctaagctaatacattacaaccttgaaagtccttttgatttcgagcaaggattgttgacattagtggagagaggtaagtcatgcaagtaaattgatcattggattgtggaaaattagaaagagtagaattgatatgatgtttttcaaatgttgaagttaatttgtatctttacaattatttttcaaagtaagcatccgaattaattttagagttttgggattgaaattttggtttaaataattgattgaagtttcaaaggttgcagcagtggtttgattgtctgaaggcttagttaattgtgtattagttttcgttttttttttctttctcttaacttttagtcttactcgagggcgagtaaggatttagtttgtgagaatttgctacactttttttagcctaagtttcggatcattttttatagtttattttcttctttattattatttttggaaaattacgcttgttttctttggtcaaattttgaaaaacggtgatctataaaatacagaaaattttgcaagaaaataaagctgaaacttcaagtctaaaattcaaatatgttctgatcagattttggaaaaaatcaaaacataaaagttttagatctttttttttagcttttcaacgcatctcgaatcagctcatttggagtttgta

SEQ ID NO: 86550 - DNA, 2715 bp, Cannabis sativa
  modified_base (2057)..(2058): a, c, t, g, unknown or other
tctatcaattcagtatatgtagggaggaagaaaaacacccagattgtcaattttgtgtgtgtatgtgtttttttcctgctcacttgacttgacttttctcttcaattaccaatttttctaaagcccaaagaacacatagttgataaagataggctaatcaggaatgatatgatagacaccaatgaatattatcaactttatgtaatcttttgaatcatatattgtggtgaaatctgaaatggcattgttggtaagtaaagataagtaataagagagagagagagagatttacaggtgagtgatgtggcaagtgctgttgttgtcgtaggtacaattacatttgattcctggattgtccatgtcttctcgtttgatattgtcatcaatggcggttccactacatggatttccacttatattccatgtcgttgtatttggttttattctccactttccaaataacgtatttagtgctctcactgtcttgttcataaaatcataaattacatatatatcacaaacagctgcaaatcacccattaatcacctcttaaactacctaccttaatttcttttctgttttttttttttaaattaaattctcattaacaacaagcaagagtttatacatatcaataagaaaaaaagaataatcctcaatctaagctaattcacaggtgcatgtacaactaattcatcagaaacgaacatgaactagggatatcttagaaaaaaaactgaaaagcaaactagcaaaaaaaatcaataaaaatctagggcatttcaaaagaaaaagtgctattgaataacagaaaccaaagctaaataaaaagactctacctaacaaagagaaagaacaacctgtataacttaacttatacaaaacaacgtaatactcatcacttttatactttaaactcctgaaaagctagaagacttaaacattagtctgccacctttttcaaaaaaaaaaatctaaaaagaaagacaaaaaaaggataggaagttcaagttggaattttgttaatttttcagaaaataaaacaacaatccaaaccaaaccaaattacgcctttcttaaattgaagctctaatgaaaaatttaactccctgatttacttgtacatatattctatataaaagtcacttataatatgaaagacagagatttgaagaagaagtaaaaggtaaagaaagatagatatgtgtatacaaaccttcagaaagatctgttgtggcgttttgagtttgagccatggagggatgaggtggcagacaaattaagaagaagacgatgaaggagcagcagaggaggctccacttaatagtataattcacataaaacatctcttccaatttcaatatttctgattcttctttacttgccttcccaaaccaaaacacatatcatcaatcgatataattattttgtacccctaattcatctcctctctccctagaaactgtgctacttcaacttgttgtgggtactagtgttgagagaagatgcaggacaggtgtgtttagtattattattagacattacattacattaaaatatttatctatgtttttgtgtaatgtttgtcctttttcgggtgagaaaggattacttcaaagttcaaacatatataaggtttgagggtcaactatatacatatcaatatcaccatgagtcatgacccatctcaatctaagaatataagaccaagaacatctagtcaggtcttcaatgggtaacatttctttgattcttttattaagctttatttcattgacaatttcatttattacattcatactcatgtatttatatgctataaatgtgcatgtgtattaatctctataatttcccaaagaataaataaacaaatgcaaattgaaatcttatttatatacatatatatatatataaaaaaaaatagctattgtggttaatttgtgggtgggtagataagaaaagaacattgtcattaggtatcagtggtgtctagcactttcttgacatgtcgtgttgcgattggctagcgatacttttaaaaattattatattaaatnntatgggacccgatacttaattggactaataacgatattgacacataagaaagtattaagcaccactagtaccattagcatggtgccctttagcatttctcataggaaaggttttccttgacaatttcttaattatttgacgccgatcataatagcaaagcaatttattgctttttccactcgaagtactaaatctatattataatgcaaattgtttctaactactttatataataataatattaatgagtaaattatctgtgaaataggtcgataggtatagacacaacacaacagtcagaaaaataatcaaatctaatgtggggggctgggtatccatgtacatcgatttcaattctatgattatacatcactcctttgacaaatatatccatggtataatggccactaccaattaataaatatatattttatttaaatgatgattctttttttccttttttttttttttgtttttgaaaccaatgatgattcgtttaaacgataataattacactaatgacaacaggaataatgtgcgtaaacgataagataagatttatttcacaaatacatacaaattacaaaaatatagttgtacagaattttaaatatttttacaatttttatgattttattataaaaaatatattttttt

SEQ ID NO: 86551 - DNA, 1214 bp, Cannabis sativa
  modified_base (914)..(940): a, c, t, g, unknown or other
  modified_base (1001)..(1003): a, c, t, g, unknown or other
gcatataaaattatacaaggactatttataacaagctgaatagattaaggggcataatagtatagtgtcataagtacagggggtaaaaaagataattattctaatgcaaaagtagattagcttagtaaagaaaagtacacagaatatgagactgagaactctacttatatatatatatattatatgagcatatatatatatataagatttatataatgtgagtcataaagaaggatttgtggggggcagggtagagcactaactttgatattttgtgaaataataaagaagtgggggtgacatgacatataccctatctttagtttgtaaatctatgtcgcacgcgcgcacaggtagaaaaaactagagaccattatactagtccatactccatatgccataaatgccatactccatatttcatgactagtagtactactgtagtagtagcagagtgtactgtgtgtataagaacttctatacatatatatatttctctgaaaaagtgagctgagtcggtgcgtatagatccactactcacgtaacttatattacttgtccattttagtggaatgatacatatagaagtgttgaagagtattatgaactaataagtttgttcaagctcgaccgtaaaggtcgtagtgccataatatatctgacaaattaaaaatttacttattagaatttttgccccttaaattttgacatgtatcaaatcatgctccctgaactattgacattgttggatttaaagacttttttctaattttggtaaaaatgtctaacatggatgaaagttcaggggcataatttagtgaatgttaaagttcgaagagcgtgatttggtagatatcaaagtctgaggaacatggtttagtacataaataattattgaaatagtaaaattgaannnnnnnnnnnnnnnnnnnnnnnnnnnaataatctcaatagttcagggggcattttcaatggcattaaaagttcaaggggcatgattnnntacatgtcaaagttcaggggataaaaatcctaattaaaattaggtggggcggggcagaatttttttttaaagggggatatagtatttttttttaataagatcaaaagattaattaattaagaatttcgttcaaaacaatagaacgtacttcagcagaataatcctccaattgaagcacacaacttgtagagaaacaagagtctcttgccaa

SEQ ID NO: 86552 - DNA, 1777 bp, Cannabis sativa
agagagatctaagagaaaatacttagagatttcattgtgagagctttgcgagagaaaacactgtattctttgttctcaagtcaatacaatccaaggggtgtaggctattactgaactaaaggtgctgaacctctttaaaatcttgtgttctttattgcttacctattttttctctatcgtaattatatttcttatcgcttattaattgactcactgtcgttggccaaaagcgaggtcaacactttttactttctgttcatacatttgttggccactactgcttatcagacagtacagagttgatcactttttagcatctacagtctcttcctctctggttaaatattttgtattatcttgagcctataataaagtctacaaaagaagaagaacaatagtgctaccttcgtgaaaaggttctacaagctttcggaagataaattttcaagtctttcttcgggacaaagcaaacactctttaaggagatcaaaggaagtttgtcacttgaagtatcaacaagattggtttgggaatgcggaatatacctcaagcctgcaacatataataagttaattactttgtatttttgtaacatatctaatgattcatatctctaacgttgccacatgaactagtaacaatttgcatggattgttaataccatagataaaatcttgtgtatttttatctttttcaacactacttgtttagactcctactctacaattagaaagttgtgttcttttgctacagaataaataattcattaacaatataattatttcgcaattaattaaattaattattaaattactacttataaaatacataatgtcaaactgtcaaaatctaacattggtaaataataaaatgtatttataaacattgagagtaataaaactttaggctgattatttttagatgtttactctttctttccaaaatttaatattggtaataataaaatgtatttataaacattgagagtaataaaactttaggctgattatttttagatgtttactatttctttccaaaagaagcaagattactcctgctacttttgctaaatttttttcagagggataaatttttgggaattttacacataataaatattgagtaaaggtttacatttatactatcacacggagaaaattacatttatattgtcctttgcccttttttgtcttttgtactgtagatgtcgaaaaatcacataccaagcctctatcttccacacccacagacagaaccaccccagcaatacgagaacacctaaaaacaaccattaattctagtaagatgaaacaaaacagagaaatcaacacgaaataaataatcatggcaaaacaattgaataacaacactaaaacaaatgagaaaaaagattaaaccaacttctacacagcctcaatactagatataattgcgactatatttgcaagctcagtcgtgacaaattagaataaaaaaaaaaagtaaaacaacacaaaaactaatgtaaaacaataatgcatatataactacttaaaaaaatacaaaagaaccacacccttcaaaattgttttgtcaattagctcgtaaaatgtatttatatgagaataagaataaaaatatacaaaaacagtcatagagaaggaagaaaaaatgtatgaatttattacctccatcttccacactcacgaatagaaccaccacagcaacacgagaatagttggaaaacaaccaataattttggcgagatggaacaaaaagatgttgggttttgtgccct

SEQ ID NO: 86553 - DNA, 1157 bp, Cannabis sativa
attaatcacaattcatccaattcacaacttcaccaagctagaattaaaacttgattctaaaatcaaaattgttacttccaaacctagtcagccacacaacacaccagctaggatctaaacaaccctaaattaaacttaagaacaagctcagaacctaagctactccaaacagtcctgaaattttaaaccctaaccccaaactagctttaaaacttgaaaattcttaattcacatggcaatgacttaccttaacgcttctatattgaactttaatggaagaaatctactagaaatcacaaagaattgatgaagaattcttggttttggttagctcctaggtttctcgaaggtaagaggagtaaatcatcctttttttttttattattatatttcttaatttcaaagtttaaagataatgcccaacattattcatccatatactaatattaaatcaataaactagacttattaaacactaaaagataaaataaactaacccaataaatgatcattttaccccttttaaaaaaatttaactatgtaaaatctaggggtatcttggtaattctgaccaatctgccaaaccgacaacctaacactctaaactagcctggtataatttccaattcaatccataatttattgtcgtgatattttcgaccactccgcagagctcccacaattgccaggcccaaaaatattttatttgaaaaatggtattggtatccacgatacccacataattataattttaatttaataaaatcttcgtaattaataaattatgctttatttaatcatttactaaatccacactaattaacctaagtaagaccataatcttacttcattaccaaaatagttattacatatttaataaaatatgtctaattaaataccatattattttctgggatattacaactatcccctcatagaaatttcgtcctcgaaatttacctgaacaactcgagatactgctcccgcatctgcgactctaactcttaagtcgcttattcaacctagctattctgccacaatactttaactagcggaatagtcttgtttcgcaacaccttttctttcctgtctaggatctgaactggttgttcttcatatgacagatcgatttaaagctcgatatcctcataacttaa

SEQ ID NO: 86554 - DNA, 581 bp, Cannabis sativa
gccaaaaattcggtttttatggttaagtgttacaaaccgtaaagttcaggtagtttagctgccaatatccctattttttatcatatttttcaaaatatgggttgtgtatgcccattaaagttcaagattgatatttttgtattaggttcgggttcagatttatgtcgtactttactcaatctaatttatttttcttaaataagctagccttcatattttaacttaaattgcgctttatcttttttttttttttatataattattaaactatatgtattttttatatcttcaattattttcatattattgtattgacaatgatataaaaagttattataattattaaaatctaagtaattcttcaaaattttaactaacactacaaataaattttaataattttaatagtttataaaattatactatacagtattatatttaagttttattaataatagttgccgccatgcaatatgctttttagactagccattggtgtgtaattgtgcttgtgtcatccgaccgatttcgtatcgcgttaaaatgcccgatttatatttacatcactatatacttaatgc

SEQ ID NO: 86555 - DNA, 554 bp, Cannabis sativa
gaaggaaataacaaggaacaccctactaacactgaaacctctactcctgtacaagacaagggaaaagctaaggtagttgaccctcagaaccctactgctcccatacctccttcaaaaaacacaaatcctgctaacaggccttctcaggcacagaaggccaccgacgccttcgggctcagatgcccttctactttagaaaggcgttgttgcaccaaccaaaagggactggtacgaaagaattgaagcctaggggaagggaaaaccaccctagtaattctataactaagattgtgggactagtgaacaatattcaaatgatagttggtccataataaatctctgaaggcgtcttagcgccaagtatgaaaaagacaaaagtgagaaggagagaacacgtggtaatgacctcaaaaaccatttaaatgacaaatttagtggacgagatctcccagacagtgacaccaagagactagaagagcaaatcactgctctaacaaagttggtccagaagcaaagcggggccctcactgacactaaagatgaggacccaaagt

SEQ ID NO: 86556 - DNA, 875 bp, Cannabis sativa
ttgtagattgttattaatccacaaagacatgcccacatatatgattcattagataaatcttaaaaatacaaactaattgacttatgcataaatactctctcttattatatgacccaaccttaatgtactccaccttctcgaatgaatcttgctgaaacttcaagtgctcgaactcccttcgatttgcttaaagagtgtatgcttcttcccgagacaagacttgagaaactttcttccaaaagcttgaagaatcttcttctgaaggttggtattgttgttctttttctttgtagaattgattacagacttaagacaatactaaagacatagatacaaaggtagagtcaaagacactctcctctacacaacaaaaacactcttttctaataatatgaaagaaattcaaagtgaataaaagagatactaaacattgctgctaatatgagtatttataattattatactcatattagatagcacatacacggtttagacatgaacacagcccacaagaatttctacttctgtatctacagaatatagtaagtagaaggtgcgagtttccttttatagaaaatgaaactctaatttcgattttcttcacacatatctgattaaattaatttggaaaacccaaatataatcagagcacatagaaaacacaattaaataaataaacaattgatttatttataaaacttaccaaatatgtatacctttcccaacttggaaaagctagacacattttataacttaaatgaatcaatcaaaaaaaaaaaaatatacgggaataaaaatacaactcaaccgagtataattattagggcttttttcataaatgtacaacaaaaataaaataattacaaaaaatgtgc

SEQ ID NO: 86557 - DNA, 657 bp, Cannabis sativa
attgtaaatattttatttaagattaattttatctttgtttaataaataataattaatatttatggcataattgagaaaaaaaataaacaaaatcaaaaaaaatgtattatttttattaaaagaattacaaattaattagattttaaaataaatattttcatgtcatatattttttgttgagaatattttgtttggatttaattttatttgtgtttgattgagaaaatagaatttataaaaaagaaagaaataaataaaaaaggatgataaaagtgtggtccaaacaagagaaaagtggtatttttgaagcccaaaagagagcacaaaaggacaaaagcccaacaacccacttcttctccagccaacacgcctgccacgtggcggcctcctactcgcgtgcagcagccacgccaggggcttgtccccttctcctccgtcacgcgtgcctgaggtgcacgacctcaccctggtcgtgtgtgcgcctcacgcccagccccgcgagtggggcttctctttgtccgagccccttcagcccaaagtggcttgaaccactttgcacgtggctctttctctagtttccatgtgtcacatgcaaccaatgagagagtgacacgtggcactccgattttaattattagtatttatatttttacccac

SEQ ID NO: 86558 - DNA, 749 bp, Cannabis sativa
  modified_base (314)..(316): a, c, t, g, unknown or other
gcatgtttaaaattttttggggcattcaattacagtcgttatgctgccgaaaatttgatagaattagttataaatttgatatattatatggtgtgttttgtataggatctactcgctcaaccgccatcaagacgtgatgtgtcgaaggggaaaggtcacatgccttctcgacaaggcagtgctgattaagaagatgaattagtcataccagaggtcatagttttaatccctaagtcattaaaatggatggttgataaataaaagctatagaaaaataatacatgaacacaaggttttttacgtggttttgcagnnnaaattctgcatagtccacaagtcaatcttattcagatttctaattgtgtttttttagggcctcccatgcataagttttttcgtcccttttttgagcttgtctcccgctatttataattacatagtggtctgtcaattacaaagttgactctaatatatctacaacaactatccctaaaatcatgggatttgattacatatcacgcagtgtaaatgcggtttatgatttgaaaatcgtatagttgtgatttttctacttttactgggtcaaaacaatcatgtattaaacacgtctttaattgttgtatctagagatgtctcgccggaaacttggttacagtgatcccaatagcgagttggggccattcttccttccgaggtcgacaatgtatgtctgatgtcgatcaccattcttatcctcaaggaattctttg

SEQ ID NO: 86559 - DNA, 2095 bp, Cannabis sativa
tttgggctttgttattaggttgtgaaagtgaaattagatagaatcataactaatacaaaaatcacaaacacccagccacaaataccaacacaatatttatattcttactctttcgtttattgtgtgagtacctgatgcgcacctgctgctgcaatcacaaacaaccagccacaaataccagcacaatgacagcaataaaacagtaacaatgaaggatataggaattgtgggacctattattgaattaactgaaactggagacaaattccacaaaaggcagagagagccaaggaagctctctcctgatgcagaagagaattatctcttacaaattgcatacccaaaacaaacactcaccctcaatacaaaaggcagctcaccactagttacatttaccaaaatactccttcctatgccaactcatctatagttttacattgcttaccccttctagcataagtgaaactaattggaggcctagggtgcgcatcattatccccccaaaatcccgaactttgtccccaagattgaagtctggaaactgagccgaaatagtgtcgaacttctcccaagtagcttcaaaaagaggcaaatccttccagcaaatcaatacttcaataggagctcctgtaggcgtagggtgttgtcgaacattcaaaagttcagcaagctcgaccaacaactccaaatcagcagtcagtgtaggaggaatcgtaggagatgagtgagtcgtaccaaccgcggcgcggagttgggacacatagaagacggggtgaaccgcagaggacgtgggctaatccaaatgataagctactgctccaatccgtttcagaacagtaaagggccaatagaaacgagcagctaacttctcattcttccggagggctaaggacttctgtctgtaagagcggagcttaaggaagacacggtccccgaccgcaaattctacatggcgccgagaagaatcggctgctgctttcctcttgtgttgggcaatgggcacgcaacaagtgcattttgaggtcatccaaaaacccatctcgctcttccaaatactattcgagtgcaaggacaaaagtagacccttctgaatagagaattaaggccggcgggtcgcggccatataacaccttgaatggggtacatcacaaggaggagtggtacgtagtattgtaccaatattctgcccaatataaccactttgcccatgcctttggccgatcagaggccaagcaacagaggtaagtcttaagacagcggttgaccacctccgattgaccatcagtttgagggtggtaggcggtactgtggctgagttcagtaccatggaggcggaacaactcagcccaaaaatgactgagaaacacccggtctcggtcagaaactatggtacgaggaaccccatgcaacttgacgacattgttaaggaaggcttcagcaactgtgcgggctgtaaaaggatgcttgagggcgataaagtggctgtatttactcaaacaatccaccatcactaagatggtgtcaaccccttttgatttaggcagcccctcaatgaaatccatagtcaaatcctcccaaacttgggtaggaagtgaacctaattggaggcctggggtgcgcatcagtaccatctatggtttttattaacttgttccttttcgtacaatgtgcagggctccaaatgcagatatcatttttgttctgttaataatgaaaatttgtactttgagattgatatacaaatattgtaaggaaatggcattagtgtcaggagagaggtcatcatcattgaatccaaatgtacctctgtttagttatttttaatttgattgatattacagtgagttcacatatggaatagagaacacgattgcttggaggcgaagtcgttctgttagcttttcaaagctacatgaggcaatcctgttcgcaagggtgatgtttttcacaccattaactgtctcaaaaatctcaaaatcaacaagcacgctctcgaggtaacattctcagagcttgtttgactgtgttttcagttttcagtttttaaaattgtgtttttaaaagtgagaatagaaaacagttttttgtcatttta

SEQ ID NO: 86560 - DNA, 1144 bp, Cannabis sativa
caaaccacttaccttggcaaaagactaaaatgcccttaatgattaattctagcttatttccaacctaggggtaaaatagtcaaaaacaataacccggcacaacgccaatattttattttctccaatatattttccactaagaattaagattctagacttgcccatgtgataaaagtagtcatccatcgcattttccgttgtcgccgagcaaaaattgtaaaaataacataattcacatataaatcaaataatacccctagagtttaataaaatctccggaattgagaaattataactctaatacccatttctaacaatggggcccacaaataatcaaattcataaataattataaaaatatcataaattagtgctaattgcctttactaatcgaaattactaaagcggtcattacaataaggaccataggaaaataaatataaaatttagagttatcataatttttttttgatgaataagaatctttgtattgctcaaaataagttatttacctctgactattctttttacattttctatcaaaaaaggatgtaatcaatgaaattacaaatcatgagtatctcttctacatctgtaaaagccattgcttatcctcctctttaatttttcttggtagtactcccataattctcagcttactattttcctgtattcttttcacaatcaccttgttttgcaaaaatatttgttccaatatacatcatttcttgccctccacatatggtagattaagcctggcattactgtcctcagcatactctttcgagatgctgaaagcgttttgctcttattgatgcactgcagaagctgctgcgatttgattgccttcgatctccattgtaaacaagttttaatctcttccaagcagactctgctgtaatcacaatcaaagaacaagtgctctattgtttcattttctttcccacacaatagacaagtcatgtctatgttgtgttcatattttccaattctttccttagtgttcaacctttcccaatgcaccagcaatagtataaacttgtatttgggaatgattaacctatcccaaacacttttgcaccatggaatcttctcattgttgttgaacagaagttgataccctttatgtattttatattgctgc

SEQ ID NO: 86561 - DNA, 881 bp, Cannabis sativa
gttatcaggtctaaaattagctcacaagacagattggtacattttactcgggaattgagtaatgtggttaagtgaggggtgttggaggatactactacagcccatgtggtattatatgcgagcattgacattgcaaaacacataattttagtacttatcactaatattatgaattccaagcctaaaggtgacatcccttgtcactccatttcaaattggagcctccttaacctaaaataacaacttgcccaatgtttgtggaatttttgcctagaaacaaggagatttttatagatatttattttcttgtaattttttattgattaaaaaaggtgatatacgggatttgttagtgagattccccgtggggatcataacaaaccctacaacctatataaggataagtaagatgctaagatagggacttctctctttttgggatcttcttcttggaaaccttctctttgagactcacttgatgacaaccaagaacaccacacttactccttcatctttttcattaagtccaccattctcaatcgacactaagatctaaacacctacacatcccttttgtgtactttattggtttattgttctcaagaactatacaatcagccaatttagatttttgaatatcaagtctcccattagtgttatatttgtaaatctcgattaagatttcacctagaaatcctttgtcgtacttttatccacacactcttgagaacataactctagtgtgtcagatctaatcaataaaaataaaagtagacgtagccccattaccgctgcaacatgggggtgaataaatccatggtgtcataagaatatgttatttaccttgtatgacttgaaggaattgtgcttaaattgatatt

SEQ ID NO: 86562 - DNA, 771 bp, Cannabis sativa
tttcaaattacatgcgtccgattgtaagagtcttgagggtctcatgactaacttttggtaggaactactaacagtaagaattaaatccattaaaagggttggtccaagctttgcaattctaaatttttttggaggtctttggtttagatatgtttaccatcataatcaaattatgcttgctaagcaagcttggagagtcatgtccaatccctcatcgcttctctctaagttgcttaaagccaaatattttaagcataatgatttccttaatgctttaaaaggacatctgttagttggaggagtcttctttggggaaggacactacgtcttaaaggcctaatttggaaagtagaaaatggtaagtctatttctactatcaactcaaatgggatccctactgtgaaatccctcagctttcttaataatatttcctcctttactcatactgtcttttttattgatgataatggttgttgggatgttagtaaacttaatcttttctttactcctgatgtagttgatgtcattgatcaagttccaattgatctttcttctgatgatagtctcatttggggacatcatccctcatgtattttcattgtaaattccacctatcacctggctaagtcttattctttctcaccttctccttcctcttctaatcctttctactttaaaagctgatggaaaacaatttagactttaagaattcctcctaaaatttagcattttatttgaaaaacttttaatcatgtcttgtcttgccttgca

SEQ ID NO: 86563 - DNA, 550 bp, Cannabis sativa
caaaattttatttattatgttacatatcctattattttcatgaataaactaattagcaaacatcatagaaattcacaacaccatggattcatgatcagattcacaagcagtaaaaaataaatattgttattaatattcatataaaaaaaactcactcactatttttttaaaattttttatctgtaaaaattttacaatcacacatagacaagaaaaatcacacaataataaaaactagtaatattttttttatcacaaacaaatattaaaaacaccaaatcagattacaaagaaaaacaaactagatattaagatatagacctgagcagtgagctatggatactccacgatgatgctaacgacgatagtgagcaatgcgatctgagtttcttctagcgagcactagcagctatgcaaaaaaaaaaatattaagccattgattttaaaaaaattaggtattgatttgaaattattttctactttttattatttggtataagatacaaataaagaaataaaaaaaaaaacagaaaagatacaaaaaaaaaaa

SEQ ID NO: 86564 - DNA, 682 bp, Cannabis sativa
tatatagaatagatataatatgaaagtatttttaattaattgatacaaaaaaagaagtatttctcaatttatctctcaaaattaagatcactttgatttacccatatttatttctctaccttttagaatcattatactttcataatttatgaaaaattgtaagaattcacctagttagtttcagtcgaaaagttttgttctgtactatttacttcgaagtatgatcatatttaatttatttggatatatattcctcataattcacatatacaatttttctagaaaaattgagagattgtgagtgtgtgataaaattcaatctgccaacttttataaatgaataaagtaaaaatggtaaccttggaagtgcactacatttagagatgcagtgtacaggctacattttttgaaaaataaaaaaaatgctaaaagacacatgaaatttagtataattaaaatccaatcccatatattttaatttaataattattataaaaattacaaactcaaatgaatttacaatgaatacttgcatgaatctgattaaatatcagaggaatatccccatataacagcagtaactatattaataatatttgggctaaataatacacacttcctctgatatttcccttactgctgtttatatatccagctatatatataaacagcagtaactata

SEQ ID NO: 86565 - DNA, 810 bp, Cannabis sativa
  modified_base (577)..(601): a, c, t, g, unknown or other
tacaatgcacccctctaaataaaacagtcacagataaaaagtttgaattttatttttcgacgtgttaaatttttttaaatttttttaaattttgccagatgttttatataactataatgtacactaccatgaaaataaaatagaccaaacaagtctctcgaatgtcgaaacaagtaggagtatatcaatgcgccacttttaaaaaggtgcattattttttgcatgttcaatttttctaaatttctcaaaattttacaggaagtcatagataattataatatatacgactatataaaaaaaatagactaaaaaagtctgtcgagtgccgaaacaaataaaattgcattcataaatcacttttaaaaaagtgcattgtagaatttctcaaaaataaattcttaatttcataaatacaataatataaatatatatagatattaattaaatatatataaatatcgtgactacactgcacgtagagaaaacctcaaaactttgcctttaatattgtctccttggagcattaatttacaatatatataaatatatatatatattctatataaaatgtggctannnnnnnnnnnnnnnnnnnnnnnnnaaattattgggtgactttttttaaaaataaaaaaaaaataacaaattattagatgtttccacgtaaagagtcagcatccatgtagttagttaaatctaaatatacttaatccacgtaaagtgttgcaattaataataaatttgttcatattgtttatttttttattaaaaattatttttcaaattttgatatttagaattagttaaatt

SEQ ID NO: 86566 - DNA, 578 bp, Cannabis sativa
tttattttataacaaaataaataatgatttagatatagaagagatgaacgaagaatgtatacaacaagaaataaaaattgatgaactactcattatcattgtaagaacatttgtatattatcataatcattttttattaaggagccatttaaaaatagaatttttcaaaattatatgtaaaaggtaaaataattacaaaaataccttaataaatctcatttagaataatacattgtcacattattaaaattaaaatataccttaattctaaactaaaatacctgaaatgtaaataatcccaaaattctgttttttcttattttcctgcgtttgaaaagtaacttttgaattacttaaagcatctccaatggtagtattctttaaaggtgttaaatattttcacatcattcaaagatatattattttattttatctttcttccatatcatttttagttacagaacacatttattttctaaaaacaaaatttttaaaaataaaaaatttactttcattttgtgataaaaaaaattaaaaaacaaaagtgttacagcaccataactttaatataaaaaaaa

SEQ ID NO: 86567 - DNA, 727 bp, Cannabis sativa
acattattaacacctcgatttataaattgaggccttgaattaattgatatctcaagtaataaattctatcttcaaagaaaaaaaaacttctgataaatttaaaacttatcaaacgttgtagattaacaaaaaagtttttagggtgtgcttggaaataattgtgtaattaatagtaattagataggaattcataatattatatatgtttggttaaatatatagcaattagatatacggaaaagtaatatttttaagtatttaatattttaagtataaaaatattagtaataaattgaagagtgtaattagaactctcaattacctctaattaattatatagttagataaataagttaaattgtgtaactacttttaattatacacaaatttaatttactatggctttcaaaatataaccctaattaatatcagaagaaaattgctaaaagatactattagtgcctagctagtacttttttcggtttcatactgctatttgtgtaattaagtatcgggttgtaactgtaaaaaatagttgttatgcaatatatcactaactaatcgtaaagcatacctataaaaaatattgagcaccgctaatatccaataacaatactcgtaaaagaaaactaaaattcatgatcttctttaattcatgatgatcatgactttgtcaaagtttcacctaccaccttgatgtttagtcaaacttttattcaatttatag

SEQ ID NO: 86568 - DNA, 959 bp, Cannabis sativa
aacacagggtccaattggtaacttttgcaaaacagagggtccaaaatggtatttaccctaataaaaaatattaatttttttaagtaaaacataatatgtattaataacaatgaaaatatgtacacacttattcattataatgaataatttttagcaaaaatttataaccaaaaaactatttgtattctttgtgtaactcttacaattattaaccattaaaactatttttattcttccattaaaaaaactatttgttttctttacataactcttatatatagtgtgtgatatacttaagttttgtgtccattcataattttaaaatttttattatatttctttttcttctaacttttgatgttctatttttatatatttacttggcgcactaacaattattcatttttgaagattttttgttgtttttttctaattttttatgttctatatttttcagatcaacaaatggctattcaatgacatgtgcttcaagtaactttttctttgctttaaaaaaatcttactaaaactatctttatattgcatatgtatttacattcaatttaatttcattatgtttcgtctttatattttatttccatcatatatttcactttttgtactaatcttttttttcttctctattccactgtctcttataagcttgattatcacaagtttatatcttctattttgatcatgacaatgatctcaataattaatcttttaattaagtatatacatatatatacacacatacacatacagtatatatagcatatatattatgttttataattttatattgttttagtgaatatttcttatgtgttcatctaaataactattttttatgtgagcttgactctataacatgcctcttttgtgtatttgtaactccattcatatacatattgtaatgaccgctctagtaatgtggattagtaaaggcaattagc

SEQ ID NO: 86569 - DNA, 548 bp, Cannabis sativa
  modified_base (502)..(511): a, c, t, g, unknown or other
atccaatgtgaaaaactttgaatcctgtgaatttgtgcttcccagatgatttggttattttttgtaagggcaatgttgctaccctgagtatcattcagaaggcttttgatgaattttgtgctgcaactgggcttgttgacttctcaaaatctcatatttattttggaggaataaattctgctttgaaacaacatctgtgtaatatctcccatatggctgaaggttcttttcccttgaaatatcttgggatcaatctaagacctaccaaatggaaggcttcttgtgattgcattattgaaaaggtccgtaaaaatattcatcattgggctagtagacatatctcctatgctggtggagcccaactgagtcattcggttctcttgggcattagtaattattggatggagatttttattttaccccaaaaagtcacagttgaaatcgataaactctgcaggatgtttctttggagaaccaaaggcatgttggaaattattttacnnnnnnnnnngatttactcacaagtatgttgattgacaccctaaata

SEQ ID NO: 86570 - DNA, 1755 bp, Cannabis sativa
cccattactttgactacttctccaacatatgatccaggctcctgaagtagctgtagctcttccctaagcatcctcactgttgaattacataaataaacaaaatcactaattgatgcaacaattccagattacaaaataataacccaacaacatgttaaaaaagtttaatacttgactcccaatataacaaaatctacctatgaaaatggacgaattcaagcagaaacaataatcagttgcatgtaaatcaccaaaaagagtctttctgaaagtgcgttttacttttaatctttttatattatttcctggtacttttattaaaattttctcattgacatttttgtagtttttatgattagtacgaagtgcttgacagttccaattcatagtccgaaatttaaagctcacacaaagaaactataatctaatctatatataggaaatgactcctccaaatgaattggaagaaacttcaatctacaagttaatgatcagcttttggagacaactggatgatttaacatcttggaagccaacaatgtttagttcagtagttaaaaaatagtgtatgaatggttggcaatagcatatcccattggcaaccattaatttggcaggaacaatgtctaacataaagtaaaacgtaacccaacagagtaagcaacaccaaaaatgaaaaacaaaaatgatcttaatgagacataaattgaattgaagcaagatttataagtaacgctgtaatttctaatataagttatcctcagcactcttatataatgataccaagcacgaacataacacaaatgtaatgataccattgcaatttctaatcacagttaacctaagcactcttatataatgataccaaacacaaacatagcacaaatataatcctcaacactcatttcaataatcaaacaagtactattgcatatttgtcattgaatatataaaatatttgcattgtttacttggtgtagtggacaaaaaaaaatttcttcattagataagatcaaggtgattgtgaaaaagtcttttggtatattcatttcaagctttggacgatataactttttttgtataaaaatgtcaaacaacagaaaagaactcactaacattacttgattttttttttctaatttctaccatttgttgtaatcttttccctagcaacacagaaacataaccgagattaacttctcctctatcaactgagtttataaattacaaacactaaaaattgaaaccaaacaaaccatactcaagaacataatttaatcataaaatatatcatgattcaaatctccaaacatgttctaataaaatatgccttagcaattagtagtcatcatcaacgcttctaaactagagattttcatcaacgagtatattgaaaataaaaaatatacctcaatagagaatttaaaaaaccgttctaaagcagctgcaatccaaagcaatcacccaaccactgaaatccaaatgtatgacagagctccatgcttccaaaaacaaaaacacaatttaattttaaaaaataataattataattataatcattttacacttacaagtacatattgatagttaggaagacttactatcatgctagtcatccaaaatcaaggttgtctatgaaataattgggtctgttggcaccaaatcaagaatgtttatcaaatttactctcggactcatactagcatagcaagcccgtaggtgtagttgttgaaaaatgttgtaattcaacaacac

SEQ ID NO: 86571 - DNA, 706 bp, Cannabis sativa
atgatatgcatggattgcattataactaattaatcccaccttatgtatgtatattcaagaagtgtgtgtttttctctttttgaagaataaatgggttggccaaaagaaactagaaagtaacaaaatatggataaatttgatcgccttttaattaaaggcaaagagaaccagttcttcttcttcttttttttttttttaatgaacaaaaaaactctagctcaaaacaacacttatatgcattgacttaacgagcatagctctttcgataaatcgttctagaaactagagtggtaaataagggctggacttttttgatacggcacaagtgcaagagacgcaaacacactatatgaaaaaatataaatttaaatatcacatgaaataatataataaattggtacgacacgataaaaagaaatacacttaaacaggtcacaatatgataagttcgaagacactatacgtaagtacaaataaactaatttaaaagtacaatacgtttaaaaagtcttttaatttaataatcataataaaaaacatatatatatttactaataaatatttaaatttttaactataatatttaattagcgtgttaaatttttaaaaaaaaaattaaaaaaattttatcgaaaacaattatgtataaaaattaaaacataaattggccgcaaattgttatatagaaggcttatccaccgtttca

SEQ ID NO: 86572 - DNA, 793 bp, Cannabis sativa
  modified_base (524)..(529): a, c, t, g, unknown or other
ccacatcaccacctctttcaccttcaggacccataccaatgttaaataattgctcaccattatgaaggacactcctgaacctaccatctttgtgttgtgctattaaatcttctttaaaagtagtagccaaaggggtagtgcacttacttgctttttcgagacgatcaacaaaccaattttgaagtgcgaacctgatgaattcagccaaaatagttattggatattttctaaattcttctgtcaccttgttgaagtttttggcactgttgtttgtcaatatgttgtaccgattgcttggacaataaagacgagcccactatccaaaccctatttgcttgaggtatgtagcaaaggcaagatccatccatttgagcacctcaaaatgtctatcacattctaccttgttccatgcataagctacaagccatatttgcttgttacatacatcagtcttaaacttgtgaacaacattcataataatatgcttgaagcatgcacaatggcatgcttctgggaaaacaacnnnnnnagcatgttcaatgctttgatgcctatttgatatgaacataaggttttcaacctccccaatggctccccttaactttcgcaagaaatacttccaagagttatgattctcactgttgataattacaaaggctactggaaataattggttgtttgcatcgtatgcaatagcaactaacattgttccccatactttgtcttcaagcatgttctgtcaatactaatcataggacgacaaaacttaagtcccttcctacaagcatcgagt

SEQ ID NO: 86573 - DNA, 1318 bp, Cannabis sativa
tcttggaagaataaaaaatgacctattttgatgaggttcaagacctacaaaatccttcaatggttcttgataccttgttctgtgaggaagaagattttgaagatgagtttgaggaaaaagaagaagaagaagagagtaagaactgtgataatgggtgtgagaaaaagtaacaatttttttccattggttttgctagaaaatgatttattttggaaaagtgatgaactttcttctttgataactaaagaggaacaaacccatttttgttacagtgatctaagcttagatgaatcattaatggaggtgagcgtcttcttctctctatcattcctgataagtatctaatcttttacttaatgccaaaatggttctatcattttctaatgttaaagttggtttttttttttgtcactttgacattagattcaagatttctgggctatcaatattatctactgcaacaataatgagattgaaccatttaatacagtagagtaccatttgaatgtattaaaattcattgaggtacacatctaatcacatgactttatttgttatttttgaattattactattcacggttttgcttcttttttattaaacataaatgttgtgaacttattgtaatgatataggaagcccagttgaacctatcgatgcatcattttacagtgaacattttatcatctaaaatgataatcacataaaagaaattgaaaagaaagaaattggttcgattgaaaagaaaaatcaaaaaatatttctatggcattcaaaggaaaagttaagagataaaccttaattgtgcagagttattgatgacggtgttggcaaacggcggtgcgagtgatcggggaaggagaagattcctgcgattgaacttgaggagcagcaatatacaatatgtctgggttgattttacgattgaaaaaaaccctcaataaaatgatagttttttaatttaaatgagggtaattgggtcaactaaaaaattcattaaacccaaatttcagcttcccgtaaaagctaaaatctaaaagttggtgtgtgccaactttaactaaaagccacaattttagcttaaattttaaaataagctattttttttattttaccaaacactttttaagcaacaactttttcaaaaagcactttcaactttttaaaaagctattccaaacgggcccttagtcaaccaacttaactgccttgacagttggcagttatttcagttggcagtttatttcagttaaatgaacattaacctactgctatatataaaggcattcaacaacagaataagagagagagagagaga

SEQ ID NO: 86574 - DNA, 820 bp, Cannabis sativa
agtgatcatgtggaagttacaaaatattaactctacctcttatgttacaactatatgtaacttctaatcacatattattacatgtatataattcacaattatattatatataataagatatataatatatcacaattttaatcttaaacattatattatttaataaataatataacagctatatctgatagcccttcgtgagttgttcataatcaacgcgactggtcttaacttctccacctagccccaacatctcttgcacctcgttgtgtctgcatagttatgccttagtggacaacagggaactcgagcctggcggtgctagtgctggatcagttgctgacgactacttctattatgtacaagtcaatcccacgaggactaatatcaatttattattcaacaattagtaacaagaattagaaaatggaggtttggattatgagaataaaataacataaattataaagcaaattaaaggagatactacgatatgaaataaatagttaaagattattctccaccctcaacaatcattcttaatttctattaatgaatgtaatttaagttttccaatcaaactcttaatctcgtagaaaatgctaaaatagtcaaattattccaatctccctactacatgtaatcaagaacaagtgctcaaaaattaactctcttacctaagcagtaaattcaggttacatgaaatttatttaacttagagaaagctttaagattaatggtgatagactaatcaaggtaataaattaatgaagcatatcattcatttaacctagggtctattcttcatcacaattaaaag

SEQ ID NO: 86575 - DNA, 1305 bp, Cannabis sativa
tttatgccgttataatgtccattttagtattttattttagtcaactttttaatattatcagtttttaataattaattattctaccagtattaaagtagtttataaaattacccacgtggggtccctatagattaggacgttacaaggtagttcgaagtgaattgtcttgtttcttgttcaagaattcagtgaaaagcaaagaagatgggcactgcaaagtatgatctcgataagtatactggaaagaacgaggacttcggtctatggcatgtgaagatgagggccatgttggttcaataagggcttcaagcagccctactggaagagaaagacttgccaacttcgatgacaacaaaggagaagaccgagatgctcaaagaggctcatagtgccatgattgtcagtcttagtgataaggtgttgcgtgaagtttcgaaggagaaaacagcttccggagtctgaaattggaaagcttatacatgaccaagtcactcgcaaacagactattcttgaagtagaaactgtatgcattcaagatgacagcagggaaaagtgtggaggatcacttagacgaattcaacaagatcattcttgatcttgagaatattggaattaagatcgaagacgaagatcaagctatcactgttctgaattcattgcccactgaatcatatgaatattttgtggatacaatgatgtttggaaaggaatcattgactcttgaagaagttcagaaggctttgatgtcaaaagagttaaagaagaaatctgagctaaaaaattaagttgatggagatggcttatttgttcgaggcaagaattccaagaaagggagcaaggagcacactggacagaacaaagatcaagggaaatcaaattcaaagtttaaaagaaagtgcttcatcagcagcaagactactcatcttagaaaaaattgtccaattctgaaaatctacaaccagaatcgattaggtgatgcagaagtgatttctgatggtgatgacagtgatggatatggtagtgttgtagttcttgtagtctcatatgcaaattcaagaactggatgggtgatgtactctggatgttcatttcatgtatgtccagataaatcataattcagtgaatatcaagcaatggaaggagggattgtaagattatgagataatggatcatgtcctatcactggtttgggcaaaatcaagttacaacttcatggtggaggtgttgcagaatcgaagcaagtgagacatgttcctgttgggttttgtgccttaaataaaacccatttcaatataatcatattta

SEQ ID NO: 86576 - DNA, 1111 bp, Cannabis sativa
ttggttacaaacaatggttagaataatattagtaattatatgaagaaaaaaaaaactatacatgcatgtatagtacttgttcaaaaatatatatgtatatatataaaataaggaaaagctggtcctttttatatcatacgaaatattatatttaatattttgaaaaagtttgttccattgtcgagtataacagattataatgtcattgtcatccagtgctgggttgaccaacatgtgatggccttaattaattaactagattaaagtttaataattcacacagcttttaattaagtactaattaattatatgataatgtaaattattattattaagtatattgtcttctttcggctgtgaaaaaagatcataagaaatgagaggagagcaaggtttacgatcgaggagcaaaataaatgaataaaatatataattaaagtctcaaatcatttaatcatttaataaaataggaccgggaacctgaaccagaacccaaacttaagacccgaacccagacttgggacctagaccagggactcaaactcggaacccggacccagacctgaaccccgaaccccgaagccgaactcgaatctggacccggactcaaaccccaaactcagaccctagactcggacccgcacctgggacccggaccccaactcagacacgggacccaagacccgagaccctgacccagaccctggcccggactcgggacctggacctgggaccaagacctgcacccgaacccaagacccgagacccatacccggacccagactcggacccggacctggacccaaactcggactcagactcggacccaaacctaaacctgagacccggactcgaacacggaccccgaactcagacccgaactcgaacctgaacccaaacccaaacccggacccagacttggacctagaccccgacccgggatcccaacccaaacccggactcaacccagacctagacttggacctaaaccccgacccgggaccccaacccagacccggactcagacccggacccggaccctaggctcagacccaaacccagaccctagacctagatcccaaactcaaacccaaacctagactcgggaccc

SEQ ID NO: 86577 - DNA, 1423 bp, Cannabis sativa
aaaaattggagagaagagaaaggccacaccttgttttttagtgtcttttttttaagtgtttttccatacacaagacatagaataatgccaaatgtattggtggcttccttaaattgccgacaaaagatatgatgtttctctttctcacttctcttgtaaataaatatattgtgagatttaattgaatttatttatttccaaaacattacaatcttcctatttattattcattgcacatgtcacgtgatatgtgaattccttttatgctaccacacttcctagttatttgtttgagtaatttatggggtaaatagttaagtttgatttttaagtgtattgataaatatttaagtttaattttagacagtaataattaataatatttaagttttattcgtaaaacttacttaatcattaagtgtaaagttattatctgtgtgttattttattattggtatatttaaattaatttttaaataaaaataaaattttaatgatacagatcaatcaagaattgtcatgtagacattgacttgatacttaacgactaaatatttatcgaagttttaaaaatataattttatcattattaccgtcaaaaataaatttaaatatttatctgcaaccgagtgttaaacttaaatatttagagcatatccaataattaaattttgtagaatgctacctgattgaattgatctagcatatccaatgacaaattgatctgaatcaaaatacgacaagcatcgtagaaaatggacttttagccaacaagctaattatttgaccaaaaaatatataaaattaaattatgagtcattacaaacaaagtaacttatataaaactaaattaccacaaaaataacttaagaccgtataataaagccatctgacctaaaacaaacaatttgagcaaaactatcttaaaagataaagggaagataaatgaagtggattaaaatgagatttcattggttttatggtactaaattaagtacgcaacataataaaaattaatagattaatatcgtatcacatcctcaagatcaccatatgtatggtttaatgtaaatatgcgaggtaaaatataaaaagttagattttgatgatgtattttaatggttttttaaaaatgtatattttttatttttttagtgctaaattatatacgtggtgctgatgtgacaattgattaagtaatcatgtcatcattttttttttgtcacgtgtgataaaatttgacaaaaaaactaatttataatattgtaaatagttcactaaccatttgtaacgagctaaaaaattcagggagcacaatagtacatatgctataattcggggctaaaaatcctaaacaaccatttaattacatctaattactactactagctaggtgtgtacataaattgatctaatccaatga

SEQ ID NO: 86578 - DNA, 1413 bp, Cannabis sativa
  modified_base (1290)..(1294): a, c, t, g, unknown or other
atcaggagaggtcatacctgataggtccaaccaggttaacggtgccattccacctgtcaaccaagcaaattaatcgctaagacagccaggcacttccgtattcgaaagtttgggaatgactcatgacctaaggaatgatctgaacataaggagaggagtagaagatcagattgtcacgacgatcatacagctcagagcctgtgctcaaattcccgctcagaaagatactgaagtgattcaaatcgaccagaatgccgagcaagttaggccagccgtacacggacagctagacgaactgaaaagtatgttccaaggcatggctagacagagaaacaatgatctcgagctggaccgagcacgcggaactccattctctcctgagatctcctgagatcaatcttctcgcattgccctacaagtttaaaatgccaacatggaaaaatgtatactggaagagaagatcttctttcccacctcaaatatttcaaaatgcaaatagatttgcaagggatacgaggggatgtgggttgcagaatttttcctgctaccctatcggacgccgcctagcaatggtatttcaagttggccccttggaagtttaattcatggaaagccttctcttcagaattccatgcacgattctcctcctctcgccaactcccgttggatctgcgagacctggttgaagtcaagcaaagaccaggcgaacctctctgagcatacatcagcagattcatgacggaggcgaccaaagtttcccgggtaacttaagatggaaagttgtccgcgatactggatgcatggaagtcctcggtgaactttagaaggacataaggaagaactggccggtagactcaatgagtgatttccttgaccgtgccgaaggcttcattaagctcgaagaagccattcaatgagcagaaggtgagcaaaagcttggcaagtcgaaagctccttctactggaacgtccgcccaactcccccattatccaaataattcaagctcaagtggtaaacattccaacaacaactacgcgtgaatgggaagaagggaaagttcgtggcaaatccgaacaagctccccgcgagaatcaagcaaagtacaccgcattcactatcttgtttgaagacataaaaagtgtttacatggcaactcagttgctggccccacataagaaacctgggcccatgaagaaaaatgtcagcaaaagagacattacaaagttttgtcgattccacggagactacggccatgacactaatgaatgcaacaacctgaagcgggaaatnnnnntcctaataaggaaaaacaacccacttttgctcaagtatgtcaagaccgatcagggtcagaggaacgacattaaccaagatttactaccttcgtcgatagatggacatctgtaagtcatc

SEQ ID NO: 86579 - DNA, 881 bp, Cannabis sativa
  modified_base (416)..(416): a, c, t, g, unknown or other
ctggtaaaagtgagtgacatttcttatagtgtgttttcttgtatttttatagaataccgtaacaatgtaaagaaaatgaacctaaacattgcaaagagtgatattatataattatcttttttttttaaaatattttggcaaagaactaataatttaaaaccttatttatttatgggtaaatatcattttagaccttgtgttttgcaaaaattatcaattggattttctattttgttaaatgataaaatagaccttatattttccaaaatggtaaaaataggactctgggcttaattttcaacaattttattttttaatataatcaactttaagacaatttctaacatgaacagatacagaaaatgtaactaattttattataacatctttagattagattattattaaattttatnttgacaaaaaattagttcatggtcctacttgtacaattttgaaaaatacagggtccgttttatcatttaacaaaacaaattgttcaattggtaacttttacaaaacatagggtctaaaataatatttaccctttatttatatagataatttacaaattaataaaaatatatgtgttttttttacatttattttgttttggtttttattttataaacggtattaagattggatttgctttttctattattcatacataatggaattgaggtaataaagatattaaacaaaaaaaaaaaagtgaaatttgtgataaagattccatactctaatttttgtgtgttaaaattgaaggaatgttcatgttcgtttaattcaattcgtactaaatgtaagtgtataatttatagtttgtatctattataattcaaacaataattcacatttaatctaattaaatttgtaat

SEQ ID NO: 86580 - DNA, 647 bp, Cannabis sativa
taggatgttaataaaacatactttgtagtaaatctagatcctggtaaaatacttccaacattatcctgcttgaagatttggacttttcgtcaactagtaagttgtgcatgatgacttagtcctcgtactaacaggttgtactccacgtagcatcaatcttgcctatgtggacatgccacgttatgtggacaaaaattgggataaaattttcccccaagtccctatgcggacgtttgtacagatagggactttccaacttcaattctgactgttgaagtcttaactgggcagcttatggatacttgggctcttcatatgacaacttcaattataggaactcttttttgttgttcatgttgccactagggaactattgctcttctacaaggctatttggtgggatgtgtaactgcctactacatgtttgaagaaaggggcatgccagaacctatataaggttcatttggaaatacttcactttcacgctactattctctctctatcttcttcaaagtctcttgagaaaaaataaaaaggaagctctccattttccttagaagcccgacgccccagaaactccaaatcttgggattttctctctattttgactatcaaagcttcccataggcatcctcaatggacttcat

SEQ ID NO: 86581 - DNA, 584 bp, Cannabis sativa
cacgctaaaaataagattcaacaatctattttgcgcatgtataaaataaaagagtcttacgtgtaataaattatttgaaccttttttgtttttttaaaattttttaaaatttgcataatatcttaaataattacaatataaatgaccttgaaaaaaaattagactaaaaaattttctcagatgccaaaataaataaaaagtgtattggtagacccttttaggggtgtatttatagaagtatccaaaatatattattttggaaaattatagggacattactttttttttttgcctatattgacaatttttatttttaacatttaaaaattattagaatttttaaaaaagaaatgtaatgtctgttataactttaatgattttaatgtagaccattttataaaaaataaattaaaaggatatttatagtaaaatttgttgaatatttataattgttatacatataattttaataaataaaaagattacaaaagtactgtatcttacaattttattgcagatgtattttttttggctattaagtgtcaactctgaaatacgtagcgacatattttggactatgtatt

SEQ ID NO: 86582 - DNA, 554 bp, Cannabis sativa
tgtggggaagcggcggcctgctgtttggccatttctgcagtgttggatgtagaagccaagtttgttattgtggagagcgactcgagggtagttatcaatgctcttataatgggaaagagactcattaagctattgaaaactatgtctctttttgtaatagctactctcatttatttactagttatattttctcgaatattagccggacatgtaattttgctgctcataatgtagctaagtgagcgtttacccacaaaaaattagagttattccgatatctactattccaattaacatattgaccgcgaggtctatttttctattaatcaaactcaaagtacgctttattttaaaaaaaaacacactcaagaactcagatcaatgataacaatttgcaacaaacacagttcgaattaatgaaatataaacaaaatggatcaaaaataaaaaacaatttgaattgtacgttcaatgcagtagtagagaaacctttgctactggatttaatttacaaaaaaaacttactctttaatggtgaaaacactaactcgaac

SEQ ID NO: 86583 - DNA, 1010 bp, Cannabis sativa
ggttttaaaactataacctcttgctttccaaatgcacgacccacgtgcttaaaaacagagagttggttatatgattgttttacaactccgtcttgattcctatctggtcggttgaatcgagtttcaatgtcacgaaaatacatggagcaaaatgttagggcttcattcacaatataagcttcagctatagaaccctcgggacgtgccagatttcttacatatttcttgtaaacagacatagctctttcaaaagggtacatccatcgcatatgcacaggtgcaccaagaattgcctcccgtggcaaatgcaaagccaaatggaccattatatcaaagaaagccggaggaaatattttttccaacttgcaaggaatgattagccaaaaaattacagtggatcctcttaataagaaatgctaaagattacttcgattgttgatgctattattgtgtcatttgaaattttgttggagagtttggctttcacttattcacaaagtttaaacaagttttgaaaattttcaacaacctttttcgctaacatttttaaagttaacaaggacacaactactgatctttaacatggaacagtatattagagagtagagaccttaggcaagttttaatttgggaatttggcaacagacaatcagctaaagctttcactgacaaatgttagttttgtggtactaaatcagatatccgagaaaatattttaataatattgtcattgtacccaaaatctttcatatatatatatatactatctgttttgttaaatgataaaattaatcttgtattttcaaaaatagtcaaaataggactctaagtttaatttttgacaacttttttttaataaaaccaacttgaagacaattcttaatacgaacagatacagaaaaagtaaacagttttgtcagatcacatttagatcgaattattattaaatttgattttgacaaaaaatcagttaagggtcttatttgtactcactactacaaaaacaccct

SEQ ID NO: 86584 - DNA, 776 bp, Cannabis sativa
aaaaaatagtaataagtaagaagttacttaaaattaagaattttgaaatgataaacaaaaatttgattgccaaattaaattggtggtccaaaaaaacatcaatgatacacactaaatcaaattaatgaaacttttctcgttatcataaatttattaatgtaaataatataaattagatattttttaaacaaactatattttcatttagtgtgtagtactaaaaaaactttagttcttaatatttggatgatttaattttgatttttaaaattaaaatgaatgaaatagtgacatgtatatagtcacaagtatataatttttaagtgatgtgggattttttttattttttaaaatcaaagttaaaacatcaaaatattttaaaaactaaacagtttttttttttttttaagacgatacattacctcttttatatatgtatttgctaaatgaaaattttgtttttttttgtaatttcataataaataaagattattttggtaattcaattagtataagtccattaacatttttatttttattaaagatagataatttagatattttttaaacaaattatttttatttagtttgaatcagaacagaaaatatctttttttctttgaaagacggttaaattcctaaataaaactaataacacttaaattaaattaaattatataaataaataaaataaaataactattatagttgtgagtcattaacacacacctttctctatctttctcactcgtttttcttatatacacatatataca

SEQ ID NO: 86585 - DNA, 1000 bp, Cannabis sativa
attacccatgaatgggtaaaattagaaaattttgagtttttatgcttaatttttctatttaattaaaaaaaatttctcacttttgtatcatatgggctgagattattctatcggtaaaaaaaaaatttaaaaaaatgattttttagcaagaaaaataagaaaagaaaaaattaagtttgagttaaatatttttgtatgaatatatttttgatatagtgtaaaaatagatattttttgatattttttttaattaagtagttaattaaacatagaaatttaaatttgtgatttgattattcgttattagatcaaaatttgatggtttgatatttttaaaattaatatttattgttaaatttatttagtagtcattcatgggtaatatccattaaaaagtgttccatatatatatatatatattagatcattaaatatatacagcaatatttaatatatcatatcactgaaaattaatataccgtagtaataaattatataccacaaagaaattataacaatactaaagtaatactcaaaaatataaatatcatgctaacaaaattatatacaccactattgaaatatgtatacatattaagtttatatataatcattatatataataaaatagaaactaaaaatcatcttcaataaataatatactatagagagcaaaaattatttaccatacaacaaaatatatatacctattataaaaaataaaataaaataatataatatttataaaaaaaattgtatataccatatttaaattcatttgctataatttccatcctttatgtaatctatacacacttctccttagtcatatcaaataaatatgatataatttgagaaatacttctacagtaagagctgaaaaagtgatgcccctaccaaacaaaattcctatttttttttttatgaaataaaaagttcctatatatgaatgatattatgtattgtacatatcgtgtgtgcaggtttcattcgttgcacc

SEQ ID NO: 86586 - DNA, 1862 bp, Cannabis sativa
gaatttttatgcaacttcagcctccctttgcgaaagccgaagcttgcttcataaaaattcaacatgactctcgcatccacattattttttgtgcaagaaaaatcattggcggtaaggcacgtcttcaaccctccttcccaacatagaaagactgcttgaagtctgtcttactccccatgattctttcaccctttgatcttttcaagcaaagtcatcgcttgaattttcatgcaacttcagccttcgtttgcaaaaaccgaagctggcttcataaaaatttaagatgactctcagatgcatgttttttttgtgcaagaaagatcacttttgtatgacacgtcttcaaccccccttcccagaacggaaggactgcttgaagtcagtcttactccctgtgatgctttcaccctttgatcatttcaagcaaagttcttgcttgaattttttatgcaactccagcctttcttcgtgcaagccgaagcttgcttcataaaaattcaacatgactctcgcatgcacgttattttttgtgcaagaaagatcactgggggtatggcacatcttcaaccttccttcttagaatggaaggactgcttgaagtctgtcttactccccgtgatgctttcaacttttgatcttttcaagcaaagtcatcgcttgaatttttatgcaacttcagccttccttcgaaaaagctgaagcttgcttcataaaaattcaacatgactatcagatgcactttgttttcgtgcaagaaggatcattggggtatggcacatcttcaaccctccttccatgaatggaaggatttcttgaagtctttcttactacccgtgatgcttccaccctttgatcttttccaacgaagtcatcgcttgaattttttatgcaacttcagccttccttcgcggaagttgaagcttgcttagtaaaaattcaacatgactctttcatgcacgttaattgtttttcatgcaataaatatcactgggggtatggcacatattcaaccctccttcccaaaatagaagaactgctggaagtctgtcttactccccgtgatgctttcaccccttcgatctttttaagcaaagttatcgcttgaatttttatgcaactttagccttccttcatggaaggcgaatcttgcttcataaaaattcaacatgactcttgcttattgaaatggacctcaacataaggaaaattgtctacgcaagaacgcaggcccaggtttcccttcgggaaaccaaaagcctaccatgctgtgagagcctagattttcccttacaaggtccatgtcatggagggatcatttggggccagtcatgcaactgggttttcacctacaaccccatgactttttctcacagatgtcaggagattactgctaaaatttcaagaattcccctccaaatagtcacagagtggaaaaacatggcttggatgaatagtatgcttcccggagcaagacagaactctactcagacctcctcctcaaaggacatgacttagattccaagaaaatgaccgagaatttgagaccgaaattcctagctcatttggggggtatggtacgcccaatttctgacaactgcaacttcttatgtccatttgccaaggttactagctcaagtgtacacatgcaaccaaaagtaggaaacatcttcaagtaagtcttcccaaaggaaacacgcttgaattctttcctaaaaggctaaacttgagtatgaatctgtgggtaagatgcatattcggccaaaattcttgaaaagaaacatccacccgaatactttcttacaagtctctgtggagttcttaaaagtttagtccatcgagttgcataattggcaaaaacttta

SEQ ID NO: 86587 - DNA, 1399 bp, Cannabis sativa
atactctataactattttattgtacctgttttaatttttaccttccttttaatagtctttgatttatacccacttgtctaagttttgttcccgttatagccttaggttagtaaaaagaaataaaattcaattacatctctaaataacacgataacctttgtcacttccttcctttttcgaacaatcgacgattttggcccagtcttccgtcttttgtgggcgcacattttcacgttcatccttcagttggcggctcaacccaatcctccatgtatggtcgataaggtgcccgaagaagagtttcaccatctaaattataaaagtaaagcaaggtacttatttgaaggatgtggtaatggataagcataaatgtaatgtgatgatgattggaatgacaaagataagaaaattcattctgatagtaggaattatatttttcttaatgcttgcatttgcttgctttatttcttattatagttatgattatagcgattgtggttgtaatcggtggtagagtaattggaggaacgctactcatggtggagcttgcgtgagtttaatttctatggaggagtcggagtcgcctgcaattccattaatcaaagtcgtggggtatattagacagttcaattataaaaaaaggtatattttaattaaatttattttgcagctatttttggtgaatgtaaaataaaaagtggtaattatcagtttatccctttcttatttgtatgtttgggtctatatattgtgatttgtcagcataaactagggtgggtttatctccttaataaaaatataatagaaagttatgtacgaatctaataatcctagttcctattcctaataatataatcccattgttaaacaaagtcacaaatagactcactataacttctgtattactctcaacaaaaactaaaccttaactacagcttccacttcaatcattttcccctgttaggaaaagaaaaaacaattggcaccatgattgtatatcccaacaccaatctcttcgaaaaactaaatttaaacaaagaataatttattacaaaatctaaatagtctttttacaatcaaagttatagaaaattgattttttttttttttggtatttttaaaatgtctaaatacttgatgacaattgtatctttgtcagtaaatagggtcatatgcaattttgttttttttcttttttctttctcttctttctataaaaataaaaaagagaagaaaaaagtatcaaatttgtgaaagatgtcatccaagtaacgacttcagttattaaagaaaaagaaaagaaagaagtgtaacgagttgagtgtataccctttttatattgtactcttttatttttaccatcttttttaaagtctatcatttttacttctttttttaa

SEQ ID NO: 86588 - DNA, 852 bp, Cannabis sativa
  modified_base (475)..(475): a, c, t, g, unknown or other
tttgagtgttttagtcttatctcttctgtgacatgattttattttattttgttattggttattctttgttttttaatgactcgtcatcaaatggttattaatggttgagaataacaaattctctgcaattgaaaaggtagttagtagtatatatagttacgtaccttgcttaatagttgagtgctcaagctatgaagttgaatgaacctgctggaacaatttttactgttgtgtcttctgagcagtaaataaaattgaataagtaaaataataattaagagagtttagcggccaaattaataataatcaacatcctaaaacgatatactaataataatcaacattctaatgaagtcattgaagccatgaggattaaagaggctctcagttggttaaagaccaataattggcaacatgttcaaatcgagacggacagtcttgtttcagtacaagctattcgaagcaaccaagcaangaagtccactttcggccttttaattaaaagactgcctatttttgtcatctaccttcccaaatgttaatttatttttcattagacgatcagcaaaccgagtagcacattatactgctagacattctcggtatcaatctaattgtagtatttctgatatttctatttctagtgaactcttacatcttttgtattcagaatgctgctaatttatttcatgaagttgatattttatctcaaaaaattattatttgacttaagttagtatattccatttctatacgacacctctatatatataattcttatggatagatgtatgacttggaatggaaacaagatcaagatttgagatccagacggcagaaaaggcgagtagt

SEQ ID NO: 86589 - DNA, 562 bp, Cannabis sativa
ataagtgatgcacttatggtatctactaattacaataaagggtggttttataaataattagtgattttttataatatttattaaaataaaataagtgatacttgatattgaattgtattttgatattataccttttaggaactatgtgtatcttttagcattttttttttatataatattatgttgaaaattaatttatattaaaatattatatatattattttttttttatcttaagagaaaaaatttgaaatgacgaggacaaaatattatatatttataagcacatattatatcaaatataatattacataaaaatatgatataaaatatattttaatacacaataatacaatatagtgtaaaaaaagaacaaataatcatttttacatgtttacgaatttttttatttataatgttcttttttacaattttacttattttgattttttcaggtattttatttgtattttgttaaaaaaaaaaaaaaaatcaaccatatttttacattagtttcatgaagcaacaacgtgaaaaccataaaataaataaaaattaaaat

SEQ ID NO: 86590 - DNA, 906 bp, Cannabis sativa
tagggcataaaacccaacacgttcctccctaaacgttgtgtttccgtcgtgttggttctctgagatcccataggttcttttctaggataatgggtagttccctctggatgatttccttcatgtggaatgttatctgccattgatatgggtttgtaattgtgtttataaagagagattttttctgaatttttatcactaaggctatcaatgaaagcaccaaattattaacgcagatttttgttaactaaataaatagccttttatgcaataaatatactacaacatttattaataataatgaacactagatattttacgtagttttgtagttaaatctacatactctacaagtccatattattagggatatttatttgaattcggggtgtaattcttaataaagatagttaatagaattttctctcaattttttgctccccttttcccatgaattttgcacctatttataggtgtataggttgacagttatttttattgagatctattcacttacaacttctcatgaaacgtagacattctccacatttcatttatatgaacataggataatatctaataactacccaactgctctttgtctttatccttcaaacagttatgctgactaagaaggtcgcttctcgctaagtgtgagttatccttcttatctgtctttagaagaaaaaatgctaagtatagatatctccttctcgtagtgttcttcatatcgcaaggttttctgcgagattgtgttagacgcaagatggatgaatgtaattttctccatgtataattatgtgggttaatgagtcgcaagcttttatttccaagtatgtgggtcaataagctgcaagctccttgatgtctcgtcttagatgttcttattacataccttgtttatcttga

SEQ ID NO: 86591 - DNA, 794 bp, Cannabis sativa
tttcttataacatactactaaaattaattactaaagcaataaaggcaactgaaccgtgagtcgagcttatctctgatgttgattgtacatgttgtgacgatcttcggaagacaacttgacaaccgtgataccaaattataacaccccactagtttaagcgtgttatcgtgattttatattaattgtgcagtctgttgctattcaacgaggttattaaaaattgtgatttattaaaacttttattaaattactctttaaatgaaaataaatattttttacatgatcgggatcccgtatttaaaatatttacaattgtaatacaaaacatttgatacaataattgtcacctagcgaccatttaaaataaagcatcctgtcccaaaattgtacgctccaggcctaaccaccccgacatgtacaatccaaatctgctcgctctcacggttgctcaaccttagccttgctcttacctatacatgcaaacaatatctgtgattgcacaaactcagtatgaaaaacacaatcataacaaagatatataaacaagattaagattaggcgaccatacccctaaccgtaacccttccccgcgtcccacacggtactgagtcaagaatgttcatacgttacactattgatcacaatatcaacctatactccgtacgctagtcatactctagtcatatataccaatgtgatagtgtcaaatagtacttaagccaaacatacattcgtcgatatccaatataattctaaatatactgataccgctattctaatatatatatatatat

SEQ ID NO: 86592 - DNA, 697 bp, Cannabis sativa
gggacattagtctactttagttcttaattgacaacacaaagccacattttaatgcttaataatatacattacgattgtatataatgtatctatcgaatttatgtttgtttgttaagacatcacttattctatgggtatccaatacatttcaaactctaatgagtttacgactatattggaattggcccatatttggtgttgataaattgtttcataaaaaactatataaaattatgtcaaaagagtaaaccgtaacagtgaaaattgcaatatttttttgagccattagaaacctttatgtgtggattttattactattcatattaattactcgagtacttgctaatcaaaatagatacttgcatttatatgttgttaccaaatttcaccaacaacacttgttaaagacaattttaacgtcaaataattttaataaagtttcattaaaaaaattgttatgtttctatatttactacatttaaacataaatattttcaatattaaaaatttaaagctatttaaaatataaatgttgaggactttggtaattacacacttacactatatttggtaggaataagacataggtggatggagagaaatggagggagaatggtgaaatgagtggttgaatcacttgtttagcaaaagatagctagagagaaaataagaggagaaaaaaacaaaataaattgtg

SEQ ID NO: 86593 - DNA, 792 bp, Cannabis sativa
  modified_base (517)..(520): a, c, t, g, unknown or other
cacccaaccaaggcattcataacacagtcgttccgcctgttaccaacactcaaacgaccattggagatgatattgaattacaaaatcttcgtactgctcttggactcgtgcaaggtcatgccaataccgtatatcatgatcaggatgatctccgcgcggcggtaaatctcgcattcgaggaacaaaggcgtatgtttattgagtgaagagacaaagagatggaagtgttaagggctcatcatacagagattgaaaattgtagtcggcaagctactgtgttgatacgaaaagcctaccaaactgtaggtcagaaacctccaagtgtcatccccttgggcgagacggacgaagatccaacgatgaatacttcccagattgtaatggtcagccgtcaaatccctggtcacaagttccgcttgtgggcctagcggtagggggccagaccttgtctagtaattcatcacgagaagtcatacctgatagttccaactaggttaacggtgccattccacctgtnnnncaagcaaatcaatcgctaagacagtcaggcgcttctgtatttgaaaggttggggacgactcgtgacctaaggagtgaactaaatagaagaagaggaatagacaatcatattgtctcgacgatcgtgcagcctagagcccgtgctcaaattctcgctcagaaagatacagatgtgattcaaatcgatcagaatgccgagcaggttagtctagccatacaggcacagctagacgaactaaaaaatatgttccaaggcatggctggacaaagaaa

SEQ ID NO: 86594 - DNA, 656 bp, Cannabis sativa
taacatgatacaaaatttgtattataataaatacactagttttatatttaatttagtgtcattttttaaaattttattattaaacttagttattgtattattatttatatttttatattattttatataataaaattaatgataaagttttatttttatatatataattttaataaaaatattaaataaactttaaattttgtatcaagttttatattatttattgaagcataatattaaaaattaaaataaataaaaaaatattttttatacagcataagttttatattttttgaggacggtctaaaaacaagttatcttataggtggtatacttcatgttcatattcatatgtaccaaattggataaaaataatattactatgagaacgaattaagtacatatgggtataaaaacattcaattcattattatgttaaaatattatcagcatgtattttctcccttgtctaggcccatggcctctcagcacaatcgggagtgaagaccaaatgtcatttgttatagtgaaattaaacaatttatgaatttttcttttgctgaagaacaatttttatgaatttttatgtgtaagaatattgcctatttcttttaattttttttaaggataactgttgtaggttagagttatagatt

SEQ ID NO: 86595 - DNA, 979 bp, Cannabis sativa
tcatctatggtattattagtcatttctgacagttttgttcgaaactatttgagttatctgtagaggacgttgttaagtcttatagttcatttatgagagctcaacctaaaaggaaaaaaacttgattggagcacagttgctaaggaatggtattgaagatgaatgaggtgttttatgttgagtagcagtttaattttggtaatttgtcaaaactatccttcacactaataatttgcttaaggaagggcgtgaagaaggtaggatcgtggtggtgagaaggggtcctcaagttattgtttctcggatgggtgaggatcaaagggatgaggaagggtttgaggttttaatggttgcagattctaaacagaagcgtgctaatgaggtttctagtgtggactctaatgtgaataagaatatagtttctagtgagaccattgatgtggatatgggaggaagcattacggatttgatggttaaaaaaaatgagttattggtgggctctactggtcagacacgccctgtatcatgagtggcctcaattaaaactgtcgtgggcttggcaaccgacagaatgttcagttccttaaagacatcattcgtcacaagaggcatgtgtttatttttctttgtgaaactttatgtaggaaagataaaatagaatggattcgtagacagctggagtttgaaagaatgtgtgtggtggagccaagaggtaggagtgggggtgtagcaatgttgtggcgtgaggaagatcaggcaaacttaattagtttttctcaaaactatattgatgttattataaaggtcgatggtatggaggcttggaagttaactgggctttatgatgagcctgatagagaacaacgtgggaagacttgagatttgctttagactttggcgcataattccagcttgccttggtgtgtgattggtgacttgaataatgtggtggattaggtaaataagcagggcggggcac

SEQ ID NO: 86596 - DNA, 1405 bp, Cannabis sativa
tatttgtatcaagtttgtatttatataaagcatatttatgtatagtttgtattcatgttttttgctttatgaagcaattgattgttaataagctttcttacagtgatgagtttctttctggtctgatcattgagtatgatactgctaggtctttaagattaaatgaatgttaaatgtgctatggctaagtagggggatttatcattgcagattgacaatatttttagtatgaaactgcaactaatttagtatgatattgcagattgaaaatatttggttaatggataactatattttgaaataatttagtatgatactgcaaattgtccagtttgaattaaatttcctgtaaataagtgaagaatatagcagtgagaattgaagacatttttttatctaggatacatatagtttgaagaatttgggttttgataagtgtgtgtggaaactatgtgataatttaatgtgattctgatttttcttaaactcttgaccgataataatttattttgtaggttgttgttgataagttttctgggagatctcgtggatttggttttgtaacttttgatgataagaaagctatggatgaggcaattgaagcaatgaatgggatggagttggatggacgaactattactgttgataaggctcagccacatcaaggaggttctggtagggattatgatggcgaccgcaaccgtggtgatcgtgaccgtgggcgtgaccgtggccgtgatcgtgattctggacgcgggtctaatggtggtgagtgcttcaagtgtggtaaacctggacattttgcccgagagtgtcctggtgaaggtggaagaacgagcagcagatatggtggtagtggtggtggtagtggtagagatgataggtatggcggaggtggtggtggcagtcgttatggtcctgaccgcaatggggatcgatcttctggtggacgtagagaaggtggtagccgtggaggttctggttctgatcgatttagtcgcgatcgttctgggccatatgagcgtcgtagcggtggtggaggaggttttcgttccggatcttaattgcttataattgtggtacgtaatatatccaatacttcacatctaaatagtggttactttgatacgttcagtgctatatttttgttatattggcaatagtggttacgtttggtatatgaatgggattggattttggactatttgttaggattggactagattcaacttggattggattgaattatgttaatgttatacaggactaaattaaatataaaataatttttcataaagttattttatcaaattttttttcattaattaaaattttaattcatgtatgttataaaattcaactcaaaaagaatatttcaaaaaaaattacacaaaacatattttat

SEQ ID NO: 86597 - DNA, 592 bp, Cannabis sativa
ttttttatctcatacacttctcattacttattttgattagttaactttgaaagtataattttatttttttaatttttaggctatattatattattttattgttaaaaatacattgacgttattaatttttttttttttttagcaattttaaattatattttgaaatataaaaaacatatatgtatatttttgtataaaaaaagataaccaagataaaagtaacttctttatataatttttaaaaagaagtaactaaattagtaattaactacatatgatataaatatttaaaatatatacagagaacaaaaccacatcatcatatgatcaataacattatacatatatgaaaaaaaaaaacactaaactaagtcacttatagcatatataatctgtatacaacccactaaaataaatacactacaaaaaaaaaaaatcaatcaaatgctaaattaatcactacacattatacatcgtgatgatataaatctctaaaatatacacaaagaacaaaaacaagggccaccaaggtactaagcatcacaagatcaataacaataacatctgaaaaaccgtgtttttacaaatgtca

SEQ ID NO: 86598 - DNA, 1877 bp, Cannabis sativa
ctgaaccactataattctcttatttttttctttatttctactttcgtttttgtatatttggtagcttatactttgagtactcattattcaaagtgactactcgcataattagtgtttaatattctaattttcttcgaatattaacaatatttaatgctgtcaaaagtcttctgattacaattcgcgttgatcgtgggaaacgttatatttttaagattttggaggagaattgaaaatggctacaaatcagaagacatgaacaacaacaatgaatctttcaacgttggcactctcaatgttcccatttcaggaggaggaacaaccctgttgatgctgtcataggaggagtagggtgtaccaatgtgactcccctcaacctatttcctcaattcttaaagcatactagagaaacctggacaccaacagctaccatgggacaatttctaccaatcacacctgtcatcgcctccgagggaatcatccaactaacaaccttgaaatacacggatattcaggaaaaaatgtgtgcgttacaagcagagatcacaggaaaagatcaagtttgtgcccgacgtccaccacgagtcccaaaccaatgtcgtagtgataatccagtaactaatgataataggcgtcataatgaacattctcgtaattttagggaatgtttagttgataaagaccccaatggactcgacctaaatccacaaatttatgactccgtacgtggtagaggtcccgctattcccaacacaaattgactgcctattcagaaggtgaagagactgtaagaagaggaagatcctgaacgttgcaacccacgcagtcgtgcacaactgcaaactaaagtaaacaacgtagagtctcatttttattccttgagaactaatagcctttcccctagtgtttacaccaagtcaggatcggtgttcacaagactaggaggaaggtaccacgtgtagagaagcgatctgtaaaactgcctcaacaaagtgttttgtgcacgttttcaaacttcaaggaatcacaatatagaggagaaaccccgagatcccctttttaccgattaaggtatctacttgtaaatacaaaaaacgtagcaaatgatgtcaacccgccacttgtaccagatgcacccaatgatgtggtagtacccgcaaacataataggaatggctacactaacaatgagaaatcaaatcgtacttgctaacaaccccacactgccaaaattttttgatcaagaaaatcttttgcaagcactgaggagatcgagtagcacagaaagcccatatacaagctgcatggaacgttgcacttcaccgaacaagtgcaacaagccaagctcccaaaagtttttagactttctgagttgcttaatataaagatacaactaatcctatagattatcttgataaatttaacaatattatgaaagttgaccaagtacctcaactggctaagtatcatatccttgttgcaactttggaggataacgcacacgattggttcagctagttaattgaagcctccaaacgttcgcaaaattgttcttgactcattttcaggtgaccttgagtcaacacatcaaaaaactttgttcaaaaaaaaaaacaaacaaaacacatccaaaagataatatcataaaaattgataggtctcgtgttataaatagatcataccaaatctagtgcacaacaagatgacgagaatgacagagaatcggaagaaaattttgaacacctagatgatcaataggagtttgatgggtttgaagatgattatcgaacacctccagcttaacaaccatatgcaatgtatcaactaacacctcctgtcatgtataacttttcttcgactataataccgaagtctttt

SEQ ID NO: 86599 - DNA, 808 bp, Cannabis sativa
attatggtgaaaatattgtttgttgatagatttaggttggatatgtgcattcttgattagatctagggttagatggagtagatctagggcctgtgatctttctgggtatgaaaatctgattttctggtttgatatgagcttgaagatgaaggcccgatggggcccgatgcttgtgtaaaagaaatagaatttgatatggcccgatgggtccgatggtgggcccgatgcctgtgtaaaaatagaatttgatatggtccgatggacccgatagtgggcccgatggcttgacagtgtagtgaaataaaagagagaagaagagagagagggggtgatgtaaatgggaagtattttagggatattataaaatgtgtcatattctacaaatatcaaatattatgaatttaggaaaaaaaaatttaaacatacgtaagcataaaaaactaaatttccctaagataaacagttaaaaggtaaactaacactatatcagtacaaaaaaaaaaaaggaaaattactttttgaatacacaaacccaaatccaatatccattaaaatatatataaatgccaaattgccaatacacacaacgtgaatcacacatgatcataaagtagtttctttctattatggacgtccaaaccaggaagtttcttcaccaaatttaagtatatgacataattatatataatcacttcagccaaaaaaaattatctaataatgaattgtgtgtttatccccatatgtatctcattaggggtaagagtaataattagaaaataacatagtaaagaatcacgtttttagctaa

SEQ ID NO: 86600 - DNA, 590 bp, Cannabis sativa
aaaagtaaataagacatgagattttatagaggttcgacccccttagttagcgggtaatgaactactccccttttagttgtattgatagcagagatattactacttagatcacaagtgttgtggatatatagtagctctcttaagattacaatatgagaatggatttggcgaatcccaagtgatggagaaagcctatgcgtgtgaaagagaggagatgaatgtcaaacttaaagcttgagagttagaactgagatcttaagacttagggagttggggtttgattaatactctttatacagtagagtttacatccctaatatcccttaaaaataggtaaataaatctatatttacataattaattaataaagtttaaatgactaaattatctttcaaaaataagaaagttgctgatatttttgtggaatgtcaaggtccaattcgttgcttgacttgctctccatggatgaaagtttagcaccaaaaacctaccaagcaaaagttggtcggccatgcacctgccagggtgcatggtggctagccacacagtgttgggttttgtgccctaaatgaaacccatttcaatataat

SEQ ID NO: 86601 - DNA, 635 bp, Cannabis sativa
aaagtgtgggccctaggctgggccctaggcaccctaggcacgggtcttaggcacgggtctaaggcacgggtctagcccgggtctagcccgcctatgcctagggccggccctgccaaagaaagacgacctgaagcatcgtccctaactaacataaagaagcaaccaggcaagtcacttaaggcttatctgagtcgcttcagcacaggagctgcaaaagttagaaatttgaatgatagtattcagcttaccactctttaagggatcagaaccgatctctcaacaactaggggcgagttgtgggatgccttacaaggtcgtccagtaagaaacattaatgaatttaacgaaagagcacaagtgtttgtgtgcaaagaggaagcaaggaacgatatgaaattgctgaagactggctcgggaaagaaatccaacacaagtatgtatgctcaataatggatgaatggtggatctttattgaataggaatagtcagtagtacacaatagaatgagccaaagattataactcaacacagtatgtaattacaaagaaatgtctcacattgaggaaaatcacttcaagagtgatactcattttacatccctccacacacactcactataatcttggactctctct

SEQ ID NO: 86602 - DNA, 654 bp, Cannabis sativa
ataatgaagaatctcgaaggaaacaagcacattgtcagtaataagccgtcccggaatgaaagcactttgaaactcagaaatgaccttagttaacaaacttttcaaacggttagccaaaacttttgagatgaccttataaagcacattacacagagctataggcctcaaatcgcccataacagcaggagacttctttttcgggataagcacaagattggtagcattaagatcagaaggcatcgctttataccgaaaaaaatcctggacaagtttaaccacatcaccgcccactatgtgccaacacttttggaagaacgcaggggtcataccatcaggaccgggagacttatctggatgcatctgaaaaacagccgctcgaacttcttcctcaaccactggcttaagtaattcgacattgtcctcacgacaaatagatggctgaattttatcaaggatatcatcaccatgagaccccaaggaatggaaaatatcagtaaaataattaaccataacctgaggaaggccagaatcccatttgacccaatcgcccgcctcatttttcagttggtggatgaaattattctttcgacgagagctagctgcggcatgaaaatactttgtgttgcgatccccatcccgtaaccagaactgctt

SEQ ID NO: 86603 - DNA, 1110 bp, Cannabis sativa
tgaaaaaaaccaggtcccattccgtcgggtcccggggccttgtcgggatgcatttggaagagagccagccgaacttcctcactagtgaccggcttcaacaactcaagattctgggcagtggtaaccttgcaatgaaccccatttacaaccgggttccaatcaacaatcccagcagaataaatattggtgaagtaatcaaccattacctcttcaaggccattgttccaagtagtccatacaccagaactatttttaagatattgtatcttattgctgcgtttccgattactagccatagcatgaaaaaattttgagtttttatccccactatttagccaaaattgctttgatctttgcttccaataaagttcttgttgggctaaaatctcaaaataattattttgttcatatccgaaatcaacaatggaagaaggatcggtattaccttttaaggaagcaagttttgctttgctttgcctgattcttttcttgaaattgcaggttaagtttctgccccaaacagcgagctccttgctgcagagagagattttttcatgaagaggcagtgaggcgtttttatcccagcaagcttgtacgatttgaacacaaaacggctctcttgtccaggcattctcgaagcggaactgatgcaccatatcagcaagaacagcaggagaaggttcaagataaatgggcgtgtgatctgaggaggagacatcaccgtttgataacacagcagaaggaaaaagatcgtgccagagggaagtaactagagccttgtcgagacgaatttctacccaattgttcgtgcctttgcctcgttcccatgtatacggatggccatggagttccatatcagtcaaattacaattgcatagcacttcttggaaaccagtgatcaaagaagaaggataaagtctgcccccttttttctcactttggttgcctatgttgttgatatcgcctatgatgcaccatggaagttgagactcaccataaagagaggtgattagttgccaagttttgaaccgcaagctacgatttggttccccatataaaccggtcaaacgccaagtaggaaggtttggagtagagatttcgatgtcgatg

SEQ ID NO: 86604 - DNA, 670 bp, Cannabis sativa
agatgggtggatggagaggaatggagggagagtgatggaaggagagactaaatcacttgtttggcaagagggagagaaggagggagaagagagatggagggagactttctccttccaaaccttcaaaatttaatccctccaaatttggaaggattatagaaaacgataaaatatatttttcaaaagacaataattacccttgaaaaataataaaattttatttttaaaaggacaattttgtaattttactaatcaattttttttccatccttcccacctcacacctaacaccaaacaatacaaaggagattaacaatcatctctatccctcttactccccatcctctttaacctctccatccatcctactcgccctccctcccaccaaacatagaggaaaagattgatgttgatattaggactgttaagaagaaggataaggatggcgggttttataggttgttaggttttccttatgcaatgcaaatttagtttttttgagtgttttccatatgtgattggaaaaattactttgcattcaaacattggcatccctaggcttctcaaatggcccaaaatagagaagcttatagtttttcagctaaaaatagacaatgtgaacaacatcatcttcaatcaacctttaaagcaggtatatgtgtgttgtttt

SEQ ID NO: 86605 - DNA, 922 bp, Cannabis sativa
aaaaaaaactatttagaagtgtaaaaatgaaaccaaaaccgtaaatttaaaaaaaaaattaaaaaattagtatatggggtaattctcctttaatttttttattaaaaaaattgaataacatcaatgttattgcatagtatctatgcaagtttctaagatgatatcatttttttttattggtataatatctcaatattttgtcacataatatatccacaccattaaatatcttctaaatttttaccattgaaaatgctctgaataaaatataagaatgtaaataataataggaataaaataaaatataataaaatttaaaatgtattaaaaaatgataaaaaatttaaatcttacattaaaatgagttttcaaaatggtgaaaaaattatttaattggaataatattttaatactttaaaatacaattaaaccctaaaccctaaataaataaagtaaaaattattttttttccttttattaattgcattttattaacaagagttaagtaaacaaattaagtaagggcttagtgtgagagttgccaaccaagctaaaaatcaataaacaggatttttgattttaaacataagaacaatatatataatttgattgttcttccaatagacaatgatgatgatcacacagaccaagacatataatttgatcattaattattttttaaaaaaaagtactaataataaattaaataacaacattaaaagtgttacaaatgaaaattaatttaattaattaagtagagtagtcaagctgaccaaggtgaagttgatggtgatgatgatgatgttgttgtggttgtttgtggccagagctgagcattctttacctttgacacgcttgctaacacacctaaaggggttacatctccaatgactgtcactttctttgatgccaagtctgtact

SEQ ID NO: 86606 - DNA, 772 bp, Cannabis sativa
caaaaataattaattatataataacatcattatttaattagtgaaataatttagaattaattagatatttcaaaatatatattttgattaactattaattaattactttgtcaaaagtcggaatcaaattggcaatattgcgagccatgaaagcttctccaggttgaaaatttaagatatgcgaaggactcactcgagaatcagagcatgcaaacaccaaaaactgttcatgtaattaatgcagattaagtaaatatacagatagatcaacaaaaataaatatgtacgtgtaacatttgtgttaattattaattaaggtttgcattcgtacctttggatgttgagttacggcaagttcatcgaacaagcgtggatacttgctgcaaaataagataattaattaattaggcatgtggtttttttttcaaaaacaaatgcatatatttttatattataaatgttaataatattaaataaacattagaaaaaaagttatatataatttattaactcttacttatatttgttggaaagaaagtgcttaaattcatgagcaattctcttaagaggatcaacaatgagatcgtgctcagctggtcgtactttgtcaaagctttcatcctcttcactctcgctctcgctttcgaccttctcactattcaatcaatttttttaataattaatcactataatgtaaattaattaatgtataaatatatatatatatatatacataataatatctaattaatctagctatagtaattaatta

SEQ ID NO: 86607 - DNA, 548 bp, Cannabis sativa
ttgatcaattaaaactgatcaagtgttctgatatttatataacaaagttttacaacctaaaaaccaggagaaaactaacaaaacaagaaacagaaaatatctgataagtaaccaataacagactttgggaaagataaaaacagaacacttgtaacaataacgacgtcgactcttgctcttttcctctctttggtaactattattatctccattattattattacttctactactcataagtaccacttcttcatcatcatgatcaactttttcctctcttcctaactcagtgggaacaacataaacaaaaggtactgaaaggtcacgagtcaatcccgaaagtggctccaacgatttgaccacactactcattgtgggtcgagatttggggttgtggctcaaacactgatgagccaattgcaatttttattctcgttaaccacggtaaggttccagaataacctataaatataaataataggtacgtatatatgtgttagaaaattatatataaaaaaaaaggtaaataaaaatacgaaagagaaaaa

SEQ ID NO: 86608 - DNA, 824 bp, Cannabis sativa
aagtcgaacctataggaagtaggtgatggcttaggatagttgatgctatactagactgggacagggcatttaacaaaactcgcttattaagaaggatgaaagaatagatctttaagaaaaagtactatcatgatggatgttttataagttacacactcctaaggtagatgggaagtatgtatgtgaagactttagagatgaatctgttatagaaatgtgtgccgaacaaaatccaagataagaagttagaaagagatctactaaaatttgctgggggtaatagcttatgaaggtatcttgaataccaagagataagcaaagcattaacaaattatagattaccaaaggagaagatgaaagcttcaaactcaaggtcatctactttatgaaggaggcaacgaagtatttgtgcacgatttcggcaatttcttttcaaagaaagaagacaaagaaaggtttaggcacgactaacaatatgcttacaacatcgatgagagacaataagagggcaactactcggaatggatcactactacacaactacgagactgtggatgcatctttgtggtgggtgtacaacaaataactacagagagtgtatcgcaagttcaaaacttgaggaagaggagaaattaacgctcaagggtgacatccctagattccaaatactcaacgatacaacaacaacggtgtggggtataactcaatgagaaaggttaggagagcctcactctgagacaagagacaagtgagacacaactaagaccaaactgatgtaccttaaagaatttcatggcacgacaaggatgatacatgtatttgag

SEQ ID NO: 86609 - DNA, 654 bp, Cannabis sativa
atttttagaaacattgacttcaccatctttattactagcaaaatccccttccagatcaccttccatcatatcattaatcatagcatgattctttccattcttgtgcaatattccttggccgtgacttgtggccacaccaactggaggattagtttccatattagtctggtttgaactatgaccaggtgcattgtccccagaatttgccgccggcgaccaccctctgttcctcagccaccttgctccgatattcttgtacgatctttgtggcgtagcaatcatgaactcaccataaggcttcgtaatctggtcaataggctgctggaataaacgactacagaacttgtcggagtggccaattacaccacatatgaagcaaaaggtaggaactctttcatacttgaagtgaacccaaaaccagctaccattttcatgagtgagcttccgtcttctccttaatggcttcctaatatcaagagtaacccttacccaaaggtaatccctccaaacaccaacaaaatttttaggatcgttctctaaaaacttcccgatcgtatttcctacccctcgcaccgtcgtttctttcatacatcctggtttaacatcatgtatttgaacccatatatcaagatgatttaattgaagagaagtcgg

SEQ ID NO: 86610 - DNA, 691 bp, Cannabis sativa
ttaatgtactaaaatatagcaatacaaatgctctaaaaagacatttctgagaagacttcaacaatcggtgttgggacctcttcaaaccatcataattcattgtacagcctaagggcatatttagccaaactatgggccgcagtgttatctttgcgggacacatgagacaaaactgcctttagaaatttagacaataaggctatgacatcctctaacagcacacccatctcatttgtgaacaccttcctgttattatagccattactactgagagagattcaaatttaaccgcttctagggaaatcccacagagcccaatttagtccagtcagtatggaaaaagttttaacttgaaaaacaataatactacctgaaaagaaccaaacaacaaacaacagaacaacattaatactagctggaaaacatactattcacaaaattagagaaaataagaagaaattaacaaccaaatcaaaacccctccaacaccaaaactgaaattacaattaaaacaataaaagaaaaaaaaacaaatcaaaacaacccatacaaaccaaagtccaacactttggttagtaactgacaaaattattataattcgtgtataaactcagcaaggagacaaacataactcatactactctacttagattcctttgattatacaagtccttagtgtggagtatttaaa

SEQ ID NO: 86611 - DNA, 1017 bp, Cannabis sativa
tatagaaactcctactgcaactagcgctacaaccactttagaaacccaaaccgtaaattttaaaaaaaaatttaaaaataatatatagcgtaattccccttttgtaattattaatattactattttttaatcttatttttttttttttttgaataggaagtaatattttttaatcttattattgattgtgtgttggatataatgaattattttttatgacattatattgatttctcacatttatgatatgggacaaagtgagcacttgatgagaaattttataattttgaatactaattttttttaaaaaaattatttagacccaagatagaatagggtgaatttaatagtttgtagtttgtaaatttagtagtttttttttttcattttttagaattttattgcaatttgttcaaatataattttgatactatatgatttaaggtttatttttcattttttaagattttatcaatgtatgtataaatgtatttttgatactatatactttagtgattttttttttttgtatattataggcttgcatactttgtagtgtactctaaatttttgcatctcatttattttattaatcatatattttgatattaatataattttgtttgacactaatatatatgttactttttatataatgtgatttttgtaaaaaaatttgtatattttttgatttttttatttttgagaactttatttgagcggatgttattttgatacagtatacttaagggttttttcttatttttttttttaaaaaaatgtgtttgtatattacacgggattgttatatataagtgtgttttcatatgattaggatatattttatttttcagtatgttttttgaaaaaaaaaaaaaattgttagagtatatttttgtatctatatttgttttggaattttaatggaattttgattctgcatccttaatggttttttgtctatatttctttaggattttattgatgtttgttcgaatgcatttttgatattgtata

SEQ ID NO: 86612 - DNA, 626 bp, Cannabis sativa
aaaaaaaataataaaaaatattagtattcttttccatatccgaattatgtatgaattatttatttatgttagttttttattattttattttatttgaatttgtgatttcacattttcacacttcaaaaactaaaaataaaaatttttatctaataaatgtgaaataaatgagaaaataataaatctttgatttggtcaattattagggaagggtattatatttacatttaattaaaaattaaaaaaattcttcaatgctaagtgcacaattttctaatcagcttttaatttttaattaagaaaaaaatatagagaaattctataatagactcaggaacactgatatggacagttttatgctttgtgattggtttagagtaacttttgtggggcgagatatatggtcgatacacatacacacgcatgtgattacaatctttagggaaagggtatccttgattaattaatgaatagtttagtttagttttttttagcaagtgaatgcgaagctaacgatatattagatctgaaagaattttttttgttttagaaaaattattaaaattattttgcaagtataatttcaatatttgcaaaggcaatttaggttatttttatttttgaaa

SEQ ID NO: 86613 - DNA, 618 bp, Cannabis sativa
cttgattacatttagtaggttgttatatgttggctgatattaatttaataaaatgaaataagaggattcatttacttcatttttacaaaaacaaaggaaaggatcacatttttcactccctctctttctctctatcgaattcagctagagggagctagggtttatcctttttcttcagcaattcaagtgttttcagcaatataaagtgtaattcaagctaaggtataagttctagtaaccttcttgttgtgttctttaattttaaggaaaatatttgcatgcttgatgattttgatgatggtagctgctgtgtatgtttgctgttattttctgaagtttagatatgtttatttgagtgcaagctggttttattgctagttagttggatttaaccttgtgtaaagttttgaactcaaaactttggattttaatagtaaaatggtgtttttgctgctgtgatcattatttttgtttgagtttggtttctggttgttgcatatcttgttttaggttgaatttagttggttgtgatggctggttgtggtgtgagccaaactttcaactttgaagctcaaacttggagctcacatgatggtttttgtttctgtgcatgctggg

SEQ ID NO: 86614 - DNA, 998 bp, Cannabis sativa
agtttcacttatgaggtaatgagtaaacaacaatatcaaactaatttggtcatgttcgattgttgtcgtatctgatccattatttgttcaattttaattagatatatataaatatttttttttcttaatagcactcgtaccatctcagaaatgagccaaatgttaagtgcaacctcatagcgggctagcaacacgcatatggtttgtgaggtcaggtggaacaactgtcaatgcgacaatgcatgcatgtacattaaaatttttggcttagctaggttcgatgttagtggtgatttcatgtgccccgaaaacttgaaattctccattttgattttagctcttcgacgtatgcccccgagtgaatgttggcaccctgatatggtaattggtaagcaacccaaggacacaaatagctccattttctgttcgatgtcagcggaggaaagttagggtttagtttctctaccacggtttgacaaggataaacatgtcacaataggtttgtcaaatagggcaagtaatagcaattaataggtgagaaaaaaaagtactttcgtaactcaacttccgtttagtattttaatcccgttcccacactatccttgcatatttccctagtggtgggatgagtacaaaagattaatcatttaaaatagaattttaatttttcattaaaaatgacataccataaaaactcataaataaaaataatatcattaaataaatgataaataataaatatttataatataaatatttaaatttaactttaatcacaaataaataggtagttttaattcttaacaacaataactattgtggcatacatattttgtcactgcacaaagagagacatacccctacgttttccaaggcgttgatggtgagataaaccacacaaataatatgtaaatgcgtgtctgcatgctatgctagctaggtgggctcaacccatattttttttttgatttttaaatttttttttaaaatatttataa

SEQ ID NO: 86615 - DNA, 606 bp, Cannabis sativa
tagctagttttattttttcgactctgcaaaaagagttttggcggcattggtggagctggagtactaatttacgggctcgcttgcgactattttggaaggaaactggtatgtatatttattttatatgtacgtttttcacgtgttacatttttaatttaactaactaaaattatataattaataattctttctaaattttgtttgatggtgtattgtatcattgtttgatctaaagtaataaattttcaaaaatacaattagaaatacatttataacttacatagataacaccttaggtgttttaaaactatgtgggactttaaatttatatttgtagtagtttgtttctaaacaaaatatgaaaatcacaaaatttaaaaaatacaataaaaaaaatctaaaatatcacctaaattcctttagatttcttttatatttatatatagatttgacactggtttttcttaactatattttttattgtttttctaatcatgactcttgagtattcttcactagaaaagataaaacacaataatggaatttgtatgcatttataatttagtagctactaatagtctaatacgaataatttattagttcaga

SEQ ID NO: 86616 - DNA, 877 bp, Cannabis sativa
attaaataaaaataaatttatttttataaaactattgtaataggtttataaaataaattgtaaataaattgaatagtatgtaaaacatcatatgagttacattggaaaaaagtaatctcaaaatatcttaaacaataaaataacataatataacttaaaaatatgaaaactaaacataaaagtttcttttaatattacttgtccttttttggagacagaaaaatttatgtttctcacatattaaaatagttatacatgtgtaaaattttgaaagaaattttttaatgaaaaattaaccaattgatatcttattcacattaaaagtaactaaatggttgcttttttcaaaattcccaaaaacaaaaatttctcgaaataagattttttttcaaatttttctatttttggtaattattttgaatttcggtatgtatgatgacgtagcacaacattagttctgcaaataattttcttaaatgtatttttgtaaataaaattaattttaggtataatattgaaaaaattccaaaatataaagaaaaaaataaaaataaatgacttttcaaatacaaccaactatatctttgaaaataaaatttcatttatggattactttaactaggaatctgaaaagcaaagagagaaaaaacaacattcttaaactttatttccttccaaaaaaagaaattgaagtttgtttaaaaatatttagcatataaatgagaatgttctaataatgaacaacattacatataaataaaacaaaatcaacagataatgccgtcaaacattatttctgtgttacataattaatatgtaagtatcttaatatctacttaccttgggtgggagtagagagtaaatgcaaaattatgta

SEQ ID NO: 86617 - DNA, 1274 bp, Cannabis sativa
  modified_base (94)..(94): a, c, t, g, unknown or other
aatattctgacaattaatgtggcgcatatactgatggagtatctcacctataaatatagggtctcggtccccgagctcctcactcatttttgantattcagcaaattccatctaagtcgattcacgtcaaattcgggaattcaacattggaagacccttaaatggttattaagatacttgatgggcacttggagtcatggtctgacctatgagaacgcaaaaggagaattggagttaaaaggattcatggatgttgactatccctcgaacatagatactaaaaaatcaactacttcctacgtttattgataaaccaaaattgtataagttggaaggcccaattacaatctgtggttgctttttctaccacggaagcataattcatggtaactacataagcattcaaggaagcattatggctttgaggaattccttatgaattaaaacaaatcatagggggagtgattgtgtattcgaatagccagtcatccatctatctttgtaagaacccaatttatcatgaaaagagcaaacatatagatataagaccatactagattagagagaagatagaagaaggactggttaatttagagaagatcagaacagaagataatcctgctgatgttgggactaagggatcttgatagtaaacaagagttcaagcattgcttgaacttgatcaatctcagaagttagtaaactgagatttttggaacaccaaccatgatggatgcattctatcttcttcatcatcatacttttaatttgaagtatgtctccaaaagttattcctggaaagttatttgtctcccaaaagtatgcttccagatagctaacatgtcatttggcagaagtatcgtggaatgatggttttcatctggaaaagagtttcggatggctagttgttccccctagaagggagtcccggatagtcggctccagttggctctttcctatctgggaagttcccttcgtaagtgccttggcttatgattttggaagccctcatacatgctcctggatgcactcttactcatgctgatgtggagatctcgctcaaaggagagttggttaagttggttattatctaactaacttaacaacctaacttcttacagccactgactttaggatcttgctcctaagcctataaatatcaccaacacttatgattcacacacaacgataagattgagttgagagatagagagagaaaagattgagaggtagatagagaaatgtagtgagaaaagagagagattgaggttggg

SEQ ID NO: 86618 - DNA, 1123 bp, Cannabis sativa
atatttcccaacgcacttggcgtgccactatatcataattttactttgtttttaataaaagtgtaaatattattaatatgtaaataaaaaaagcaaatatttaaattaaaaataaagtacggtttctttctttaaaaaaaagcaacaaaataaaaaaaaataaaaaaggcagtatatactgcttctctctctctccctctttaatacaaaaaaaccctaatatcagctcattcacgcctccctcattctcattcatgcttccctctctctttctttctgtcaatcgaggcagcgcctctttctttctctcactgtttgtaaactggatgcttctagatgaattcaataattttatgaagaaacggccagcaaaagaaacccaaatttcgattgctgtcggttgtaacttgttatatcggacaaaatatatggggttttgctgttttatgaatgtggatttatgattaggtaatacggtgttgcagttgattccgttaatcattttgatctttctcttcttctctggcaacctcagccaacctccgacgaacgtgcaacctaaaccccattttctctgtgcctcggcttctccgcctaccacgacagcggttcaacctctgcctcgacttctctccacctcgtcttcacgcctcccccagtcatgggtgctggtatatggctttttatttttccctttttctttatttgtgtttctcggtctctttctctctttctctcttatgcaggtggctgtgttcgaagggttgaagctcgagtagatctcgcccgtctgttcgagcttggtggctgacgggatgctgggttctgatttaagtgggatggggcttggggtgttcgacgggcataagaaatttgaaacatctgaatttttttgataagtttgaactattctgatttggtgattgtttattatgtgattaaattgaatgttttaggtcaatttttcttaatgtattttttgggttctgtaaatgcttctctgtaaaaaattttaagaaatgaatgtataaaattaacattctttatatcctgttattattgttatattatcaaaaatacattaataattattagttttctagctaaatttaatatttataac

SEQ ID NO: 86619 - DNA, 1314 bp, Cannabis sativa
aactaattatgcatcatattgtatcgacatgatacaaatataatatataatgagacatttaatattcatgtaatatgatgataactactaatttagattaactcgaacatagcactgagactaagccactggctcgcatcaacaagtgtgacacactatactaaagagttatccagaatatgcatatattcaacaaccaatatcaatcattaacacgtctatcatacatgaaataataactcccagtgaccaaatacaatttggcttccaataatccaaaccaaaatgacttcttagtacacacgttcaagtaagtcgtgtcagtgtagtcattagtatattatctgtaagtgcgtgttatgatactaatggaggatcccatgactttctcactatatatgaaacgtcatcatcattaatggagcaataatactcctcaagttccgagagaaagatatgactgtgatatttatcacataaattcaataaattcataataaagtcaactactcttaatattgaaacaaaatattgtaattgtaatgtaaagtcattgtcctcatagcacgccacacactctagttttacaaatgaagatgttgtaaatgtccatacaatacctaattacatttaactctccttaccattatactcactttgtatgagagaggaaattgtaggtgttcatatgacactaaattacaaaatagctcctcctagaatcatgaatgctcataagtggattttatcattcatgcagccttaccaatcgatatcattaaaaccaactactatatgtcactatgttggtttgtcaatgactaacaaatccttggtaccataagaatgacaactcaagcaccaatccagcatgtctgcaacagatatcacaataggaatgcctatacttgagtgaaccctaggatgccttcaataatcatatatatgtatggaacaacttcaatattgatctctcgttattagtgatatacatggactttaggccgttcataatattacagtttagactacttaaaaaaatctcaacgaaattgaaatactaatcacaatgatagttagtcaatctaaactatgagacaattcagtataatgttgatctcatcatgtagaatctaaatatttataccatataaggtttattaaagattcttcatcttatagagattaccaaataacagtttaatcgtctctagaatagactaagatcataaaatgagcaatgtactatcaagtaacaatctaagcatatcattgctcatacttatctctcacatagtattgactaacgataat

SEQ ID NO: 86620 - DNA, 853 bp, Cannabis sativa
attgcactatcaaattgcggtaatcactatggatcaatcaggtacgcatatacttaattatcatatattattatcgtgttctatattatacacaaatagattttgggtatatagttaatttatctaacatgtggtatcagattgccttttgtatgtgatttaggacctataattagtataattaatttttatatgttaattatccataattacatattaattttcgtcataaattaatgataaaattttcgttattaaatcttaaaattgtaggggttttatttattgttaaattctcattttgttgatatattatatgtataaaatcattgagtatatgatgagaattttaagtttaaagttttagggtttttatgaaattaaattttgtgatttttgattttattgttttttatctgaaattgatcatcaatatctcattatcaattatttatgaatgttcttacataattaattttgtattttggccgagattggtattacaattattttcttttatgtttttaactttcggattgtttttgccatgagatctagacatttagcctttaatactcaaaattagtagtgtagatcgactagaaatccaatcacgagcaaaacccctacttttcccgttcatttcgtcgcatttttggttgtttttgattctccgacccgaccgcctgcaaccgggtcgtgctcgaccctctttcagacccgctggaggaagaagaagacttccagccgcgaagcccactctcagcctcggcgcctgggggcgcgtgcagcacctccgggagtcgtttttcgacgttttttttttcagcgtgcttaaaattaaatttctaat

SEQ ID NO: 86621 - DNA, 564 bp, Cannabis sativa
aatttttttaagtgttattttgtagtaggggctacaactcccgtctcccgtaccaatgtaattgtaactatgcagctcataatgtgactaaataggcgtttgccaacaatattacgagcatggtagagatatctactatacctgttaataatatcttttgtaatgaccatgaaatctaactttaattttatttataaatgcatttttcaaaaaaaaaaatataattgtctctgatcgtctctgattattagtagaaatattttgtagtaagggctaccgattgagaaaatttctaagataaatattgatgttgcgttatttgataaattaaagaggtacattttttgcttttgctatcaaggattcagggaggttagttgaggctcatactagatgtcagtatgggattgtttgtccagaagttgcagaagccattaggcataaggaagctttgagctgaattaagcggagaccgctacaaacaacaattgttgagatggattgccttttggtggtgcaaagtcttcaacatcgtttgtgtatcagggaggagggttgcatgtc

SEQ ID NO: 86622 - DNA, 777 bp, Cannabis sativa
aaagaaattgtccaatatttgaggcaccaaacaaagaggaatcaagagtaggtggacatcacactaatcaccaactttactacttttatgagtaatgtaatgatatgtataaattactcacaaagccaactaaaatcatctaaaatttaaaatagagttatttagtattatgtattttctttaaataatttagaacacaatatttttattggacaccaattgtgtctatcactttttaaaagtggcacttagcgattggttagtaatattcatagaattattatattaaattatataatactcaatacttagttgcattaatgatgatatgacaataagaaaaatactagacataattactaattagtttttaacatttctctttagtatcctttgcttttagaaaaacgctaaagggtactagtggtgcctaacaccctcttatgtgtcaatatcgctattgatctatctaactatcgggtcccatataatttaatataataatttttaggaagtatcgctagctaatcgcaacgttacatatcaagaaggtgctaggcaccactagtgcttaatagcaatgctcttgtttttaataactcatttgctatcttgtattttgaaatcataaatatttagtatattgaatttaaatttaatcaattaaattttattaatatgatcaaactctcttgaattatatgagttttaaattcaaatgtaattatttagttatatataattgagagtggtattgtcaaattaatataattatat

SEQ ID NO: 86623 - DNA, 760 bp, Cannabis sativa
  modified_base (725)..(729): a, c, t, g, unknown or other
caagattttctacatctaaagccagactctttactgtgcggttaggatccggatcactttctccatagcatggcctgtcaaatcccaccacataaatctgtactgaataaatttatttagggaatggaaaagcaaacataaatgccattaccctaccccaattttatgatttataataaaataaataaatatttatgatttataaataaaataatttttatttttagacccttgtaaggtcgggccctagacagtctattctttgcctacctttaaaattcgcctgctaacggcattggagaaactcaaatttaatgttaaattaatataaatattattttaacattaaatttttttctaactccaactacaacactaaaaagtatattctttattattatattatttcattaataaattatattattatattattatttatttattaaaaaatgattatttaattattaaaaaataataaaaatacagttgtctaccgtgcccactattattagtgggacactgtagactcccaccaaaataagattacttggattggaggcttttggtaaaaaaattactatcatatttaaatttttaaagggtcattgaagatggcctaaatattatgagcattgctattaggcaccagtaatgcctagcaccctcaagacgtgtcgtcttgcaattggctagcgatattccctaaaagttattatattaannnnnatgggacccgatacttaattagaacaataac

SEQ ID NO: 86624 - DNA, 559 bp, Cannabis sativa
tggtggtgttccaattgaactctcatgactagctgggttcatgaagaagatgaacaagaaaaaaaaaagaaagaaaaaataaaataaatttatgactttaaaatgtattttttagttttttatttcattttaaatttttttaattaaaattattatttggaccaataaaaaattgacacgtgacattttatttgggtttaacagatccattacaaaaagggaccaaaagacttacaaaaaatgtgacctgaactattactgccaatttttaaagttgaggactaatctgcattaaccctaagtttttggagacttttgccgcaattatatcttttaaaaattaaatatataagtaaaatatttaataattaaatttgaccataattaaaatattttaattaattattaaataatgaattatattttataaatgaaatcaaatataatattttatttattactatataaaaaaataattattttaacatggtgtactacattccttgagcacaataaggactagtttgacacaacatttggaaaagctaacagttgcttt

SEQ ID NO: 86625 - DNA, 540 bp, Cannabis sativa
acatcacgtgacacgctaaatcacaaccggagacttaggttttaaacaaacaatctacctactgaaagttaacatgccaataccctaaactaatagggaattaaccaaccaaagctctaaaactaacacgaatcgacaacacaaaaaatccgggagacccagcacagatctggttaaccggttttacaggacctgtaaaaaccgattaatcggtttacactagaaaaccccaaaaattcaaaactctaaccaaatcaacaccaaagcttaccaaaccttccaaacctacatattataccccaataaacatattccaagcaataaaataactaaccaagctcagaatcaaaaatcaccattaaagagccaagcttgagttctaaaactcaaagcttgctcaaccaacataacagccctcaaaactagcttaattcaacataattaaccataactaaactccagaaaaccattccatagaccaacaacaactacaacactcataaacaaaaatcatgtaaaaatccaatttcttaaagttca

SEQ ID NO: 86626 - DNA, 5425 bp, Cannabis sativa
  modified_base (2532)..(2550): a, c, t, g, unknown or other
tcatagacaattaattggtgatcatgcaattaaaattaattaagtacgaaagaaatagaatacatagaacttgagggaaaataaatcacattaaaaccataaaacaataccaaacaatctccttctagaccctaattaagtgtttagctactcatgttgatgccctcctctacaaggaagagatctactggaagcaaatagccagaacccaatggctggctcagggggacaaaaatacgaagttcttccactgacatgcctcccacagaaagaaacaaaatcctcaaacttcatacatcgagtggtggcattatcacgacggatgaagacatcactcatgaaattgaaatctattttcattcgctcttcacctccaataattcttccgctactaacatgcaaattgtcttggagggcattgattattccctgtctgacaacgacaaatccttgttggatgaaacttttttggaagagaagttgaaaaggcattttttcaacttcctttggataaagcccctggccttgacggtttcaactctaatttctacaaagctaactggcctctcataaaaaaggatgtgttgaccgcggcgcttagcttcctaaatggtaacggggacattgcccctcttaacaccaccctcatcactctcattcctaaggtcaaacagcctacttcgatcaagaattttagacccataagcttgtgcaatatcatttacaaaattatttccaaatctattgccaacaggcttaaattagttctaaacaacttgatctccccaaaccagagtgctttccttcctggtaggctcatttatgacaatatcatcatcgcccaggaggttgccccctcaattaaacttaaatccaaaggaaagaaaggttggatggcagttaagctggatatggccaaagtttttgatagagtggaatgggctttcatctcgactattttaaggaaatttgatttcccttctcgatttatacatctcatttctgattgcatttcgacggccaccttccagtttaatatcaatggcaaagtctctggtcatgtttctccctctcggggtattcatcaaggtgaccccctctccccttatcttttcatgctttgtgccaagggtttttcttcaatccttcagcaacaggaaagaaaccgggctcttaatggtttcaaagtggcgcacagcatcccgaacattttccatctcctttttgctgatgacagtctcctcttctgtcaggcttccattaattcgtgcaacgtcattaaagaggctcccagtctctatgaaagggccatggggcttcaagtgaattttcaaaatcttccctttatttttctccgaacgttgcccttcgggatcaaaccctgatctttgatttcatggagatcctagtaaaaacctcatttgaaaaatacttgggactccctcagcatattggtagaacgaaaaagcaagtctttcactacctccatgacaaagtgtggggtcatcttaataactggaagcacaaagtcttctcgaaaggaggaaaagaaacgcttctcaagtctgttatccaggcgatccctacttataccatggcttgttttcgtctcccgattgccacttatcactctcttgaatcgattatggaaaatttttggtggggcttcaatgagaataaccgtcccaagactcactgacaaaattggtataagctttgtaagtctgaaaaatatggggggcttggtttccgatccctcgttcatttcaatcaggctcttcttgctaaaatagcttggcgcatcctcaagcatccaaactcagatgtggctaaaatcttcgcagccagataccacccgaactcttctttcattacttgttccctaggtcattccccctcttttgtttggcgaagcattttttggagaaaagagttgctgcacaagggtttcatttttaaaattggcaatgggcaaaaccttccactaccattaatcattggattcctggttataaccagattatcccaatcagcccgatccctgtttgggtgtagcttctttcattaccaataatatgacttaggacctctccagtctcaataactgctaccttccacatattgttcaagacattctctccattccccttcctctccaccccgctaaagatggtttgatttggaaactcacaaaatctagaatttactctgtcaaaattggataccatctcaatttctcttctacctcccctcccgatattccctcatcctcttccccttctccttggtgaaaaaacctctggcatctccacattccgcctaaggtgaaacattttgctttctgtgcctccaactcaaccctccctaccaatatgaaccttgcatttaggaaaattattcagtctccggtttgtgatcgttgtggaaaccatgagaaatctgtttctcatgccttgttcttcagcaagagcgttcgaagagtctggaaaggtacagttttttacccttatatttcttcttcttcttcttctnnnnnnnnnnnnnnnnnnncttcttcttcttcttcttcttttactgtctctttccatgatattgttcacatgatttatactactttaattaaccaaggaagaggtagaatgctttctttgtgttgcttggcttatttggcacaacaggaacatagctcttaggaatcaatcgcaggatcagccccatgccatagtcaacctagccaaaagctttctgacagactataagtcatcatctcaagcttgccagctctcggctccagtggttcggtctccctcagtcgcaacctggtcccctccacctcccggtcgactcaagatgaacgctgatgctgcaattccaaagagaaattcaaaagtgggctttggaggagtcattcgtaatagtgaaagtcacgttgtagccgcagttgcatcttcccacattggcggtggggatgtggccacacttgaagcaaaatctctcctcgcctcccttctttggtgcattgaagagagttttcctatccaccgggtggaaacagattgcaaaactattattgacgctttggagaaccccaaagaagacctttcgcattttggtgatctcattaaacaaattaaggcagctttgtctctcctccacgatgcccgtgttttccatattagccgatctacaaatattttcgctcataaattggctaattaattaggcttcggggttagatgaagtagctgtttagtttagattagtgatgactcctgtaattttagttctcttctttttctttaaaggcatccctctcttcaaaagaataaaataaataaggaatcagtaaaaataacaagcccaatacaatcccatcaacaaaaccaacacttgtgcttaaaattcggaaagaccagctggaaagaaaatcagagcatgataaatactatcataaacaaataaatatggtgagtgattccctcttctaacatctatttaattattgaaacgcatatatgtgtattatttgaataatttatccagtatttaaatcgatagtttatcaaaaaaagcataatccaatcctgtctccaatagtccagttcaatcatgcaaccaaatggaccctgaaggttgaccaattcacaagtattttgctatcacacgaaaaagtgaagtaaaactccacgaccacgcctatccattaaaaaggggcattgaaatataaaacatatattgagtggtgattggattgagatgaacaaaatttactcatgaaataacatttttatctaaaaatataatgtaggagtctctttgcaaatattgaataatgaagtcaaccaactgaaatcatggttttatttagatgaaacgaagccatcattctcattgtcaaagtcaatggcagtaatcacaccgttgattgtatttaaccaaaatcttttgggccgtacacctaacccgataaaattagctttgctaccaaaactggtggggtccaacgacacaccaagtcctctggccaactctcctccaccgtcggataacatcatcaccttctgacccgcacccagttgctcaccccacgcgcgcataacgtacacatcgttgaccccgacacaggcgatcagatcccaaccattggatttcgccaactcgacacgcttgacgaaacgggagcaaccgggagtgaacgccgccgagatgccaacgacaaccactttccttcctttacagaggctcgagagactgaccacctgaacgacgccgtttctgttgaggtaagaaagtgcaatgttggacggaagcttcttgcctatcacgacgggaagctttttggggttttggtcgatcatcgggcgacgaggatggactgtcgacgtcgatgaaaatgggtggatggtcggcggtgggcccggtggcccataaaggttgagtaaggacgagcgttgtgacttggggatggtggcgtgtgggttccaagatgtggagatggggtttagcgagacggtaagaggaaaatttgtctgatggtgatgaggagtcgaagacgaagacgaagacgacgacgtcgttttggatagttttgaaaatgtggctgcaatgttgttgacagaggaagccatgagtaatgggttatagtgtgaatgagtagtaggtaggtactacgattgtgaaagatagtgagagtgaaaattgatacttttaatctaaaagtttacaacaaggccgaaagggatttcttttttttttttcctagaaaaataaatataatatatatgaatgtcttgatgcccaagaaaatgtaagtgtcactattgattgggctttgctcgatactattacgtggcccatcagaaagcccattttaccaaaaattcgaaattattgtagaaattacacaaattaaaagaaaattttaagcttattctcaaaaaaaaaaaataataaataaaataagcttttacttgtttttttattgtttttttatctgcaaagttcataagtttattttgaaaactatattggatatttaacatgtatttcagttatgtttatataacaatctttgaaacttttaatcctaagtctttttcaaaatgtagtatattacgaaaaaaatttaatttttctgtatttttagttattgaaaaatcaagttgttacagttaatctagacatagacatttataacttttatgttaaaagtgaaatgatagttttcttttcgcctgaatgtaggcgctaaaaataaagtactcgtttcagtaattatattaaattaccgaaatattatttacaaggaactgtgtgtttcttagggcgcgtttagaaagccacaatgtaattggatttgagtgtaattggaggtaattacacaattgggcatgtttgtctaaccatgtaattacactgtaactgt

SEQ ID NO: 86627 - DNA, 585 bp, Cannabis sativa
tttctcttaaaattctcacaatccaaaatcccagacaccggtctggctttgatccggggattaaattgaatcgtcgatccttttctacagttcctcgggaaaagccttcgcatattaatcgcacttttatggcctattgaatagtggtttgtgtttggcaaccgggaaaacaggcgaagtgggattctgtaaaaacgacgacggcgacgacgaatctgttggtggagagtcagagtagctctgactgtctggtaggcctggagtgcttgctagacatagtcagagccctgggtatgggttcgtgtctttcggtggaaggagcatctgccggggccggaggtcttcttccttatggttcggcttcaccatcatcacccggaggaaggagtagggataggagaaagattcgaaggacaatttcttctaattcgtcttcttcagcatcaccttcttctccctattccacaatcgattcacatatagagaaacggcttcaccgtgttcctggtcggatttgcttgaatggctgctctgatgtcacctcgcttttcacaaagcaagggcaaaagggggtcaaccaggatg

SEQ ID NO: 86628 - DNA, 1183 bp, Cannabis sativa
atttgacacgtttttcgagaaacttctttgattagcaaagattgcacaataattgaaaaagcactgtagcgtgccttagcatctgatagtgtgaagaagaaaaatattagagaaaaaaaatatatattttttcagaaaaatattttacggctgaaagaaatatatattttttattttttattttaatttttttaatataattatttacgtgggctaataaaattgtgccacgtgtacactgtgtccatgtgaacaatctgacttggcagttaatagctaaatttggatagaagtagtaatttgctaacggtattgtagttttgggggttttaccgtcaaaatttaagttttggggattaaatgcaactaaagtaaaatattggaagttttgccgcaattaacccttttctttttttttttttattgattttttttagctgacttctctttttgttttttttttctttttcttatgtatccttttatttttcttctctttatttatctttttcttttctcaccctctatatatatatatatatatatatatctcttttttatcttacactaatttatttatctttaaatatatataataaatgtatatttttatatcttctattctaatactttttcactctctcataaaattttattttattatttttttttaaaatacacacttcttatatttcttttttctctctattacattttcttactattcacacagtcaaactatttcatactatttctctttaattaatcatattttataaaatacaatcttaattaatttcttttaaccttaactaaaatacgattcttttactttcccattttctctcatatttttttaactctcttactatatcttagaaaaaaattaagagaactcctcctatatctttctctgttttatatgattaataaaaatagtattttttgaaatattttgtagtttattcgaagttgatttattaataatttgcatatttaaggttgatgtcttcgtatttttctattgatttatagatatctttttattattttatagttatttttatgttactttagatattttatagttatttttatgtgttttcttttgtaaagttgttgtttagtttatgtgtattttttatggtgtatattttaagttttttctacacaatttttttgt

SEQ ID NO: 86629 - DNA, 910 bp, Cannabis sativa
  modified_base (62)..(73): a, c, t, g, unknown or other
  modified_base (275)..(282): a, c, t, g, unknown or other
ttccgatgcatactccacacatccaacccaagcttaccttaaccaatgccctggaaaggacnnnnnnnnnnnncaaggtgcaagtaaactacattgtggattatcctatcagttaaaccgtgtatactgataaatcataggaatacatttaatcacacaatgttgattacttttcactgtgttgacaacacaataaataaaaatatcaatatgataaggatttggatgaatctataaatcaaataaataactaaatgatcacatgaaccaaatannnnnnnnaataagtaatgaaaataaatttgtttctttattgataaatgaatataaaagattacattttaatagagttttatttaggtcacaaagcccaacaactaacctcaatcagacacttatgcctcgaattccatacccatcttgtgagtgttagaactgctcaaggaaaccagggggaagcaagaaaatgatatagtgtagccaccaagtaagctatccccatggtccaacacacaaaagaaggacacccagtggaggtgcaggatgaattggatccccaagtgggagctgaggccattcttaaacctatggaagaagtagaggaaattcaaatttgtgatcaggatccgaccaaggtaattcgtgttaggaaaggccttaatccaaatgaaagaaatgaaattgtggaggccattaatgagtctgcaaatgtctttgcatagagtcatagagatatgaccgacatcaatccaaacatcactacccatgttttgaacatcaacaaagacatacctatcgtatagtagaaaagacgtcccattgactcggtcaaatttgaaggttttaaacaagaagtggacaaaatgttgtttaacatctttatctgagatgtctatgttggaaattattt

SEQ ID NO: 86630 - DNA, 555 bp, Cannabis sativa
tctctctctctctctctctccgtcgattttgtttttatttttttagttttgattttctattttcgaaattccaaacattgtcttaggccaactatgccatttgctcgctgttgtttcagttgggctgctcgtgaattttctcgacactttttgtttttattttaatttttactaccattttattattttttaatttatacccaattttatagattatatttccattatgtacattagaaagtagaaactctaattttaatcagttatgtgaggttatatttagtaccttaattataaaagatgatatttatcaattaaaattatttcagagttatattttgtttttttttttaaaactaaaacgtatatagatagaaaaaattagacctcacggtcattacaaatgatagcattaagtattgaggatggctccacaaaacctgtaatgttctgggcgaaagcccatctggccacattatgggcagcgaaattacaaaaacgagaaataaacgaaaaattacaagatgcaaagtttttagagagttgattacataa

SEQ ID NO: 86631 - DNA, 649 bp, Cannabis sativa
gtttgaaaaaatagtcaaaaatcgcactacccgcaccgcgaacacccctaagtagaatgattcacattcaatttaattaattaaggattcttttggtaagttcgggcaatacttcaaaaatttaataagaattagagtaatttgtgatataaatatttaagtttaatcttcgattgtaaataaatatttaagtttattttttaccagtaataatacttaaattataattctggaacttctattggaacttgactactaagtgttaagtaaattatcacgtggaaattcctaattaatttaggtaataaatttttagttttgtaatttaaatatactaataaaaaataacttagtagtcaaccatgcccaaaacaatcaacacaaaaaagtagaagaccacacgacacaagagtaataataatttgagaatctctcaaatctaacatatgagaagaaagactaattgtatcagagcccagataacgttcccattaatcgacaccgctagagaaagccaaccatcttacatcatgactacaccttcagatattattgagtcttccagccaactctccactcataccaccccagtttccatgcctcttacagctagcccatctttacgacgatcttctgcgagcaaacttga

SEQ ID NO: 86632 - DNA, 1249 bp, Cannabis sativa
  modified_base (308)..(310): a, c, t, g, unknown or other
tggacgaagaatgtacatgtccgggccatatcagaccaagcgggttggggtctaccagtgttgtaatcattattttggtatttataaattacttaaataaagttttaatcattcacgacttttaataaactcatttattagcaacaagttgcacaattaagttaaaaatcacgttaacacgcctaaactggtagggtgttacaattttgtattagagctgccaggttatcttccaaagatcgtcacgaaatgtacaatcatcatgagcgatcaacttgtctcatggttcagtaagcctttattgcttnnntagtttattttaatagtatgttttaagtaaagcttaataggaagcatgttagtagcctgatatttgaataggtgcatgttttaaatttccaaaataagcggtaattagtaagtttcttgatcgagatctgaccaggctagctcttggtttcgcaggctgttctaatagaatggacgccaagcaaaatactaggagtcagggtaacatagtcggatctagtggcagtcagggagctcagattcccctgaatgttagtggccaagttagaggccctagagtcagggcacgcaattagggagatgttaattcgccggaggttgcccaggaatgggaaaataggtttgcaacaatgcaagccagaaacaacaaacgagaagaagaaatgagacgcttgaggcattagggtgatcttgcaatgactgctccagaaatccaggtagctcctgcccctgctatgcaggcagggccgggtgctgcaatgaatcgaatggaaccattgtatgaaaggttccgcaggcaagcacctttagtctttttgggaggtcctgatgtaatgaaagtcgagcagtggctaatggttattacaagattttgaattttatgggcatcaccagcaatgaaaaagtggcttgcgcgacattctagttttaggatgatgctctggttttgttggacatggtgtatctgactcgtgatgttactactattacctgggaagagttccaagagttgtttaacgcaaagtactacaatgaggcggtaagaattgcaaaaagaaaagaatttacccagctgacccacaaggagaatatgagtattacagaatacacgactcagtttgactgattggctaggttggcctcgggaattgtgccaattgatttcagcaagaaagaaaagtacctggatggattaaatccaaaaataaaacatgatctt

SEQ ID NO: 86633 - DNA, 849 bp, Cannabis sativa
  modified_base (37)..(39): a, c, t, g, unknown or other
cttcgaactctcgaccaggacgggtacctgggcgagnnngactgctacattcccgcccacgacaatcgtgccacaaaccctgagaagggaatgtgtgccaggtcgggggcccggggccagcaaggggcgctgatgcccttgcagaaatacttcagggatgtggcagacttctttggtctctgcccgggtggtcaccttgcattttactttagttttgagcttcttgactttcatgccttgtgtttctgatggctattttctaaccatactatttttgttctgtgcagacatgcctcgcagatgatcgatgctttgaggaagaaaataggcggaagctgtagccccactcctccggccaagaagtgtaagggcggtgaggggtccttggaaaagagacaaaataggatttcatttcgtctctcttcccttggccatttcgaaaccctagcagagcccccatttcaaaacccaacaaatagtcgtgccaaaagctttcccccttcttatttgttttgaaagactgtcggccgccaccatccgtcattgttacgtcatccaccgcccttctctttctctattgtgtcatccactaccgcaacccttgttattctatttagctaatgttttctttgatagtattcttttttgtccctcaaatgaaaacataaacctagattgagaacaatacagatgtagccgcttgaacccctagcctttattgcaatggtgtcgtcaatgacttctggtggacacaagaagtgggtagagctcatttccttaccgaggttgtcacagatacatcctcaaatttttcttagatgaggtaaaaaaatgttttagggtatttta

SEQ ID NO: 86634 - DNA, 1126 bp, Cannabis sativa
agcattttcaatggagatgtaaattaataagtgatgcaaagttaaaatatagctcacatagcaaaaattattctccaatggtgtgccaaaagttaatgcaaatttagcacatagtaaatattgagctaaatttgacaaaatatttactataatacaaaatttacatcatgataaatgtataactttattatttacttttataccacttttattattttgttagtatatttatagcagtaattatgaactatttatttttaggatcattttcatttgggatattagcggctaaaccacttgaactttacgtttagtaacacttaactacaaaaattgattttttgaggacagaactacataaactcccattctgttttgctctgtactcctccgtccagcacaattaaattaaatgccacaatggactatctgtacacgtgacaaatttttagtggtcaacgtaatattaattataaaaaaataatttaaaattataaaaataagtaaattaaaaattataaatatttaaaaaaaattataaaaaaatcagaaaaaaaattcaattttttttttttttactttttttttccttttttcttcttctttcttctttcttcttctttttctactgaaccgaagcacctttaaatctcaacccaattacaattggtgcatcttcttcttcctattttcaatcaaaatcaatcaatttcatatgttctaatctctctctacccaaatttaatgcaaagtttccatctttttttttgatgaatcaagtattgtattgctcataaatctcatttgtacaaacaaaatagcatcctcatagaaataaggacctatatgaatcatatatgttatattattatttacatcaattctggttactctatcttataaattggaaaaccaatcttgatctttcttcttgacttccttcggccaaagcaccaaaacacgagttcttacaatctcttttgtgtgctgaataatctggtttgtgcttactatcttcatgttccatatgtgttcattccttgctttccaaaggttataaattaaagaagcaatggctaccgaaaataccttcttcctgaagcttgacagctttgctcttcttatc

SEQ ID NO: 86635 - DNA, 2046 bp, Cannabis sativa
acttttaaaaaattactttaaaattggaataacttacctccttcctaatttactcacaattttctttaaaaagaacttccaataaaaaaaatatataataattatctaaacaattaaaataagtcaaaacttttacctatattatattttttaatgcaatcctatgcaatctaatctcattttcctaatgtaaccttgcaggacaaatcactattagatgtagtgcaccactccaaccaaaaagcaatacaactcaaactatattacaacagaaaactaacctgagataaaagtgagaggcttcggattgaagctcgaagagaatcattcactttcattgtttcggtcattacccatggcctacagtcaaatatgtaagcaacaagcatataagcaagcaaaaaaaaatcaccggatcgaaattccagttcaatgagtaagactaagactttcttagctatactcagatctcaattagggccatggtatacagcacaactaacatatacagtttgacattgaatgttttagtatattccattataatttagcatgtagcaaagcatgatttgaggaaaacttcataatcacattaagatgctcttctatcagttcataattcacactcaaaagatttggtagaaatttgattcactaaacaccaaataaaagaatcataaaaacttcataacaaagattttgtggaaattacctcccacttaaagacacgataatatgatctggattattcaaaaagttacataacttctcaaagtgactttgggtatccaacagaatacatcctcgagtacaaatatctgatgacaaactaggaaaaagaaatgcttgagatgtgatcgacacctttttctttataaactccatgatttctgtatgagttaagtctttctcaatattatcaacaaaaatcaaatagtttttgactcctccaaagtcaatgtcttgccctttcttttcacaaggacgaccaatagcccctgctttcaaaagacaaatgtgtgacaaagtatctaaacatgatatatgattggataatatttaacatgagctaaaggcgaagtgtacatacatttggatgacaaggtatcactcaaaaaccacttggtgaactttgtttcctacacaaatcacataatatacaagacatattttccggtccgattcataaaaaaaattagttgttataactagttacagaaacaaacaattacttgcctgcttcaaatggtgagaaaaacttagattgtgcgaaattttcatgattggaggttgtccgtgataattgtgagcgacacctgtggtgacttgacgattagatctacaagaaccagttttaagtttcgccttcaccttacttaaaaaagaagctacaactgtatctatttcgtccctatgctgaactctgcaaatttgttcaagtctttcagcagtaatgtatccagccactggaccatgtagccaggatagaataaaagtgcacaaacactcttcttctccgtttgcaaaagaatgttcacaatgatccacctgtacaaataggccagattggaatgtcaaaaaaaattagttgaatttaaatataactaagttctcacgaatttatttttgaacaccttcccaaaagatctcattcttatgaagatagtgtccattcttgtatacccaaaatcattttcatatctagacaatgtagaactttgcttgtgcaccaaacaatcctcccttcaaacaaaagaccaccttgcctcccctcagacgattacagatctaaaccttgagcaaccacttaactacttaagaacatatttccaactcccttgaaaaattgtgagtcgaatccctcgattctaatgagtaagctagatgaatccctttaccagctagattcgaactcccttcaaattagattttagatttgaactttcgacagccgacagctctagtagcaagcttcacctcttatgtttggcattccaaagattcattcacatgattaatttttaaaatccaactctgatataattt

SEQ ID NO: 86636 - DNA, 673 bp, Cannabis sativa
ttggtatcaactcaagtctcacatactaaataaaaagacaagaattatctaaaatataagtattttactaattccattagtatcaaattttttgagaatgtgaccaaaaacaaaagtaggaatatatattattattattttttattgatccaaaacgaataatatcatactcatgtgtgaattgatgtgaggtgacgatttaacaatgtgaaagaatagagcccaaatattattattattattataaaacagtgtactagtatacatcgtagttatttaaaacacattgtaaaattttaaaaaatttaaaataatttacaatacaaaaagtaggatttcaaactatctactttatatgcgtataaaataaaaaagaaaataaattgtttgaaccttattttagctgttaaatcattctgaatttctcacaataatttgtaagaacttaaataactactatgtaaagtgccatataaaaaaaataaaagtaaaactatctgaatattaaaaatacaaaaagagtgcaccgtataatttcttaatattatatatattggtaggagtatgtataaatcgatctaatccaataacaactgatcggttcaattacaaccgattgccaaacattagatatccaattatgatcggatcagattggatgttatttttgaat

SEQ ID NO: 86637 - DNA, 940 bp, Cannabis sativa
cacatatctcgaacttgagaattttgcgcactaacttcttactttcatccttttgaattttatcataaagatagggatgacccaaaattagtccaacctcgcccttcaaagaaacacaatgctcttttgatcttactggaggcagctttcgtggcatatggaacacctctttgcactttggtaataactcaaccactatctcacacacctattgcttatgatcattatcctatgtttttatagaccaaaaatgaacctagaaaccatatcctgcttgttccactgtatggaccataacctttagtatgattggggatgtaaagaggttgggatctccttgtaatttcacccaagtataaccttgttcaaacttaatcaccatagtatgctagttaagttgcatatcccccaacgtttctatccatttaacttccaatatatcgtcaactccccataactccacctatctagcttcaaaggtaaaaatcaatgaccacacaaagggatcccaactctaaggatacttgagcatagactccttctacctttactttatccctactgcccaaaagaatgccatgccccattgagtaacaggaagacccatagcttcaacaacctccattaagatgaagttgtgggtatcaccattgtcaataagcagggttacaagctattaacctattttccaagccaatttcatagtatgagttgaggaaattcccaccatagagttcaaggagaggttagccaatgattcttgtacttgctctggctcctagattacaagcaatggtggtagagactccccaatgggtggaggtttgtcttcattagcaaataagaggacctgtaacatttttttctcacacacatgcccacaatgatttttttttcacatttaaagcacaccccacgagctctcatatcttgatactct

SEQ ID NO: 86638 - DNA, 1228 bp, Cannabis sativa
tcttcttccaaatgggtgctttagatttcttggtcatcctcagttttataggatgtttcttacaatctcaggctcaaagcctatcatgccacccaaatgattttcaagcattacaggatttcgtgaggggtttggaaacagtgattgatgggtgggaatctgaatcctattctgattgctgcaaatggaaaggaatcacatgccattcttcatctacagggaaagttgcagagttagatcttgcagagaagaaactttctggtaagctctctgaatcacttggaaatttggatcagctgaaagctctcaatttgtcccacaacttttttaaaggctcccttccaaaatcactcttccacttaccaaatttacaagttctagacctgagctctaattatctagcaggcccaatttccactgctattaatttaccttcaatacaagagttagatatctctgagaattccttggagggttttcttccaaaaagtatatgtcacaattcttcttcacttagatcattgaatctccaaagaaactacttgcaaggtaatcttccatcacaacttgggaattgtagttcattagagtacctttttcttggccaaaataatcttaatggtgaaatagcagaaagtatatattaagttactggttactggtttatattaagttactggttactattttatatttgtttccctgtatgctatatcatgttaagtggttggtgttcatataggctgttatatccattctgacatttcggttagtggtcagtagttagttagttagtttattcagttgtgtctgttatgttcttgatcttttgtgtcagttgtaatgaggtccaaggctatatatatagctggccggcctctcctctgttttgtttaataaaattctttccttttctgtcaaaaccttcgattcacttttctcaatatggtatcagagcggaaagatcggctttcccatccgatcctcccagctgtcgtgtctcctttctccggcatcgctgtgtgtttctcggtcatcttctccgatcttcttccttctctgtacattgattccgcgcaatggctacagacgaaactcaaaccagtattctttctgaagtcgcagatcttggaaatccctcaaatcgagctaatcaaggtcttcaaatcacttccatcaagaatccattggaggatccagccaaccctttctttcttcaccatggtga

SEQ ID NO: 86639 - DNA, 1236 bp, Cannabis sativa
  modified_base (584)..(585): a, c, t, g, unknown or other
ggagtttgacaaagatggaaacaacggggacgagtcttttattgaattaagttgggagaatgcaaaggtctttgtgcgattcttcagagctttccacaaaatcactatgaagtttagtgactcaacatatatcacttcaaataagtacttcattaccattagcagaatacaaccagttgtataagttgtcacttgcagaaaatgatgacatattcttagtgagcatggctaagagcataaaggaaaagtatgataagtattggggaagaactaataaatgaaacgaggcactcttgattgccttagtacttgacccaagatacaagttgaagtatctcatccattgcttccgtaaattgcatgatccaatcacgtccaatttgatggtgaacaagaattaaacgactttgagaacattgtttgaggcgtatggtgggtataaacaattacaacaacaaccatcagttctagcaagccaaggtcaagacactcctagtgctgacactactactacattctcactagattcttattcattttttgcggatggcatgcatgttgagtttctacaagagaggatcgannaatatggtgaagtgtcaaaagatgaattacataagtacttcatctataatgatgttgaacctgtaaaagtgggtcaacttgaccgctttgatatactaaaatggtaatgtctaaattcatccaaatacctgaccttatcaaaaattgctagtccagttgctattgttgcttctgaggcgactttctccactgagggcatatttttttatccttttaagagctcattgaatccaaaaactgtggaaggtttgatatgtctaaaaaattagtggaaccaatcacatcaacctataatgtttgtgaatataatgggaaagaagaaagtctaccgtcaatagaggaccttgccattagtatgattatactctatttataattttatatttcatatagactacaatcattaaattaaattaagtcattaaattttatactaatagctttgtaatcaaaaatacaaatgatacttccactaccaccactgcatcggcactgccaccattacttccttaacgaccacttttaattcatcaatacaattaacttcagttagatcttagagcatctccaatggagagctataaatgtggtgtattaccattttttaaaatattttgctaaaagttaacttcaatggtgatgtaaaatgtg

SEQ ID NO: 86640 - DNA, 1020 bp, Cannabis sativa
gctctccatacagtccggtgagcctccattgaagtcggtcatctatcgttactcaacatcaatgtgatgttgggagtaaccaagaatacggcctcctctctatttttccaacacataatcaaacccccactcaagccttgggcctccacaacaaaaactccttcaaagcccaataaccggcccacattatttacacgatttttatcacattttgtttcacgtaaaaataacaaattgggtttcttttgagaaattagctcttttaggaattgaatagcccgttggttctcaagcccccggcaattccagcttagaacattcataactccttgcgggcctggataccagaacccgcaccaaatgagttttttggaccctccaaaacagttgtgttgggattttgaacatttatcggcccattagcttccttcagaaaagtctttcttcttttattttctaaaatcaccaactcatcctcctcattaacttcctgttgaccgagactatcacatgaatataaatccatatttccatctttattagtttccatattcaccactacagactctggattgactcctcccattactcctaaattagcaatatgcttccctgttataaccccattcaatccctgattttcctccattgattgctccctgtcatcactgctttgtcccctgaaacttccatggccatgtgaactggagttgcccacgctgttcgacagcccatcacgaagccattttgcaccgatggtatgttgacgacgacgccgtggctcagccttcatctcaagatcatagttcttcttaatcaagtgatgtggtgtggtaaagtttacgtcacagaacttctccgagtgccccaaaattccacaaataaagcaaaaagtggaaaggtcttcatatttaaaaaatgcataacattcaagcccattcttcaactgtagctttttcttgcgttttaatggccgatcgacttggaccgaaactcttactctgaaataatccctccata

SEQ ID NO: 86641 - DNA, 521 bp, Cannabis sativa
tatattttgatcaaatgtaaaattctttaggcctttccattgctcatattttcctctgataatatttaagtagttagtaatctactatgtgcacgagcagtttattagctgccatgcttttagtttgcgagcagttattgattctgcttcgcataaacagttataatctattttaaagaaacttgactatacttttaatgatttatcactttgtatatttttattgcttatatgaatagttaggtcgtctattcatatattaggtttaagtattttttcaaggcatattggtgtcttgttaaatactttcctatacaacacgagtcgttagtattcaccttcacatgtagcttccgatttatatctcatttatcacttttgattttcctttctcgtcagacaagtttttttaatcaaaaattcattcataattgtttgatcttcctttgtcgttagaaaggtttgatcaacaagaactttaaaaaaaaattaaaatggtgggtttgttgggttttatgccc

SEQ ID NO: 86642 - DNA, 5237 bp, Cannabis sativa
tcatatttatgtgcaccttcatttgatcatctaagaaaattatctttaaatgaccaaaataaacataaagtttaggacttattcgcctaagtacattgccacataaagtacattattatataatatatcgtaatacatggaagataatactcgacatataatgaggtcttatcgttatgattcatatatttattatgtaatgaggaacatattggatttaagagataaatataaatattgaccaagagggggagagaatgttagttagaataaatatttttatatattaagtataaaatcaattaataattttatacatgcatatgatacaatgaatattttatactcattaaatttgatcacaattaattagttgatattttatatatggttagattacgatttactaaatattaaattttttgaattaattgttacaatattctaataattaattgtggcaaagaccatgatagaaggtatcacttatataaatatagggtctcggtctccgagctcattactcattttgtgaaatacactaaattcatctaaagagagtagagagagcttggaaacctaattacctacactaatcagtttttttttcttttacaaaactaaagatcgtgtaagactaaagctcaaagaatcaataactgaaagtatttcgatcttatagttatattatgtatatatttgatttaattttgcattttcatacatgactatatatgctttatttttacaaggtatccatacttttatgaactattaataattaatttagactttattatgtatattttgaatatcttatgtgtataattctatcaagtcatagcttcattttccatgttggtcccaacattatgactataaagaggttttattgcataaatatgtatctctttattaaagaaactaattaattaagaagagctagtaaattaattataactaattgaaaaaaatgaaagaatgtagtatgttttgactaggaccactatttatataagtgcttatgaaatttctcaaccctttttctttatatttttcaaatattgcataattagtttgttttttctttgtgatttgtcttttgaaagaagctttttaaaccatttttctaggtgtttagtgacataaaaaaaaaaaagtggtgaaaaggatatatagctatagtggcatggcgtgtaacccacaaatcacaatgctccaattaaaaacttcattcctttttctttttatacataaaagcaatgagaaaggtttttgaaaccctcaaattaaacaaaaaaaaaagtttttaaaccaaggcatgtgatggtgaggtggaaaaggaacttatatatatttataaacgaaaacaaggtacatgtgtgtgaattagctctaattcctaaggaatctcctagatttgtcatggtatatataaatatatatataattatttattactaatttgtataaccccatgcaaatttataattttgaagagattattctattattataattaaggttaatgataagctctgtcactgctcaaataactctctttaatatgttgttatatacacattactacattgtacatatgtaaaggtcaaaaaagccacaatatacaacttttccttttactgattttgcctttatatttgtcaccaaaaatactaacatataataactaatcctccatccattattcatttctatgtgcactgtatattacagatccccacttacccatcataggttaaaaataagtttaaaaaaaaaaaccctaatataatataatgaataaaataaaaggatgaggggacaagaaggtttccatccatgaacgatcattggttttctttctttcatatatacaggtccaaacaatatataatattatatcattataatttcaagtgtttacccaagtatggacccactggttttgcaagtgtatgattgtgggtcaagattgtattgtgtataatcaacttgaaaattgccagcacaatttggtagtgtttttcttcgaaaaataagatataatgataaaataaaactatattgaaaagtggaactagatagttttcattattattattattatacattattctattttaaatttttactgctatataactaattttctaatcatgcatacaataaccattttatggtacagttgcagttttgattgttttcaattaatatctataagtattttagatattttcagtatatcaattttagtcttccggtatctagttgatgaacatgaagtagagttttttattcaattctttctaaataaaaaattccatgaaaaatacaaattgacattttatttacaaaaatactttcataagatgtgagtaacaattttatctttaatgaacttttatttactaaaaatataccacttacacatatccattcatgtcagccgaaaccaccttccagccattaccaatcccacgttcaaaatctacaaagaccacctcacagccataactttcgacatcttcttcttccaactacctactttattatcaaaaaaaatttatatatctttcatttcgtatatataatgactattacatgtggttctatttttccatctctattgccaaaaaaaagattcaaaaataggtgataaatcaattgctaacaaagctaaagggaaacgcccaatcatcgacgatgatgactccgatttaactccccctatggccaaaggtggtcttcgtacagtgaagaagtcaaaggtgcctttgcttgaaaataaatttcaatttcgatgactagaagggaaagaagaagtcaactttaagacaactgtgatgaaattataatgcaacagttatatctgttgcgagccaactaacataaaaccacaaaacaacttataattccacatatttaatacaaatgaatattacaataatcgtgttttatcagatcgcatatttgacaatttcgagccctatttttataatattatgatattgtagtaacaaaattataattcaactaacgtgaaactgaaatgcaacactaaaaatattaaatgtggatgtatatctataagaaactacttgttagtatttttttgtcactgatcgataattagttgtaccttaatagtaatatgtggagaaacaacgttagcaaaatatttatgcaactgttatgaaacattaaaaattagaatagtgtttttacgtacgtaactttatctacatgtctattcatgatttaatatgaacaaaattcaccattggaaatctggaaaacaacaaaaatgcatcgggataaacatttaattatagtattaatgtaatttttattttgtattatacttgagttgaattgtttgggaacttcagttcaactttttgagatctgcatttcatatggatttgaaaattatagtcaggacattagttttatgcgaattaaattggatttttggtggaattttagttttgtagtagttttatgcacttttttcatgaattcgaaatagaccatgttattttgattgattccggtcatcttttcaagtaaagtcaccgaaattaatggtggttctctttctggttgaattttgtttcgattgtgtagggtgctgggatggtcgatcgaaggttgtgtacgtgagtttgtacttcttctcaggtgatgttgccagaattaatggtactttcttgcctgccggagttttttcatcgttgctaacctgattgcatcgcacgaaggtttcaatcccggaaagtgtggatcatatgggttgaaagtgtgtgtaaaaggtatttgtgtaattttctttattgggttgtatctttatttatttggccgggtgaaagtttttttataatattgttactttattttgttaaaattgaaaaaaaaagtcattttttattattattattattttatatgttgtaattattcaaaattacttgtaaatttttataaaattttgaatagtttaggtagtattaaaacacttttatttatttttttatttttcgatcacaaaaataaaactttaaaaaaaaaattcaaaaacaaaaatgtgttctactgacgccccgtctgggtacgagtttgggccaggatctggtgggctcgagtttaagtctaaggcctgtaaggccagggtccggggccaaggtccttgtttgggtacagggctgaagtcttggggtcgggactcgagttagtgtctgaggccaagtctagggtctaaggtcgagtccggggtccggggtctgggacagagtccgaggtctaaggtccaggactagggctttagtctagggttgaggcttgagtctaaggccaaaatcgtgatttggtcggggtctggtctggggtccaagtctgggtcttgaaatagagtcgagtttggatccagacccagaatcgcgatctggtcagggtctgatctggggtctgagtctgagaccagagtcgagtttgggtctggagctagggtcggggtttaaaataatgacaaaagaagatgcaaataccttgaaatttaatacatgtatgttaattttttttttttgaaagaaagtgattttttattttttatttttaattgtatagtgaaaatagttttataaaacatatttttaataatattttaacttttttttatcaagaaaaaaaattaattaaaaaagtattaaaggatgtacttttatagtgtcaaaaataaagttcatatattttattgcacgtactattattattttttctcatacgaatggtgagcaactttttaaatttaatcttcgacattgtaaactattcaaaaaaaaattaaaatttacttgtggtcctaaataaatacaacttatataatcaattaagaaatggactctaggataccgaaatagatatagggtctactgaaaaatttctttaggggagcatactacagattttttccatatatataggtacgtgtgtaaaataaaacaggcacgtatgcaactaaaagtttgaatattatttttattccgtaaattattgagaattttttaaaaataaaaacctagcataactgtaattcaatggcggacccaggatttaagttgaggcggggcgacaatttttttttataagtgagggggtgcgtctttttttttctacattgcataatatgttaaaaattaatgcaaatttatattttagtattaaatatagtataaagt

SEQ ID NO: 86643 - DNA, 824 bp, Cannabis sativa
ctttttcttcttagatcttgcttgcttagcctcttgtggcttctctttcatttttgccctctttcaattctgtaattgcttttcaccacgttcacttcagattagtgtgggggacaaattcaattcagtcacacaaaattagatattcaattaccattaaatctatttaattacatttctactaattttcttttttaatttgtattacttaattattttttatttattttatgatatttattctattttattagttagtaatattattattttagttatttcaatttttttattttttcaaacgataatatattaaatgaaaatttatatataatttttagatatgtttttcatattttaaaatcaatattttttttaaaaaaaaaacacttcatatactattttttaatttcttttttacttttattgtttggattgctccggtagttagtacgtaagttgctatatagattttggttgtatttgctctgttgattgctacgtaaaaaaaaaaaaaaactactttaaaatgtaaaaatgaaaaaaaaaaaaactcctatttaaaattaggctatttacaaaaatatatatataaaaaaaaaaaagttttgatatatatggcatgcaaacttaattatactaaatatgacctttttccaaaaaaaaaaattaaaaaaacttaaaatatggggaaaatcattacagaaaaaaaaaatgtcataaaaactttaaaattgtgattctttttttatcatataaataagggtcaggatgcaaaatggccctaaatctagcaattaagttaaggctaattagcaattttt

SEQ ID NO: 86644 - DNA, 1457 bp, Cannabis sativa
tgttaaatcgtcaaagatgcaaaacttacaataaacatctttgtcttctgttctttatatgccaccgcacataaaaagcaatatactataatataatttagttcgttcttaatataccatctcacatagcaacaatataccccactctcaaagtaatatactggcaaatgaatagagttgaataacaaacctcatatacctaaaagtaaatctgatatgtgaatgttctaaaaaaaatataccataatgttaaatctttattctatgtgaaacctgttgcaaatctagatatatcattgttctaaaaaataaaatataccacaatattagaaattattttctaattatatttcatatttggttgaatagtctaaaatatagcactaaataagatatattcaaaagtgaacttgatatatcattggttgaacgaattagaatatcatgtagcaacatattttagtctgcaatcatatatttattggtatattctttattagataggtatgtttgttttgtgtgttttcatatatatatatacatcaaactttagtattcacatgttaataaatataaatcgtagcatacaaaattcatgtaccataaacctaaacagatataccatagtaaaaaattaatatacgatcaattttctatgttcaaaaaagattataccttagcacacaataaatataccacaaatttaaaatgatataccaccattaattatttttttacttatttcttaatagaccttatcacacaataaatatataccataatgcaacttaaatattccaaacttaaatcatcatatactttttaatctaaatattcatttttatacctgtattttaatattttcctgtgccttttgttcctctacaactattctttgttcctaacaaacaaaacaattgtagtgctttttaatatttaataaaattaaattattagtatatacaacatcccatagaaacgatataccttagaacaatatgaatatactctaaacttaatctaattttatattaagagttttttttaacttcttgtttgttaatatatcttagcacataataaatatatactacagtgcaaaataaatataccaagaacgaatcataatatacaaaaatgatctaaatgtccttttttatacctacatttcaatatttttttgtgatttttgttcttcgacaattgttgtttgttcctaacaaacaataccatcatagtcattttgatatgtaataaaaataaattatttgtatataccatacctcattgaaaagatatacctctgagacatataaatatactaaaatcttaatctactactatagtagcaagaatttatactttattctctatttcttaatatatcctgtcagagaataaatatatatcatagtgcaaaataaaaatacaataatcttaatataatattatagtag

SEQ ID NO: 86645 - DNA, 782 bp, Cannabis sativa
aaattgggacttcaccttatcatagccattaattatattttgagatgtttgtgaatattttttaaatttttttagtggaaaaagtacttacaattagtaaaacagtaatttctttaagagcattgctattaagtaccagtggtctttctcgacatgtcacgttgtgattggttagcgatactctttaaaaggtgttatattaaattatatgggacctaatatttagttggataaatagcgatacttgacacataggagggtggtgccctttagcatttctctttcattaaagtctttcaggcgacgactaacatgtgtcacaaggattgagcataaaatttaaaaaaactattcaaaccggcctatcaaatatcattaaaattaaaattactggaaccgaaaactaaaaaaatcatcaaccattcaactccccgttaaacggtcagttttttaaccaccattaaatgatgagtcctttttccataccaaaacaactaaacaaaaccaaaactgaccgctttatatatattgtttactttttactttttttttttttttttatattatatatactttatcaatttaaattattttatattacatataaatatagagatataattttgtcctgtgatatactttcacggaatgtattttgtgatgtacgacaatcgttagattggagagctatttgatctgagggctggagttgatctaagggtaattagggttaaaaaataataacgtactctgagacacattattacgtaccctgagaccca

SEQ ID NO: 86646 - DNA, 1108 bp, Cannabis sativa
aaaatatttatgttactttctttgtgttttacattttttttttcattgttaaaatgaaaatatttacaagaaatgaaccgctgcaatatatttatttttattattaatttattttttgtgtttctaataaatattgttttgtaacaataatttaatttccacttaataaatatttggagggtacctcttatttgttgtaatttgttttaagatattttcataaattattatttatattatctgtagacgttgtaatcctaattattatatagatagaaaatatataaaataatttttctttaattatattggttatattttaatacatcataaaagatatattgggtcatgtaaatttcaaattaaattaaaatttaaaaacaaaatacgtttcttattattacttcaaattatatattatatctatctagaaaaatcttaatctagatatctataacggccatttttttaaaaaatatatatattaatcattaattaaatcatattacttagattataaacaaacatttctatataagtacgcacatcatcattaattcaagaaaaattaaaaatatttttagatcaagaaaatacactcaacacaaaaacaatatataggttaattagtcataattaaggaaataatattagtgattatggcaatgaaaatggtttgtgaatatcattaccttcctaaggatgatattattggagaagatgcacacttcatttgtgcaaaacaagaaattattggagtggctgacggggtaggcggttgggctggtaaaggcatcgacgccggtgagtatgctcgccaactcatgagcaactctatcgaatccatcgtcaagaacaataacactgatcccaagagtatttttaaaagaagcttttgcagctaatgctaaggccgagattcaaggctcctcaactgcatgcatactctgccataataatggcattttgcaaagtgtcaatactggagatggcagattctttgtctttagaaataataagttagtttacagatcgaagactcaacaggtggaattcaacgtgccctatcagttgggaaactctgagggttatgatactcctgactctg

SEQ ID NO: 86647 - DNA, 1218 bp, Cannabis sativa
atatgcctttgtttttcttttggaccaaataagtacgtagttcttaattattagaggccctcacaaaaattttgattcataaatgtttactaattttctcgtatacaattaatatttatggtatagtttatttatggtccgtttattaagcaactataacattaataatagagaatactattttagtgtcttatttatatatatgtgctaaatacatttactttttattttctaaaaaaaaacgtggcattttgaaaactgtgattattacgtgttgtctgtcatctttttcctttaaataaaaacatttttttaaaaaatgtttaccatttaatgattttttttcttttgaaatatgtttaaatttaatgattaacatatgctctactctatattttgctacggaaaatatcattgtaaactaatttattttttaatctaaaagtaaaataataatattaattatagtggtaataggctaggcataatctcccctcccatcccaaatgtctaaaaaatatatattaataataaatcacttttataaaaataaaaattagacttacacttatattttattaaaattcacttcatttaattaatatattatactttttcttttaatatctagaattttacttttaatattaaataaattttatatatattaaaaaaaaagaagaatttttactaaaaaataaactttttaatttatgttatcttcctttgtatttaaattaaacatgtttttttttttttggtgcagataatttattgaaaaatggtaatttcgaagaaggaccatacgtgttaccaaaaacatcatctggtgtcctaatcccaccaaagatcgaagacgatcacagcccattaccaggctggatgatcgaatcccttaaggcagtcaaatacgttgactccgaccacttcgccgttccggtggggaaacgcgccgtcgagttagtcggcggaaaagagagtgccttgactcaagttgtccgtacaatcataggcaagacttacgtgctgagtttcgcagtgggagatgccaagaatgcttgcgaaggtagtttgggtttagaggctttcgccggaaacagtacagttaaggtggcttataaatcaaccggtaaaggggggttcacacgtgccaagcttaggttcaaggccacgcaagcacgcacacgtgtgatgtttttcagcacgttctataccatg

SEQ ID NO: 86648 - DNA, 750 bp, Cannabis sativa
tacttgttagtaaatctacatcctggtaaaatatatccaacactaatcgtgttgcacatatttttttacctctagcaagtctcagcttcatcctgtagttctgttttcaataataatactcgtaattctgttgttcattgtatcgctgtcccaaaatagcatttacacctaggacacacttctatacgaattagaaaatcatggaataaaacattgaatttttttattctgattctcctatatctccttgccatatttgtcacttagctaagcaaaagaaactttatttcaacttagctaacaacataaaaactgttctattttatttaatacatctagacatatgggggccatttcatacaataagtattgatgggtatagatactttctcaatattgttgatgatcacacaagattcacttaggtttatatgttcaaaagcaaagtagatgctcaaacaatcataccacagttttatgctcttatattaaaccaattttctacctctataaaaggcatcaaatgtgaaaatgcaaaggaactacacttacagtccttctttgcaacaaaagatatcacaccatatcattcttgtgttgagagagatcaacaaaagtccatagttgagcgtaagcatcaacacatattaaatgttgcacgagcacctgccttccagtcacgtttgtctctcactactggagttattttatgcatacaactgtctttctaatgaaccgaataccctctat

SEQ ID NO: 86649 - DNA, 574 bp, Cannabis sativa
aataaaaaacaattaatgcatctaatggttggaaccgatccaatccaatatattcattggatcggatgacaaaattttatatccaataaataatttgattggatcagttgtgtccaaattcattagatgtaatccaataaatacccctacccaacgccaagttcacatgtgggttgttactaagtctattgggttcaaagagcctctaattggagaagcattaacttgtgagttggctttgaggattgtctcccaatggtccactcttttgttttggttgataatgattgtaaagtagtaatcaatgctattaatgagatgattcttatatgggagatccacagctatgtctttaatagtaagaaatattctaatttttttagggttgtaacttttgtaagactccacataagtttaattttgttgctcacaatactactcaatgggtgttggttaagaatattattcccaagtgatgtcatttgtaatgatcgtataactatttgtatttattaacttataaatatatatatactagcaaaaagctacgtgcgaggcacaaatactaaatttt

SEQ ID NO: 86650 - DNA, 1177 bp, Cannabis sativa
ggtataaaactgtattatttaaagcgaggccaaatccgtaaataagtgcaaaattaggtttcctagtgcaaaaacttctaatttttatggacatcacctaaatatataatattttagtataaattaaaatttaacttagtattatataaaaatataatatataattcaattcaatataatacaatacaatacgaccaaatactagaacgagcctttaaagagctgttaaagtatctctaatgaatatgctacgaaagatatttgatgatatggatatgtttttaatattttttttaaattgatgcttatcgttagaataaaaaaaaaacacaaaagaatatcatacaatagcattatttacatcttctctttcttatttttttattattatattatcataaagtaagaaaattaatttatttaatataagttacataattatataatattatattaataatttttagagatgcttatttttggatcattttagaacaaaagtaccaaaaataatgaggaagagacataaaataaataaatgatgtggaaatttttgacactcttaaagaatactatcattggagatactcttagtaactgatgaaaatcaccatattgtgctttacacacgaaatgcttgtcagaatgtcacttcttcagatcttaaatttcacctttctaggttcaagtataccgtttgccattcatgagtaaaacaacccctttggctgagacacttggtaatttaattggtgaatttatagaagtctttcaagactcttcgtatgaaggatggggtcctttcttggacatctgagtcaaactcgatgttacaaagccattactaaggggacgtatgatcacattatccaaagcaagggataagttttgggttgaattttgatatgagaggctgccataatattgtatggaatgtggtaaactcggccatcgttataataactgtgtggttttcttagaaaaacttgacaatggagaggaattagatctagaatatagaccaactataaaagggtcagccctccctacatctggatatgacaggtatagaacagattttgtaaaaggagtgcttggcctttgctcacttctactttgttagtagttgatgagcaaaaccagtttgtttttacagcacctatgaattctactagtg

SEQ ID NO: 86651 - DNA, 1084 bp, Cannabis sativa
ataaatatttgttttgttgctaactaatataataaataaatatcagaattcgaaaaatagtagcataaatcttcaaatttctaaacttaacagtgttattggtacctaatttagtggtcttaaatgaagaccaaccaaagaataagaagagagagatttgagttttggtttgattcatttatgatttaatttttatttgatggatgtgttaagatttgtgttcgaaatttattgtgtgtgtttttaatgtttgagttttagttttgtagtggggttctaatgtttgagtttgtatttgtgagatctattttttttttaaattatattcatagattttgagaacttgaaatttgatgttgtttctattgaatattttgatcgagagtttaatttttcatacgggaattaaagtttgccttttcgtttcattaattaaaaaatattaatagaaagttcatagaatgagaattttgaatttgtgaaaatagcattaagaaataacatttgaatagagaatcaaagtttacagttatctccttaaaaaaaattatagttaatttgtaaggataacatggttggaagaagatagaaaataataaataattaatttttatttcatttaatatgtatatatatttttttttgaataatatgaatttattttaatttatttttgttttttaaaattattttttctaaaagaattattagtttggctaatattatatttacatgtggcactttattaatcaactaacagaacgttaaattgggtgttaagtttagaaatttgaaaatattaataggaactacaatgatgatatcaactttatataaaaataatgcattataaaaaaaaaatataatctcacacttgtttcgtctacatataatctaacacatatttgattcataacatattctttctaaaaaaaaatgcactcttcttatattttggaaagtttaaaaaaaatcttcacacatatatatagtcctgaatacgtatatatataaataatttaataattatttaatttaatattattaatttagtttatatttattaatatgtgtttttctctaa

SEQ ID NO: 86652 - DNA, 615 bp, Cannabis sativa
tatttattattactttattttttataaaatttgggtataacaacaacagtatgaaacaatagtctaatccataaaaatatttaaagatcctacaattatattttttttttacatttttggttatatatgaaataattcattctataaaagcattgctattgggcatcatttgtaggtggcaccttgcgattatttagtgatattccctaaagggaaattatagtaaatggcctcaaatcatagtactatattagtaaatgtcctcatttcaaaacttttagagaaatgacccttttagactatttattatttatattgtcttttgcaacataaaaaaaaaatcaataatttttttcatattttttttttaaaaaaaaaatagaagcaaattacttaaagattatcgtatatctatattagttttattaatttttttttatttaaaagttatgtcaatttttttaatttagtatgagttgttgtgggttgttagtatatagattttactgtacaatatatttttattttgttgtatgatatattattattcttaaatgatatttattttttattttactaagtataacagtagtacataattttattagcataata

SEQ ID NO: 86653 - DNA, 717 bp, Cannabis sativa
tattttataatttttgtgagagtcaagatctatatgagtgtttggtaatttttgtgagagtcaagatgagcttccatgttgagaagaaacaatctccacttgtcttatgttggcagcagaaggaactaatcttattctcaactattttttattttaagtttatcatatttttttatatgatggaaactgattttacagatttagcaatcagaatagttagaaggcaaacattactctctacttcttttatttttacgaagtgtttcatcttttaaattaagtttggattatatacatatgtgttgttgtacttgatcaaatttactatacggtttgattatatttgtagtcatgctttgttacatctatctttatataatgggaaagtattgtcgtttgatcttatttggttctgttgattaggagagctaatgatgacgttagcttcttatatgtttttgtgcaaactggttttaatatttttatttttggtgagttatgttaatggtgtttcttaaaaattagtttcaatcttttttttaatcagatttgtcaatgtattatatttttctttcaaaattaaggtggtatcatgatatacaactttactataaatttttgttatgcttgttgatttttataaattttatcaatgttatatgtaactatttgttgtaaaaattgattttattattgttctctgtttggtttgtcaaa

SEQ ID NO: 86654 - DNA, 510 bp, Cannabis sativa
tatagcaccctaaatactacattagcaaaaggctagtcgatgcagaaagtcgataaccactcatggagaagctgacctacaacttgctcttagcttctagaaagttgagaccctaatttcaagcacaccccatataaggtgtacaccgatcaaccactgtgataggttttgtagaaacctaaagcttctggccgactactcaaatgggccacagagcttggccagttcgagatcacataccaactaagagcagccataaagggtcaagctcttgcagacttcgtggctgagtgcatcaagtgaactcttaagccctctcaagattcaaaagaatagtaagagcaagagcaataacaaaattgtaacgccctgtccaacagggacgccacacgtgtgtttttataaaattcttacttaagtactatataattataccaaaagtgtgggtaattaaattcttgataattaaaatcaagcatataaaaacttctttatagtaaaagataagta

SEQ ID NO: 86655 - DNA, 695 bp, Cannabis sativa
  modified_base (584)..(589): a, c, t, g, unknown or other
catttcattttcctctccaatttagttttctcaaatagctgaatttggatcgtccctttcgcaagaacaaggttccaaatgaggctaatatcgacttggccactctttgcgacttcattactgatcctaaggatgctcatcttccttataatcatcctcaatcaatagaaccaaaagtgagtcgagtgacagatgaggcgtctttaaaagacaatagagcgtagaggattctctaatggtgtttcttttcggtgctcttacactatttttctaagtctttatcttatggttttcttctttttgtgatatgggtttttcttcttcttattttcttgctctttcaaggttctctgctactactgagtttattgatcacgatgggtggattagaagagaatacatatcacgacactacaaacccctcatttttttaaggtataatcttaagtacaattttctgtatatcagtcattgagttatatttggttaagatattttaacacaaatctaaagcttagggtgtgattggtttagtttagatttgaaaactattttatggttttgaaaattaaaatggtgggggnnnnnntaagaattcttgattggttgagtgtttttaaaaataaaatttgaatactattttgagttttaggctaaaaaatgaaaacaccatttttatgttttttgtgttttca

SEQ ID NO: 86656 - DNA, 729 bp, Cannabis sativa
tggatgtgtttgttggaaatctaatctacaaaaggtggttgcactatctacaactgaagctgagtatatggcagccacagaagcaataaaggaagcagtttggttgaaaggatttgcacaagaaatgaagattaatgccactgatatcactgtctactgtgataatcagagtgctcttcatttgatgaagaatccaatgttccatgaaagaagtaaacacattgacattagactccactacatcagagaaattattgcaagtggtgaagtgcaagtgaagaaagttaagacagatgacaaccctgcagatgtgatgaccaagtgtgtgacattagcaaagtttagacattgtctaaacttgctcaacatcacaacactgcagtgacagacctcctcggaggtaccaggaaacattgagcatgcatactttcagacttatgactaaaaaggtggataattgtggtattttttagacataagtctaatagtcatgacatgtggcactctcggattggacagcttcaaatgttagttttgttagttggtttaggagggaaagttctcttcatgcaccacacctatataaactctaaaccaagacaattctaagggacactaattgagacaaaaatcagagagtgagagagaattgagactgagtgattgagaggattaggagcttgactccttctgtaattgatcctctctgttgtgatcaaatcacttgta

SEQ ID NO: 86657 - DNA, 838 bp, Cannabis sativa
ttttctgaaccaaacctttttttttttaaacataatattttagtattttttttttttcataattaggttgttatatagtgtttgtcaatcatatcaagtataattcatagggtaaattggttgatctaaagaaattaatgcaatcaatttacaattgaacaactactactggtgtatttaaggtcatttgttgtttgttgtcaagaaaagttgtttatacgttgtttttatggattaaaatagttgtttagaaatactaatactaataacaaatataaaaattttaggatataaatggaacctctgcaagtattggtacagagcaatggtcattatgatgacaacaagtactatgttaattacgaataactggagaatcaatataaagagactacacttatgttgaattagtgcagataatattgcaagaactagactacaatcctaaaacaactcaaatacaattgaaataccaactgaaggaaagttgtcaaccactctaaatcaataatgacaaaagtttgttatattacataaagttattaacaaagaaaaccgatttcacacgatatctatttgtgtgaacacattcaactacaaagaaaaatagaataacaatccttttaggtagctacccaagcaacggtgtgcaacaatatgagagtggctggaagtgaacatcacttaggacattgaactgtgcaacaacctgacaacaactcaacaacaacatctaaacaacttttatctgctccaaggaggggatcagtttggcactttgaaaatagaatcaactgtaaaacaataagaaaacaaccaaaagcaaacccccgaagaa

SEQ ID NO: 86658 - DNA, 541 bp, Cannabis sativa
gacggttttgaactgttgcctattatgcccgttttatgacggtcgtataggcgacggttatagaaaccgatggaaatactttaaacgactatttaaaaacgtcgaaaaaacctatttttgacggttgatgtgtacattcttatacacatggcacatttagattagtacacttaacattattatttaaaatttatgaaaaatatttttaaaaaattattttgaattacaaaacataatttaaaattataaaactatcaaatattaaaaaataattttttttattttaatattcctctctcctcccactaactccctctctatctctctttttccctctctctctttccactacaagaaatatcacttttgtcggcgcatatttatgccggtaaaagcaggcacaatgcaccagcatactttggtcggcacataagtgcaccgataaaacgtgtctgctattctcggtcggtaaaagagtttttttcgacgaaattagtagttgcgctaagaaaaaactaaatgctagtgtaaaaaagttcct

SEQ ID NO: 86659 - DNA, 576 bp, Cannabis sativa
acaggtaatcttccagaaattgagtgaataggtctctggatagttacatggccaactatagacttacaaacgttttatcacaagcatgaattatgccatagaccataggtcaaccttctcaaagaaactccattaaataaaaacttgttatttagcgttgctgtgtagagcaacaataccactacaaggttgtgttcacacgatcttctaagcaaataaattaataatttctttattaaataaaaggaatattcaatttcccagtcctttgtgtcgttctattttattttaaggcacaacgatatttaaagaatatcaactgaaactatcaaagaattcaacacagataataaaactcacaaattcattcccttcaatcaactgcgcaatcgctaaaaaaaattcagctggagctataacttaaataacaatcatatttgattatcagcattttgtcggcatccaaacaaatattacgctttaaacaaggtctcaaaatctataggcaataaatctaagagcgtaaggttagcaaattagtgaaagacctagaagacaaagcaaatcgggattgaa

SEQ ID NO: 86660 - DNA, 999 bp, Cannabis sativa
attggagaaacccaatcaagatctgtcggacaaactctaacaacaaaccctcgacgatcatcaaatgtagaaaaattattagcagcagaagaatcaagtaaacaatccttgaatatgatgtaaaaaatatatatatttaaatatataggtacaaatcactctttgttcacatctaacaatattttactccctattcaaacatgcagtatcaatccaagaaacgaaagtcccaaaagtttcgtgccgtgaatattattgcttcaagttacaaatacgggaagatgaaagatcaattttgctgctctctggtcggctactgcaacaatatgcagtagacatgtatgtcaagatggagtcttcaagattggattattatagaggccagcaaatgcacatacgaacagaattatatcaaggtatagttgacacgattacgctgggagaacgagacgcttctaatgttgggaaacgaatcatactcccttcgtctttcataggaggaccaagagacatgaggaagagatacatggaggctatggcgttagtacaacgctttggtaaacctgatatttttctaacgatgacatgcaacccaaactggaaggaaatcacaaatgaattatgtcaacacgaggagagccaaaatagacctgatctggttgcacgagttttccatgcaaaactagaggaattaaaggacaagttattcaagaaagagatattcggcaaggtcgcagcatatgtctacgttattgagcaccaaaaaagaggtcttccacatgcacactttttaattatattgaaaagggattggaaattacatgctcctgaatccttcgatgagatcgtgtcagcagagattccagataaaaactctaacatccacttgcacaaggcggttgtaaaacacatgatgcatggaccttgtggggatttgaacaaaacaaatgtttgcatgaagggggagaatccacgttgcaaaaataattttccaaaaaa

SEQ ID NO: 86661 - DNA, 535 bp, Cannabis sativa
ccttaagttagtaaataaaaaaaagaacataaatatgaagaaaagaaacctaaaattaaaaaacctctcaagcccttgctctctcctcttttcggccatggaagaacaccaggggggatatcaaatttttatctttattcagctcagttcttgtatgaaatccatacttgttgctgtcttaatcttgaggtaaatttctcttctagtttttagtgaattcttgaaggtttggattgagttttggatggggaaacttgtggtttcagggctgtgtgattagcttaagttcagagctcattgtagatttaatttaaggattgtttaggttctaattgatgtgaatttatggttgtttgatttaaaatgggaagttttggattaagagcttagttttggttcaatcatggtgaaattggcattttattactgttctgtgaagtttgggaataactggttaggtttggagcaagctttgggactttgaagatctgaaatttttgagtttctggtgtggtgaaccggaattccggatggt

SEQ ID NO: 86662 - DNA, 973 bp, Cannabis sativa
cacatagttaatgattgtgattatggtattatattagtccacaaataaataattctaacagcaaaaacatgaaagggttgtcatattattgttttattataaatataagaagaagagaaacatggattttcacaccacattacatagtactagtcagtgtttgcttcttttgttttgggaaaattcatttgactttctattctatttctaagccaagtctcaatttgtgaacggaaacataataatatcccttatatatatgacacattttccatagccaaatgtgaatatcttgtgtacctacctaccacttgtttgctttacggccaactttttgttcatcctattttttcaaccactccacttaattacattatctcttaagattcatttgtaagcccactaaactaaactaaaccttcattaatgagaaacttcatagctaaaaagtgtggttttggtttcattctttcttaccaataatgcatgcactgtatttaattatgacactttcatccaaacatcaatacaaaaaaaggaaagaaagaaagcaactttgtttaaatgaatgaatatgtcaagtacacagaatcaatcagattcattacattttacttgacatgtaatccacctatgataatcaaaatcaaaaggattaatgattgattcaggacaaagtgtaacatgaatgaaatttcaacagtttgtcaatctatgatgatcatcatcgtagtcatagtgggcactggttggtggcttggctgtcattcatatcatgaaatttcattataatactaataaaaatttcataatggtcaactcaattcttataataatattatcatcatcaatgaaatcatgaacagagttagagttaatccaaactaccttccttccttgaacccagaaaacgcttataattcttctctgctccactaagtaaaaccaaaaaaccaatatcatcatcatcatc

SEQ ID NO: 86663 - DNA, 968 bp, Cannabis sativa
caaacctcaactcaactaacaattccaatccaaatcaacttaaacaataccaagcaaactcgagaataccaaatcaagctatcttaattcatacagcaatataaaacccaatttcacacaaaaaacctaacttaggctaaagaaaaattaaggaaaaagagtaaggagagatataccttgaatcacaacacacaatttccactagaaattcctgaaatcactaaaacaactccaatcctaactgctaccttgaagaatcgaaaggaagaaagagagttgtgaagagagagagaggtgttcttcttaaagccttttcctttaaacctaagtaattgaattctatgattttaattatattcatgacttaatattcagccactaacattaacaaaagacaaaaagtctaagaaaaaatgatcatgcccttgactaacaaatgaaatcttaccatcacaaggggcaatttagtcaaatcccaaaccccgacaaacccggtatttcaaaacctaacaatgataccccgctaataataatattctaatacaaataaaatgcgactctctaaaggccaacgtcactttccaccgcttccgagtaaaatcacgaacattaagaaatttacataaatatatgaacttaaataaattccacaatatacattttataaataataattaaatctcatgcataaaccctaattatttaatactccaaagaattaatcataatagcggtctttacagctttattatctaaattttctggagcaattttatcccatgtgtggctcgctttagatatttagcgacttatggtttggcaaaacatgctctttggttagacgataagctatcctggctcgaggaggttctaccgccgtttgtggtttgctgctttaataatcatgtgtggctctgttcacctcgtcaaaaaaaatattaattaggattaaattggattggactgag

SEQ ID NO: 86664 - DNA, 567 bp, Cannabis sativa
ataaaagacatttgcgatccaataatctcttcaactacttgtgtgattgtgaaattttaagattttatacttaattttttatctaataaaaaaaaattatttttactttacatgagttagagttgtaccatcaactgaaaaaaaaaaaattaagaaaaaaagttttttgacaaaaaaaatattgacttgacttaagtattttgtatataaacatatttttgatatagtgtaaaaaataatatttttgattttttttttaattaagtagttaaattaaggatagaaatttcaatttcttttttattattcatcatttgatcaaaatctaataatctgatatttttaaaattaatatttatagttaaattatttagtaattatgaatgggtaatatccatttagaagtattctatatatataaaagaaaagtatgaggcggtaacgtggaggtctaatacaatcataggtctagttccataatacataatcattaactatgtgcctaatgttgctaataaccataatgagatggttcgcaacttaattatgtgttagaggcacatgaga

SEQ ID NO: 86665 - DNA, 511 bp, Cannabis sativa
ataccatagattacacaagtaatagtgtttatcaatggaacctagctacctccattaattagtttgttgttgtttttgttataattaatgatatgattataattatgatttgaaggaagaagaagatgaggaggatggtaatggtaattaattgttttggtgatgaatgagagttacagacagagaaatgtgaaaaagttagttatttgacagttagagattttttaggggaaacttaagaaagtgcacgaacctcggaatccctttagcttctcaatttgaaacatgtttggctcccgacattttttattcatttttaattataaatgagtttattttttattttatgcgagagttttattacttctttctttctgttgttttttttttaaaggttctttttgttgtattttaaatcacgggcggacccacattgtagcgaggggggcagtcgccccctgaaaaaaaaaatcgagaaaaaaatgtatatgtattttaattagttacaaca

SEQ ID NO: 86666 - DNA, 1311 bp, Cannabis sativa
tgatggttgattgaagagggatggagagatgcacgtgtcatatgcatggggagagtgtgcatgtagtatatatgtaataaaataaagaaaaaaggtaaaaatgttgagataaccgtgtgtaagtatttatgtaataaaaattacattttgtatttttagtgtaaaaatttctaataaaaaaacaaaaaaataaacttataacaaacacggtgcaaaattaaaaaatgccttgaaatacttataaatggtaacacaattaccctttaattattcttaaatatatatgctataaaataattaggaaataaatttcctcaaaatatgaatataatgtataaaaataataatcacatcaaacaagaaaaaacttttatagtatttaccaaaataaatatattaaattaatcatgaaaacaaaaaaggaaaggccaaaactaaaattgtggtattaaaatgatataaatatcataataaaaataagtagaaaaataaataaataatcataacaattcttaaagatacgaaaattcaaaataatttaccgcaacaatgtttgaaataaaataataacgaaagaacatcatataaaaagaaattcatataaacaaaaataaaaattaaaataaaatatctcaccaaattaaaaatatacttctatcacaattataaataatacgaaaacaattccccaaaaaaaagtatgtatatataaataaaatgcctattgtgtatagaaacaaaaaatatggtataaaatgttcgtacaaaaattaatacaattaataatgtaataatagaataattaataatattaattttttttgaaaggaaaattaaactttattaactcaccaacataggcaagagctcagtaggaatgttttccatactaaaagtacaatcagaataaaataaagacacccttgcaaattcatgagcgactctattaataatattaacttagtccaccatttatggatatttttttgaaatcacaaaaatttaatatttttttttttgatttaagcgtttatatattacaacatgtttttacctgggactcgaacccaggacacaaaaatttaatatatatataaatttaattgtataaaaattacataaaatatttatgtcgagattttcgcaacaataaaatcttcggcgtgaaactcgcacaccaccactgctattgtagagctgcttgaaacgactaccactctcaaccatgggcgtcttgtgttattatcttctctagtcattagcaacaaggatggatcgaaaagtatctggcttaaaagggagaattaatcg

SEQ ID NO: 86667 - DNA, 707 bp, Cannabis sativa
  modified_base (639)..(648): a, c, t, g, unknown or other
caattatccttattattttcttacacttgaatgttttttctcaattttttatttattaattattcaatgtatatttttatacaaattaataattttgtttatcatatatttttagactataaatttaagagaaatttacattaagtacccattattccatttaatttacaattttgaaattactctttttttaatgtttgtttttatttgcctatattttataacgtggaataacattttcattttcttttaccttttttttctttcctctttctctcttttctctcaaattttaaaaataatatttgatcggttgagcgtggaaagaatatatcattatgatctactcttcaacatgaacatttcaaagatgtaggaaatatattttttttttctatttttagaaaagaaaatatttcgttactcatatagtgattagttatagttttttaatttttttaatcttggttaacatttatcatttattttaaaatttagccaattatattatattatatgataactaattagtttttacaattaactaagattacaaaaaatatatcttaaatgatatgtatattttttttgtaaggatatcttaaagggattatttcacaaaaacataaaaacaacaannnnnnnnnnaaaatacggtttcacggaatttttaaatatttttacaatttttttttattttatttaca

SEQ ID NO: 86668 - DNA, 691 bp, Cannabis sativa
ttatatatagatatagatagataattatatatgcaaatgtactgcttacatggttttgaaaattattttgctaataatgtggttaaccttattagttttaattgttttattaaagtatgagttgataaataatttttttttataaagctaacgatctataggcttagtatttaaataaaatctagttgaaatagaaatatgatatttttaaagcctttgatgaatgagggtgcctagtctatttaggcatttgttgttgatcctctcctaaatttataaatacatggcaaacctacatagactatcccataaaaaaaaaatatgtttatgtagttgattagttacaatatatatttataattaaatgagataaatataaatataatactttagtctaatggttaatattatattttacacatataatagagattaaggattcaattttcaccaaataagcctctttattttttaattttaggtatgcaattttaaaaaggttaattatgattttacctcttgaattttaatatgtacaaaatcatgccttttaaacatttcagctcgttaaaaccctaaactattgaaatcattagatttaaggacttctgtccaatttcattcaattttagtaatataatccatgtactaaattttgtcctctgaatgtactttgatatctaaaaaagca

SEQ ID NO: 86669 - DNA, 1201 bp, Cannabis sativa
  modified_base (56)..(63): a, c, t, g, unknown or other
aggaagcagccaaagtgacgtaatcgtgtataagagccattatttcgtgggtgtannnnnnnnatggaggcttgaagcgggacgttacacaccctcatgcgttgaagtgtcactatatagatttagagttactcaatgtgggtcactaaaacctgtttttctagtagtggatcaacaacaaatgcctaaatagactaggcatcctcattcatcaaaggctttaaaaatatcatatttctatttcaactagattttatttaaatactaagcctatagatcgttagctttataaaaaaaaaattatttatcaactcatactttaataaaacaattaaactaataagtttaaccacattattagcaaaataattttcaaaaccatgtaagcagcacatttgcatatataattattttatatataaatatatttttttatatagtgtaaaaagtaatatttttatatattttttaattagatcactaaattaagctataaaatcaaaattttcttttattatattgtcataattggattaaaatataatagtttaatatttttaagtaaattaatagtattagtagtagctaggtaattaatattgaaaagtaatttatatataattatttagatatatattgtccaagtaaatataatttataataagttgctaaaacaattatatatatattctactcagccttaataacgaaattattttgaatttttgtagcaaacagataaacagtccctgaaattattggtacggtactactggatatggattcatgggcaagtaagtaagtatatatagttgcttttaagctttatttataaattatattattcttttctattgtccccttagagggagatatatcgcatattaattatatcctattatttgtttaaaatgatttttttattttatttttatatctgaataaagatttttatttttaatttttttaaaaaggaagttgcgtagaatccaccatatactactgtacattaaataataatttttcttactaaaaatagtaaaaagaataatgctttaaacaatgatggactatgaagtatttgaagaaaaaaatacaaactcataaaaatatattattacatctattataattattactgattacttatatataattaatatttcagttatatttgcacgtatttctgtctcaataattt

SEQ ID NO: 86670 - DNA, 1796 bp, Cannabis sativa
  modified_base (1223)..(1227): a, c, t, g, unknown or other
atacttagtttcctgtttcttttctatttattttgagtaacatatgtcatgtattttttctataaatagtgaagtcatttcattatttgaggattcgaaattttactctttagagagctctattgctgttaaaatatttgtaagctttcatgagattgttaagaaattcacctggctagctcattgtgatcttagaaatactctagtaatataacaaaaataggagttagccattaccactatcacaggttgaacgtttataaaaaaaatttgtgttcttattgcttaattattatttgttcataatcacattaataaaagattaagcgtcagttgctaaaagtgatgtcaacacattatttttttttagaataattagcaaccttttcccctgaactttcgacattactgattttgccccctaaaatatacggtttgttaagaattcctcctgaacttttacattcatagaaatttagtccttctgttaggttctgtcctatcattctgtttaaatgccggtgtgtatttgtaaattagcaactttaccctctaaactttgacaatattatcaaatcgtactcccttaaaataaaaatgagaaaggttaaccatttttttcgtaaatcttaaaaaattaatttagatcttaaaaaaaattatttttaatgattaaaaaaattaaaaatgaaatcaaattttaaaactaactaagcgacaataaattatttattttttattaaaaaattcatttagatattaaaaaagatataataaaaattcaatttttataaacactaaattttacgggaacaaacttgaatctattttgtttttctctaaaaaaatatagatttgtttaagtaaacataacatttttttagtttaatttctatcttttttttttcaaaataattgtatattttattaaatttttaattatttttctttatttgttaagatatgagtttataaatataaaataagtttgattttttcttcaaaaatcttagtttatttaaattatttattagattctcaataattttagtttgattttttaagatacgtatttataaataaaataaagtttgaattttttttaaggaataatttaagtttttttaagtaaaattaatattttgtaataaatttaatatttttatcatgttttttaatattttttattatttttttttcaaaattaatagaatattataatnnnnnaaattaattttttttaataaaaagcgataaaattttgtattggtcaaagatgaagggtaaaaataataatttttaacggtaaaagaaacggaacctaacagaagaaatataattatgtaactgttatattttaggaagaaattttaacaagctaaatattatagaagacaaaatcagatagtgccgaaagttcaatgaaaaaaatacaaattcttttttttatctagtgatgtatttagaaataatattaaatatatacccacttttttttcactacataaaaactattaattatatatattaattaaaagaattacgttgtattgatttatgaatatagtattaaaaaacattaagaatttatttattttgtagttttttttttttttttgagaaaaaagatttgtttatttattttttagttaaattattgaaagttctattaatattgtattataaaaatagtaatgatcaataactaacgttttatgatattgttcttgattattttttattttttacttctgtaaaagatctatttattatttagcaattttctattgttaatt

SEQ ID NO: 86671 - DNA, 1059 bp, Cannabis sativa
gaacgtgcttcagaggaacaatcttccaactgaagcacacgacttggagagaaataagaatctctggctaagcagtgagacaacttgtttgcagatcgtttgacaaaatgtaattcaacatgttgtctaaagataaaaataatgcacgaacatcatgcactaaaagaccaaaaaaagatgacatagatttcacattgaatagcttgtatgcataccaaactgtctgattctaaaattacttgtccccaattgtgacgatcaatccaacttaacgcttccttgatgccaaccatctcagcaacttcaatttgaaccctcgaaacaatcgaaacaatcgaaacaagaagccatcccaaaaacaatcgaaacaagaaactaaaaccaacagaccgaacccaatctcaaaccagaaaacttagactctcaaaccataaaaccataaacaatctcaaaccaaaaaaacttcgactctcaagccagaaaacttagacactcaagccagaaaacaatggcaaaaccagaacaaactcaaaccaataacaagaaccgataaacaagaaccaatctcaaacaatcacaccatgtcacaaaagacaagaaccgacggtggccgtcgttgatcggcgtcgctggtcgacgtgaactgaacggcagacgactcaccgacgacgctcctggaggctgtctttatcgcacacaactctgaaggtaatcgcacacgtccctggaagcttctcgtcgactctgtagggtttctctctcctcctgttttcacgctcctcggtgtaaacactttttcatagtaatatttgttatatttacaatatgtaaatttttggtaaaatttgaataatttaaagtattaaaatcaaagttttcttttttttttttaaagaaaacggagaaattccataagaaggcaccaagcctaaaaagattcgagatataaaagatatgcaaaattagacaattaaattcataggtaggttcggccaccaaacatgagcctcatctaaatctagagctctttttgctaaaaaaatgagtaacaaagttttt

SEQ ID NO: 86672 - DNA, 682 bp, Cannabis sativa
tttttttttttttttacaaaattctacatagaaactcatattgcaactagcagtgcaatgtaaattgcaacaaaaatcgtacagaaactcctattgcaactagcgctgcaaccactttagaaacctaaatcgtaaatttgaaaaaaagttaaaaaaaaaatagtatatgggataaatgtggctatgtataccgaaagtgttatttttttaaaaaatatatatatattttaatttaaatttaaacatgttgcacatagctaaaaatatatttctattattaatttttaaaacttataataaatacatataagaaaactcatgtaatattattgatttgtaacattattattttttagtgttttttttaatattattattttcaaaatttctttctactcagtctcacgatatgcaactaaaattataattatattggaattatatgttcacttttaatattctcaaacattatttgttttcctcaaattttaaaactttaaacattatttttaaaaaaaataatttaaaaagtttgtaaatagattgattgaaatgcactactaattattttatgttagtggaagtaggagtttattgggattttatgccctaaataaaatctatttcaatacaatcttatttgttatcaatagaagattagaaattatttatgtttacatgt

SEQ ID NO: 86673 - DNA, 883 bp, Cannabis sativa
aaatgagttttatttacggcacaaaacccaacacttgaatcgtactcctctttgcaatgttgctcccactatgtggaataaaatttggaattctgaagtcttggagtgtcagaaggtcttttggtggagcattctctcaaatgccctgtctatcagttcccttttggctagaagattgcacattgagaaagtttcctatcctatttatggagagggagagcaaacgatagaacatattttcctttattgcaacttttctttttatctttggagggcatcctatttatgctagttatggactcttgggcccgtgtttaggattgggttaaattactatagagtctaaagactagaggtgttgatgtacaagagttgttcctttatgcttcgattgtggtggatataatcttgatagcccttaacgacaaggtatgcaataattctatgtgtaatattaaacaatgtattgactctatttatattgttatgcagattatagttcttgtctatttacttcactgaagacagttgagtctcctgtttggtccccaagaagattaggtcaaaatcaactgtgatgttaaagtctgttgcggttcaatgtgcctggtggctttggctagggatcacacggggtcggtcttgtgggtggataccaaaatgcttaacttcttcgaccctctaattggagaagttgtaacctgcttggaatcaacagtctctttgaagcatacttttgtgttgattgagagtgactctgagacagttatcaatgcgctaaaggacacttcttccagtgggtgtattggtaactatgggattcaatgtaaatatctctgtaatcttttgttaagttgtaattttttatttattttaagatagt

SEQ ID NO: 86674 - DNA, 610 bp, Cannabis sativa
ggttactagaagaggactttcaaagatccataatgtgttggtcccagttaggctcctaaagtcaaaaaggaagcgcttgggtttaggggacaaagagaggttgggattgggggtgagatggacttttatgtaactatgatcagagccaaaaaaaaaaaaaacccatatgagtaagagtggcatttgggaatggcccttccaatcactattagtgatacaccaattaaggcgctcttggatgttattatggttagtgtggttgttatttaagtgtaactgggaccctcaaactctaacagatcgagattaaaactgttaatgaatttaagattactttttatgttaattttgctgctttaagaaatttctattctgaaattacttctctttaaatattaaacaatgtgatgtgttgatatatttgagggaaaatgaaaattattcaaaggttgtaagttggaacaaatctatatgatctcccacattaatgatccaaataaagctaatttttagaattggtcgaagttagttaggatgagctgtcaattctgttatgttagttgatgtttgtatctgtttgtcttgtgtatataaaagggcctcaattgta

SEQ ID NO: 86675 - DNA, 717 bp, Cannabis sativa
  modified_base (538)..(541): a, c, t, g, unknown or other
ttaaattttaaatgcagttatattgtattcatttcaaataaaatatatacacatattttaaataaaaataattattgaaactcaaaatagtaaataaaatatatttagaacaataaatattattttataaataaattttaaaaaaactctaaatgaaaaaaaattaaaacatttgctgtaacttagttttagttaaattttgagtttttttgcggttaaaccctctcaactattatttcacttgcacttaatcctctaagctcaaattttgacggtaaaacccttcaaactactgaactgtttgcaaatttaaggtgtcatatattttccacagttaattgccaacataaactgcttatgtatacactcttatacatgtggcacatttatatgggtacacataatattattatttaaaaattataaaaattattgtaaatattatacttcttttttatttttttttaatattttattttttatttttataattttattcaactttaaaataaattttgaaaataatttttaaataatnnnnttaagtgtactaatataaacgtgtcacgtgtacaaaaatatacacataagcagtttttggtggcagttaacgatgacacctttaatttgcaactagtgtaatagttaaaagggtttaaccaccaaaaactcaacttaattatgttacactattatgtttggattcattaaatatat

SEQ ID NO: 86676 - DNA, 986 bp, Cannabis sativa
tttttccttccctataacattacatggatagaagaattgaatttttctttcttttgttctcagataacacaatacttgacatcaattcaaacctcaattttgtcgtgatttgattactaatagtttcagttatagtagtgcaagaattatcttccataatttccaattggtcaaatgcctctccttttctaatttaatagattctagacttttgtatttattttctttatgtagttctaccaccatcgaaaattatttcgactgagttcttacagattgaagcatctgatggccaagctattacttttggatgagatgtttcaaaagaagctgatgttgaatccaatgatcaaaagtacagtgagaaaatgttcttcttcatattgttttttcacgttgtatgttaaacggtggaatggtttgtaatatttctatctcaatctgcaggcagttgatgcttgaggaactattgatgtattagtaaataatgcaggttgtttgaaatttttcttttcttatgttgttttcattccacattcgatctcttgatgctttttcggtgtttttcaggaatcactagggactacttaatgatgagaataaagaaatcccagtggcaggatgtcattgatttgaatcttactggtgtatttctatatacactgtttaatctctttattcacagtcaaaactatctttatattgaatatttcgacatataattttaatatccaaatgagcaccctctttggggcccatgtcatggaaaaaggacgatctgtagagaaacccaaagagggctactgtcattgtctgtggatatgaatggtttcagatttttaaccatctcagttgcatctcgtcccatatgttgttttcttataaagagtttcctctcaagttcattgtctgtgttttactttttcttatctttcatacaaatccccatgatagtaagagttgaatggcatgggtattaataaatt

SEQ ID NO: 86677 - DNA, 816 bp, Cannabis sativa
tgatgctgtcaaatgtactaaaaaaatgaagacgaagatcagtaccggtccacaactgaaagagaaaataaacgatcctgttggagttagtttagacgatctcaccaaaatatctaatgcaatgcagaaaatgcacgattcaaccaaatgttattttgaaaaggttgtggagatcgtgaataaagaagaaaacgacaacagtactgcagagattttcaaggacggcaaggacgatgacgaaccagtgaaggacaatggcgaaccagtgaatgtcaaaccggaaggaaaatgaagtatcattaagcatattttttcaaatttaaataagtagtgttaatatcttaaatatttattaattagtaagggactcttaagttcatcatataatgtatgtattaaatgtgttttaattttttgaactcatgcatgtattaaacatgaaatattttgaaaaaatgcatgtatttaacgtatgaaatattttgaggatttaattaattaatgttaatttagttttcagtaactttgacatattttaatttttttaagtataaatatgtcttaataattgataatccctttcactcatacaaaatactttttatgatggttattcctatatttctgttaaaacattatgtttcatggtgtattaaaccaatattattgtgacacataattaatttgagcatttgaagggaaaaaagaaaactgtatagatggttaattttttaataaataaaaaattcgttcatgtgtcaaacttaaattggtttaacataatatgacacaactttttaaccggagatcttgatt

SEQ ID NO: 86678 - DNA, 541 bp, Cannabis sativa
actcaattgctcaatcaacacatttaatcagagagaaaaagaaccttaaagctataaaaaccagtatcacagccccttcattctgcagtatgttgctacatatcccattgtctagcaatcagctttccctcatggatactccaaccctgagctataattccagcaaattaacttctatcccatggaatgtacaaggcgactatggcaatttataatgcataatccaaaaaaccttcacaaataccagctcgaataggttctccaaaatttatcaatttatttcttcacatttggcatgaaactttactcgcattgaaatatcaccacactgctatcctatgctccatcgagatgtttgattgcatccaaggttcttccttgtacttttttaacctgacacgaatcagaatattttagaaaaaaatgcaatcatcacatgtgatgcagtgtatcagtaaactgatacctgtaccagtgtacctgtgcctctaattcatcaattctatgtagagatgcatgttcaatgcaagcacggcgttca

SEQ ID NO: 86679 - DNA, 759 bp, Cannabis sativa
tctcgccatttagatgggggaatgtcatcaagagtaaaagtttgaaacttagaatatttactcttttgatgatgcttggattctgttttcgttgtagctgcttcttcttcgtcttcttcactttcatcctcacttttgacaataggctcggtttgagagtatgcttcttctgcagattgagccataaaataagggggtacgtcatcttcagaaatatccaagtctttagacttgtcactaatatctgaatcttgagactcgttactagtatctgaatcttgggaccaagtttcaaaattctcttcttggtcagaggaagaagactgattatcaaattcttcatctggttggtggatcatggcagaaataggattatgcatagttcgttgggccatgaattgctttggctctttttcagatcaagaggatgctcttggaggagaattatctaggctttcctttttcttcccctttttggttttttattgttgttgattttcgtcaagcattcgtctaagtcggagaagtgagtcttcttgtgaagagactgagaaaggtgatgtcggagaagtctttggcatggttgagcactgccatggtactgatggtgtatttgctccaaagagggttaaattttctccaaagagtgttgattcagaccctgttgaatatgattctcgttgaaaaaattgcttttttagagattcatactgagttttgatggctttcatttcagcttctttagccaagaataatgac

SEQ ID NO: 86680 - DNA, 529 bp, Cannabis sativa
tttctttcctctcatttttcctccctaccaaacaaaggattaaagcaaagaaggattcagcctgtgttgttaccttgttttttaatgtcttaccagcgcctttgatcaataagagattcacaacatctgttcttcgtgcttgaacagcgagatgtaacggtgtccatccatcctagtgagttctcaaacacgaatgaaatcaaaatttaacttaataaatcgtttgaataagcacaaaaagttgagcaatagcaagaagtatgaagcttacattgtcctgagtgtttatatcgacattatacaagaggagaatttttattgcttgactcgaagttgttcagacagcataatgcatcaatgtcgctccatcctgttttacacaaaccataaccgaagtaaataaataaaagaaaacatgaaaatgggcactatatatgaaaactcaagaaacgaaaatagtgtacaatagcttctctagttgatagtggccacgaaaccttcaccctttcttccaaaaaagataaagaac

SEQ ID NO: 86681 - DNA, 556 bp, Cannabis sativa
ttaggaaaaattcaaaccgcgaccgcaccgcaaaaaatttcaaaccgcattttttttttgttgcggtgtggtgcagtgcgagcagtttgagcgattttggcagtttgataaacacctctatttaacggtgttttttagtttctacgttaactttaacaaaatatcttattacttaatacattattctttaacaaaattttattctttattcttcatttttttttttttttgaaaattgaatttataaagtaataattgtaatttttttttttaaaaataaaagacaccctggacctgtttacaaggtgtagattgagtaatttgttttcttctgctaaatactcattgcttcttcaagagtgtaatgttaaatgtatacgagggaactttaatataagagaaaagtgttaatgttaatgttaaatgtatatgaggggaaaaggagcacaagatttgttgattcagatccacccttgaccctccttgatgtaagtagctctatatgtatttctctgtcaatcaatttatattctttctttcagtttttttttttttt

SEQ ID NO: 86682 - DNA, 840 bp, Cannabis sativa
tatcgtgcaatagagtttcgataactaagttgttttatcatgagggacgatgtgattgatagcctgcttgcccagttctaaacagtgccgcaaaaatcttaaagaacgacctaattcgcaactcaacctaaattttaattctaaaaattcatcctattttcaacacatattatatatatatataattaatataatttttggtgaaatatgggtgggtgtttacatatatatatatatagaaccgtgactagaaatgggtcaacagtcaatatgtttttaaaatttttgtttgaataaaacagtcaagaccttgaatttgccatacgaatgtttaaagcctttcctctttccttttatatataaaatatatgtatataaagagaagtgatatttgtgtatacaaattataaaataggtatatatatatataattaatgctaatggtaattaaagaataattacagtactatttgtgtacaaattttgtgtctatcattgaaacttaattagcacctagctatgattataataataatttttgtaacaagaaataatctcatcgttgcaataattttacaataattaatcttaattaatatcgaggctacctatagcttggtctaaagaaaggcacagattcaataaaaacatgtggcctttatgtatttatatcatatacgatgaaaagaaagttaaaaacaaaaaatgaaaagccactaaaaccagtatggtcggtacccatgaaaacaaaactaaagcgtaataaatagaaaaaacttataataattaattataactctctattttcaaatcatcatattcataaagatgaaaaaggca

SEQ ID NO: 86683 - DNA, 1001 bp, Cannabis sativa
  modified_base (32)..(33): a, c, t, g, unknown or other
tgattaacccataatataaatataaactctanntatttaccattaggcttatcgggatattacaaccatcccctccttatataaattttgtccttgaaattaatttaaacaattcgggatattacctatacatttatgattctaactctcaaattactgtttctatcttgctgtttttctacaacactttcttaactagtggaattgtctcattacatagtacttcctttttctagtccaaaacatggatcagatgtttttccatgtaataaatttatgtaagcttaacatcgtcacagctcagaatatgggttgagtctgatacatattttctcaacatggatatatgaaacacattatatattccaaacaatgcagtagtcaaggctagctaataggctacttggcctacttactccagtgtaaaaaagcctaatgaatttaaggtttaacttccctctctacgtatctctttcatagggaatacttggaggaaaaagcaaaacctcctatttagaattcgataatcctacggtttaaatcatcataacttttctatgtattcaatgaagcaagcatacaacttgaattcactctatgattttataagttcaatggatctttttggtccattgatattcttttctcacttgtattactccagtgaataagtgtctagtatttctctcgttccacacttattaaagtacctaaccgatggtacatttaattatcatctttagaaaagtactccttaacttttatcaattatgttcacaacctgtttctaatattccatttatcctcctagaatacccatctttcaagaatgtaacatcatactatttttgctttaatctccataattctcaataactttctttaactcttaacatcgtcatagccaaagatattgtaaagtcctttttttggcaagttagatgccaaaatattttttcttttatggtaagatttaattgcattcataaccgatttcttac

SEQ ID NO: 86684 - DNA, 1022 bp, Cannabis sativa
gagagagagagagagagacggacagagaagagggctttggcttaggtaaaggttggatttttatttttggaagaaagcttaggttggattttcggttcaggggttttctaatatatatatgaggggtgtgaggtgttgactttgaccttcaacaaaccaccattttaggcaaaattttctcatcttcttcttttcaccttaatatagtattacgaagcttccttccattcttctcttcttcaaatatacagaacaactatttttcttttaaagggaactaattaaaattattttcaatagcattttttttaatagaatgaaattttcattaggcatttgccatattacgaagcttcctatcattttttactttcgagttttagtaattgggtaaatattataaagtatttttacaatgtatttctttaaaataaatattttcatgtactcatatttattttggcattcaaaaattttgtttgctcttatttttattatatgttatagttgtttaagacattctgcaaaaaattaagaaagtcagaataatttataatataaaaagtaatgtttaagcattctatttcacacgcgtataaaataaaagagtcacacgtgtaactaatagtttaaatcgtattttagtgtgttaaaattttctaaacttctcaaaattttgtagggagacttaaataactataatgtacacgactataaaaagaattagactgtaaaagtctatcagatgttgaaacaaaataaaagtacatcgatgcatcacttttagatagcgaattgtaaaattttcaaataatgtaaggtaaataccattttagactctgtgttttgcaaaagttacccattagaccctctgttttgaaaagttgtgaactagctctatcattttggatttcataagctcttcaagaaagtagagaaaatattatcaaaaattagcttaaaggtctcaatccatcataaaattgtctttaaagcaaaaatctacacacttagagaaaaca

SEQ ID NO: 86685 - DNA, 699 bp, Cannabis sativa
tatttttatggaatatacggtgaatttacagagcaactaacgcagcaatctaaatcgtaatccaattcaaacaacaatccatattgcaacacatgcaataatttaaattacaactaacggagcaatctaaataaaaaaaaaataaaaaatcaaaagtagtatataagacaatctctcttatttttatcatctttaagggcaaggaacaaaagttaaacataggaattttttttctcatgaaatgaatattcagccccttttaccaattcatgaataagtagtacacatacattatttgacatataaagtgattttgtattgtgttttttttaagccgaccttttaattgtgtgttattaatttgatgcacaatagatataaattcaatgaatatattgttttgtcacaaattttacatcctgataaatatcatatcatgtaaatataatataaacatttattaaagttaattaaatataaaatgtctctcataatatatacacatgtatctatgtatcttctgacttctatataaatatataaaccctaggacgaattcatgtctaatcgaaagttttcactttattcacataagactttcctaattagctacaacttttatattaatttaatgatagtcctagtcaaatcaaacaattacaatttctctaatataaaaagatacacattaattcaatt

SEQ ID NO: 86686 - DNA, 854 bp, Cannabis sativa
ctctcgtcaccactggtcagtgcaacaaaaaaaaaaaaacccaaataatcttattccactatatatttatataatacccaaaaacgaaaaaaatctcaactttagaaggaaaatgcagcctcccaaactggaacagacggatcaaatatatctgccggaggcccaaatcgcaaagccgcagacccgtttgacataggcggtggtcaggtaaatcccattagagctatggacccaggactcatatacgacatctctacagaggactacgtcgaatacctctgctccttggggtacagagcctcaacgatcatcactcgtttaacagagatcgaaatcacttgtggtagtcaaaaacgacaagctgggttgaacctcaacctcccttccataacgattccgaacctgaaatcgacgacgccggtgacagtaagaaggacagtgacgaatgttggtgaggtggattcggtgtacgaggcagttgtggaagctccgggtggagtagttatgagagttgaacctcaggtgttgaggtttgatacgataacagaaacggtgtcgtttgaggtgactttcttgtcggggcaaagggtgcatggtgattataagtttgggagccttacatgggttgaagttgatggtaatcatcgggtaaggagccctgtcgccgtgcgtgtcctcagatttgattcctatgcagatgtatgataaattaagatgatacaaaattattgtataatcattttctcctaattattgcaatttaatactattttctcattaaataatatcaattttgatgagcattacgagtattagtagtttcttagtttctttcattataaatataggtggtg

SEQ ID NO: 86687 - DNA, 541 bp, Cannabis sativa
atatatatatatatataggtaaaggattctgttccgcttgtactgcctgcggaagaagtgacgcactgtcacacatattttttttttctttttactgctatatattctgaatcatttctatctcattaatacaactttagccaatttatttactttttttatttgtattttttgttatgatattggacaatttagtaattttatactataaatgttgtttttttattgtgtaatgtagttttgtccctttttaatattatggtgtcatacaatacacaataactatcttaaaacacacaatacttcttaaaagattcacattattttgttggtttttataaaaattaatttttttttttggagtgcagttaaggtacttttttctttagtaaatgcagatacatgaaaaaaaaaaaaaagaataattacagtatgttaatgaattaatctttaggggtaaatagcagtataagtacccaaagttttatgtttgttagcggcataaacccaatgtttatttttagcggcataattacccaat

SEQ ID NO: 86688 - DNA, 514 bp, Cannabis sativa
agggtaaatactattttgaatcttctgtttttcaaaagttatcgattaaatcatctgttttgttaaataataaattaaaccctgtatttttcaaaatggtacaaaatagtatcctaaactgattttgtcaaaataaaagtaaataataactcgagctaaagttgttatgataaaattgtgtacattttctgcatcagtttgttctagaaattatctccaagttagttatattaaaaaagttattgcaaattgagctcagggtactagtattttgtactattttagaaaatatatggtctaatttgtcattttacaagatagagaatttaatctgtaacttttataaaatacagagtccaaaataatatcaatcctattttatatggggactaaataatttaagatctcgaagagtatattggcctccctaaacatctaatcctggcctagacatctaataatacaaatatgtgttattagtgttagtggaactcaaaagccgtgtttgaataca

SEQ ID NO: 86689 - DNA, 788 bp, Cannabis sativa
  modified_base (47)..(57): a, c, t, g, unknown or other
  modified_base (166)..(200): a, c, t, g, unknown or other
aatagaaaattattttaagttaataattttaatttcagaacaacttnnnnnnnnnnnattttcaaaatatatttattttactttattaatcatttttttaataaaatttgaaattgcatttttttactgcagaaattttttatttttttttttaaaaatagattannnnnnnnnnnnnnnnnnnnnnnnnnnnnnnnnnnaacttaaatcaataaatttttcattattgattaattaaaataaatgggctaaaatatattataattagaaaataaagtaattagttagtgaaagtctagatagttattttttgtttgcttaaagtttttttctagttatatttatttaaattgaaaaattaatatttaagttgattttaattatgatacttaaatctgcatactcaacgagtctatcttattcaagatatttttgagtatttgatacaatattacaattagtggtatttttctctcaaagattttttgtctctttttctgtagaatctgcccctatttatatgaatataggttgacagttatttacatttaaaatttgaaatgcatatccgtctaatgaaacgtgggaatgatcacgtttcattttaacacgtgtggataataatagaagaccacacaactgcttatcattcttatctttaaggcgattgatgaggacttggacagtggtatctcgcttcgcatacagatgaccaataatgacttggtttaatcatatgccttctagcaatggcatgggctcttgtttactgagcaaacttcagaact

SEQ ID NO: 86690 - DNA, 983 bp, Cannabis sativa
  modified_base (32)..(33): a, c, t, g, unknown or other
  modified_base (916)..(918): a, c, t, g, unknown or other
tgatctttagtaattagtaaatctgattatanngaaatgggttttatttagggcactgttatcccaattttcgcactctaatgtggcatcacactatggtgacatctgctcgtgagaaatatgccgaacagggcacaacatacattcgctcggacgaagtcctctccacacgggcagcgagcaatctgcatagcatgccaacacttagcaaatttcgctttcgcatcgtgagtcatcgaagaaatccctataactttgggatcagatcatagagatatggcaagttgtctgaataccttgatcagggtattttgtattaaatatgcaatctttccgcttatatcaattgtaatcagaagggaaatacttccctcccaagcttaaagccatataaatagtgattcatactcattgggcaaatggtcgaaaaacttgtctaagaatttagattcagagatattattgtaagagctctaagaaaaggaaccattttccttgttcttaaaacaatacaaactacgaggattaggctattaccaaactgctcggggctgaacctctataaaaatcccgtgcctttatttgctttattatattacactcatattaaactatttgtcgttaagaaattagactcattgtcgttggataaaagtgaggtcaacattttggtgctttcattgagagttgaactcaaggatcgctctttatctcaaatctcatcgcaaatacaatggtggtacagactcgcagaggcgtggttgatccggcgaatccacaaacagtgaatcctgcattgtagaacccagggaacacaagggttccaccagccacgaatcctggacaaccatcaactgtaggtcgctgtgtgacgactcctgtgattgaaatcacgcctggtgtgcaagagactggnnntaccagttcagcagccaaccagggcattcctaacacagccattccgcccgctaccaatgttcaaa

SEQ ID NO: 86691 - DNA, 944 bp, Cannabis sativa
  modified_base (452)..(460): a, c, t, g, unknown or other
tctctctctctctctctcattttagcttgatgtgactaaaagtcatatttaattacaaaaaatttatgttgtgactagaaagttgtcactaaaagtaggctcttttgtagtagcatgtgataactacatcacttctgaggttgttaagagaatttttatttttgtggtttttaaggtataagttttcaaaaatatgattttttttttcaaattattttatgggaaaattttagaaaaaattaaaaaatatatatatagggaaaatagtataagctaaatggttaccccctttggtaattggttacccttttgaattttttccataaaataatttatttttgtcaaaagaaaaaccatatttttgtacacaatatgaaaacccatcaaatttgtaatttcttctattttatcaaagggataattatataaggtactattttttgtaaaaaaannnnnnnnntttacgtttaaagattttttttatatttttacggttttctatagaaacaacacgaaaataataagaaaactaataaaattaacataaaaataacatccaaataacatcaaagcaacgacaaaaaataacatacaaataacaaaaaaatcaataacaaattaacaagagtacaacataaaaaatcgtattttctgtaaataaaatcaaaaaattgtaaaaatatttaaaattctgtgaaattgtatttttgtaatttttttattgtttgtgtgtatttgtaaaataatccttagatatcaaatatcttgggcttgggtttaggcatgttcctaggtcctttagttaatagtttagaaaaatgttatttttttagggaaatttacacaatacttaaaaacgaacttttttttaacatatttcttttttatatttttacggagttttcttctttatttacatgttttatagattttttttttttttt

SEQ ID NO: 86692 - DNA, 787 bp, Cannabis sativa
gaaccaaagttctatttactcattccatatcccataatagctatacaattacatatttatagtgattcaccccctatgcaaattactaataaacccccacacttaaataataatcctttattggatccatccattttactgtgtaagataatgttagcaagtgtgaaatgctatgtatatgcccagtgtacaatgtatggagttcgttttctccattttttttggtgaatcgttttctccattttacttcaacaatgttattttctcattttatggatgaattaagaaaaatgctgagggtattactggtgtctcccaaactgtgaggtttcatattgttatattagtgttagaacttataagtattgagtctatgtatattttattttaaaaattattatgaaaaactgcttaacacccacataaccaccttgtaccaccactacatagaattgctatgaaataaaggaaaacaaggcataagaatattctaatttaatgctacataaatatccacttggtacacaatacaagaacatagaatttttgttctacatggctgttatagtgagaatttctcacctagaaactcaagaccaggctcccataaaaacgacacgtggacttactgtcctcgagcagggctgagatgtgagtgcaaacctctcctgaaccagactcaacaggatgatgtgaccttgacagtgtctagtcgcattcgagtagcttgcatggagcaggaccgaatatcgggttaagacttgcatataccaagatttatgtgagg

SEQ ID NO: 86693 - DNA, 968 bp, Cannabis sativa
  modified_base (63)..(74): a, c, t, g, unknown or other
  modified_base (255)..(256): a, c, t, g, unknown or other
agaagtagcgtctctctagttattggttttgccaaaactagaggcgtcgctagatgccttttnnnnnnnnnnnnggcctcttcacactcttttgtccactcgaagttcttgttgtctcgcaatacattgaagaatggcacacacttattagttgacttcgaaaacaatctgttaagtgtatccatccttcctgtcagggcttgtacttccctaggttttgtcgaggatggcatgtctattaatgccttgatgttnncgggattcgcttcgataccccttgcgttgactatgaatcccaaaaatttcttgaggagactccaaaggaacatttttttgggtttaacttcatgttatacttctttaatattttgaagcattgtacgaggtctgtggtatgatccccactttttctagattttaccaacatatcatcgacgtaaacctccatgttccgctcgatctagtttgtgaacatttcattcaatcactaatatgtttccccagcattcttcagcgcaaacggcatgacttcataataatagagtcccatgttggtcacaaagcttgtatgctgttgatctgggacatgcatttttatctagttatatccagaatatgcatccataaatgacaaaagctcgtgcccaacagttggatccactaactggtcgatcctgggtagtggaataaaatctttttggcacgccttattcagatcagaaaaatcaatacaagttctccaagtgccgttaggctttgggatgagaataggattagctatccacgagggataaaatacatcgcgtataaagtcattgactaataacttgtccacttcctgttttagtgccccttgtcactcgaaatccaacggtctccttttctgtctcttcgctgggtagtttggatcaatatttaaatgatggcagataatgttagggtcgatccctatcacatctccatggctc

SEQ ID NO: 86694 - DNA, 613 bp, Cannabis sativa
caatggttagtgcttcaaactgagcaatgggatcagcagacacccccttactgtgttcgataaagggagtgtcttctaaagagtgttcagatgtgcatcacccctcttcctgaactttttaaacaaaggggttcactgattcctgaacgagaattgtacgcatgtcacgaactcttgatcgagttacaggtcccgtgtaggaggtaggcttagtagttgaagtgacccttcttggtcggtatccctggaggaacatccagtcaccatgctctttccggaacgagttagggttttctttgggaacccttacactgtcacttctagccttctttgggaaggagaaaggcgtcctacacacctcatctcataaagggtgttcattgatctcagcagatgcccctgttggccttggcggttaacagggattacgattggaggcctaatcggcgtgcctcctactaatttcctcgattcaagagggtttagtgaaggtgaagcttttgtccccctcttggctttttttgccttcctacctctccgagtttgagaagtcggtgttgcctcagtttcctccggggaggtaaccatcactgaggcgacagtgggcaagaaa

SEQ ID NO: 86695 - DNA, 914 bp, Cannabis sativa
  modified_base (42)..(43): a, c, t, g, unknown or other
  modified_base (134)..(148): a, c, t, g, unknown or other
  modified_base (198)..(214): a, c, t, g, unknown or other
atgcagattagtccccaacctccaaaaatagcggcaatagtnntcaaggtcacactttttatttgtttgttagtcctaattttaactgagctgttttcttgctacgcgtcgaaatattattggtccaaattatnnnnnnnnnnnnnnnaaataaataaataattaaaaattaatttcttttttttttctttttccttnnnnnnnnnnnnnnnnntttctttcttttcttcttcatcttcttcgttttcttctccttcttctcactgccatcaccatcaacccccaaccttaaccccaaaccagcaccaccaccaacacgccgtcatctgcgaacggaaccgtcatctgtgattggagaactacagaaccgtcatctgcaaacagagaagactgtccaacacgtcgtcgccagcgaagaggaagaccgtcgccgtcgtctggggatgacagattcgctggatcgctagagcggctggctgaaccgtcgaccaaaccctagggaacctgaaacagtttctctttcacgtgtttccacgtgtttctcaagtaatattacagttagagtaccggatctaacaatttatgggttttgatttggggtttttgattgagggtttgttgatggaaaataaaatgggaaccttagatgttactgaagggggtggctgggaatgagtggtggtcagtcaattgaacgggggtgagggtgtggtcgaagatgaagacgacgaagatggtcaaagacgactggagatgggattttttagttttttttttatttaaattattttttggggttttgggattttttatttgtgcactggaaatttattaatgcattggaaattatttgaaggtggtggtggtgctggtttaggattaaggttgggggttgatggtgatggcagtgagaa

SEQ ID NO: 86696 - DNA, 549 bp, Cannabis sativa
  modified_base (506)..(521): a, c, t, g, unknown or other
gggtttcctgggtctttaaacccaatagccgcggctattttatgcagcatgttgtgttttttttcgagtttttgttttggtcataacttttaactcgggactccgtttgacatgttctttatatcattggaaagctctttccgagctcaatgtgaatatttggaattcaaatgccaattttataatttttggaaatgaatttaggggttaaccctatacttgtgcattccaaatttgtgactaggattagcggcacttgagttatcacttatagtggcactttcaatttttttaaatgctttttttaatattatttttttatttaaaattaataataataaagatgaaaatatgtataaagttttgatttgattgattgatgttgcatcatcatcttcttcttcttcttcttcttcgtggttttttttttaaaaaaaaaaaatccatacacttattatccttttttttcactatcttctaccttaagctctctctctctctctctnnnnnnnnnnnnnnnnctctctctctctatatatattttttttt

SEQ ID NO: 86697 - DNA, 501 bp, Cannabis sativa
tatttgctgaagcttattagctttaggttgttgaacttggtcctagttgggcctaatatgaatcataaagtttgaagcccaatgtgaaataaaaatgaggacctggggtcttgaaagatgatagagatagggaatggttgccaattattgaagagagaaaaagttgggcttgagccaattttattggatttgtcaccttctttcaattttactaatttgtgcaccaaattaaaaaataaacacaaaattggattaagttaaataatatttacactgaaactcataaaaacaaaaaagttaattccataatatgcgactagaccttgtcttggtcgcatcctcccacaagtttgaatcatgcgaggctagctctacgagagctctataattgacacgtcatcattttccatcgaaaattgggtccatgtgtcaatttcttacgagactataactcctattttaaggagaaaattgcactataataaggcctaattcgagaaa

SEQ ID NO: 86698 - DNA, 589 bp, Cannabis sativa
aaaactaatggataacttaaatagcaaaaagactaaacttaccctttcgtcattcttaagtactaacttcttacactagggataaaatggtcataaccaaatactccaaaataccatgataaaactaataccaactagaacttctcggcactacaaacacccaaactaatactgccatgacttttctagccattaaattgagtttctattgttgtcggacttgaaaaatattttatttcacaaataacatatattttacccacatagcctaataaaaattttcgaaattaataaattacgcctaattttctcattttataaaataagtctattttctcatattaacttagtaagattataatcttactcaatttattctcttaatactcatgttaattcatatttcaaaaaaatatactaattataatttattattggaatattatattcggggtgtaagccagaagccctaagagatcatcactgaataactaacaattgacatatataaccgagatatacatatctaactgagatataaaaaatagttaaaatctgaataaaaaaaaaaaaaagagaatctccaaaa

SEQ ID NO: 86699 - DNA, 997 bp, Cannabis sativa
tccaactctcaaccaaagtcttcctcgacctggacacctcctccccacggcatgctgctaatcaacacagatgcgtctctggtgcagggacaagaaggatgtgggatcagtgcagccattcgaaacgatagatgtgctttgattgttgcggaaaccagatatataccaggttgtatggctgttaacttggccgaggctgctgccattcatttgggaattcggctagccattagctggtctatctcaaatgcttggatagcttcggacatcaagaccatcatttctgctattgtaaatggtgcttcttctccaactgattgggggcagttggtgcagacaatcattcaattgaagacccattttcagtcgcttaattttttattttacacaagaaattgtaataaagttgctaatagtttagctaagtggagtcgtgtgattcaaaagtctgaagtttggactgatagtttaccttcttgtgttgctgcttgtttaataacagatgtgcctagtgctgcttagtaataaaaattccctttcaaaaaaaaaaaaagaatgttaaaggcggtactaaattccataaatggtcatatactcttattattgtaaccaaatataaaaaatccagaataagttataaagaaatcgtaaggaaaaacatatacaaaacgactgtgaaaaaaaaaatattatgaagaaaaatataaaaaaattgggttttttttttattttttcactttagaaataattttttttatattttgacgaaatttcatatagaaacatttataacaattaacagagcaatttaaattgtaactaaaatctgtataccaatctaaataaaaactatcgaaaaactactaaaaaaaaatataaaaaatagtatatagagtaattctaataaaaaaaatacaactcaattataaagaaaaaacttagtgaaaaaaaaaatatagtaaaaaaatatgaaacgaaaattcataaaaagactaca

SEQ ID NO: 86700 - DNA, 870 bp, Cannabis sativa
  modified_base (754)..(755): a, c, t, g, unknown or other
ttttatataatttacatatatactcaaaattaccgtataacttttacatatatattgtatcttgtttcaaaattttgttttacactgttatatatgacatttgtcgtgtaagtaataatatttttcaattttttatttttaatgtatcacggtataataaatttttttatattgtctttatataactaatttttttttatattgtatgatcgacttttgtcacttttatcaatttttttctcaatattatcactcactttaccactatttatccctcccatcatttcattcttctcctatttttttatcatttccttcatctttaaagttttcatctatataatattatttaatgttttatattgtttaaaaaattttaatttgacagaggatgtcactttaatcttatttttattattaaaattaataataaaaatgaaattgatgggttgttatgtttgtgacagaatttttagaagaaaaaagaaaaagattaatattaaacataaatttttatatataaaataatatattattaaaaaagatagacatttaaataaaaaaaaatacaataataatacatatttatatataaagacaaccggaaaaaaaaaagatgttaatctagaaacccataaaatccattaattaataaaatgaaaaaaaaaaatagaagttttcacttcatatgctgatgtttttattaaaaaattttgagtaatccaattcactttgtcaaaataataataataannataataataataataataagacaatgtaatataacaattaaaattgataaaaaaaaatgacttgataaaaaatactcttaaaatgtattgatgaataataaaaaaagaaaatttc

SEQ ID NO: 86701 - DNA, 1632 bp, Cannabis sativa
cataaaacccaacagctcaatcacttgggggcaactatacccgtacaaagcgttggtataagtagataacaagctaaaaaaaaaaacaaacacagttgcacagatgattatcaaaacaagggacagtattcattgaaaaagataacaaagcatgataaacctgggattaaaagctacccagtcagccagttgtcttaagatgaaaaaatgtaacctaagtttaaaaaccgcttgtttggtcattttagtctctaaaaaaggcctatgggccgaacagatacaaaaaaaaaagaaaaaaaaatgtttagacggcaggggtcccaggctctttgtacggatcagttttgtctgtgggggtcggaggttcaacattctgagcagcaggagtttcattgctctggttggttgaaactgtagaagtggttgcctcagggttctctttggccgtctcacctgcacagtaatcaagatacatccctttggaatcaccaaggtaatcaaaatttcctgtggggttagccttccaaaattcatagaagacctcgagggcggctgtttccaggctctctacctccttctcgagctcttcctccatggtttgcttaacctggacatctaactctaactttgagagaagagtgcagagactctccctctcgtctttgagagcattgacatccttgctcagagcctcgttatctacctcaagctgggcggtagagggcatttcttacatttcctttgtcagctcctcgacccaatttttaggagcaaggagttttttgttcacatccccgagctccttcctcatatcttgaacttccttattagttgcatccacctccttatgtagtgtgttggtggtggaaaggttcttggcaacactggatttggctcgggaataggcgtaagccatctacagattgacctgcatggagaagtgttaaatccaagctacaaaaaagagaataaaataaagaaggaaatatttacccaagtagcttccttcaggactcctcccaagactagttccagagacagctcattgtccacccaagatagttgatcgctcacttcaggaagtgatcgattcatgtaatattggagcatgtccttgcccctctttgcctctgtgctcagcgtcacagtcaatgaaggggtcctagtctgatcagacttgtccgagctccccctttcaaactctttaactttgagaccttctagagtagagggtccacggcaggccattcctcagaaaggtcaatgatctcttcgaccggccccttatctttggacgaatcctcactgcccctagatcttttgggcagaggagtctgacccgagttgtcccccactctcttcttcaaggcttggagtaccttctgagacatttttgtacgaacaaaatgacgcagttagaagcaaatataatgtatgtaaaagtatagtataaaagaaggaagtgcaagttaaaaataccctacacgcgggcaggagcaatttctcaaacaagtatagacggaacatcatcatctaaagagtcttcctcctgctccaccaagacggccttcccttttcccttcacagtgggggatggccgaacaggcatatcaggttccttaatcctgatag

SEQ ID NO: 86702 - DNA, 900 bp, Cannabis sativa
  modified_base (383)..(388): a, c, t, g, unknown or other
  modified_base (437)..(454): a, c, t, g, unknown or other
tgctactaattgggttaggtaccattatttatgtgcaggagaatggcaaactccttatgaagcacggataagagtatttcgtgacttagttgggaaagaagtagcaacacaagagactattaatttagatactccataaaatattttttaattttaattttcaattaactagactcttaattttttaaggatttggagaaccaagtactgtttaacaacaaagatgaaaaatgttttgaagatattatttgcaaaaaacgtttaagatattattctttgtacccatgagataatatcacatactctggccacattagaagaataaaaataaggaaatttacatgatatactaacttttgttattttttttacaaaaatactgnnnnnnggtattttttacttttttactgtaattttttataagtttcatactgcannnnnnnnnnnnnnnnnntcactggtgttctactggtgttttcttgttgttctactgttgttttgagttgttctgctttgtgttttactggtgttttaaaaaaatacagtatttttgaaaacttttccgtgtgacaatattttttaaaaattaatctaaattccagtatttttgtaaatttccctaaaaatattatgtttcaatattattagttaggcctttaaaaaatatatataatttttggagaacaatcacaatcctccactttattttatttgactagtaaataaaaccaataaacaaagaaaaataatcacgttatagttttttttttaatataatcattgagcagatatatatatatactagaagaaagttacgtgcaagacacgtatatttaattttatattagatattttataattaaattaaaatcataaaaatttagaaaataattctcttag

SEQ ID NO: 86703 - DNA, 518 bp, Cannabis sativa
ttagcataactttaaatgtgtatatttttttggctattcgaccactctattacatatagagaaatgttaaaagatacaagtggtgtctagcaccgttctatgtgtcagtattgctattggtacaactaaatatcaggtctcacatagtttataataacttttagagagtatcgctaattaatcgcaacgtgacatgtcaagaaagtgcttaaacaccactgatacttaataacaatgctcttacatgtaatatataattcaaaataatacttttaatttgtttttagtattaatgctctttgtttttttttaaaaaaaaataattattaccaaattacggggcatatagtcaaagctagacttaaaccattgaaatccaggcataaaaacttctactcttattattaattattttttttgtcagcagttactctaacttcccatgccttaatgtctaccacttatttcgaattacagtaaaataggacttgtaatagtaaatattattattattatta

SEQ ID NO: 86704 - DNA, 763 bp, Cannabis sativa
aagatcgtgggatcaatgctgagtacaaagatcgtgggatcaatgctgagtacaaagatcgtgggattgatgctgaatacactcatcgtgtgatcgtgtgtatgccatatcccagtaatctgatccccaagttatagggatttcattgatgactcacaatgtgaaagctagattcgctaagtgttggttgctaagcgcagattgctaatttgtttactctgggcatgccagcgaggcatcctgctcggactatgccctccgagcagatactccaagtggattccacatgtcaccattatgcgatgccacgtcaaactgcaaaaattgggataacatttgccccccaagtctatacggtacttctgaagttgggtgtagacttcatccgagctgcttctgccttttgatggggacacgtgtcagcgcgactgtccgatactcgatgtgaggctgactgggcgtccctaaggttcttggctaataaatgctctgacaattaatattttgaaattcgattttctctcaccacgactgacagcttgcacttgattatttttgatttcccatatttgcttttaaaaagcaaaactcattttcaccatccttccctgctatgtgagtttagagcgaaaagagaggttcttggcttcaagtgataatacagtccataatgcttgttttttgaactgcgtaacgtctgtctttcatcttgcttattctaagctttatgaaattttttgcccttactcgagaaaatttcaaa

SEQ ID NO: 86705 - DNA, 584 bp, Cannabis sativa
ttctttgtttttcaaaatgagttttcatactacaatctatattaatatatgaatatagtaatgtatgtagaattcgaaataaacaccaaaaaataaaaacggaaaaattataacaatcggaccgatgaacttcgtgtttatgtatatacatatatataatgtacaacatatatgaaatactgtatatgaggacatacaactaaataatcattgtaattacacgtcctcataatataccctatatgaactttattatatatgtattaagtgaataaaatatatatgcaaccgacgaataaattatatgaaatatatatatgtgatatacatatatatatcaagaaaaaatgtatacaatatatatatgaacgtgaatgaatagaatatatatatgtatatacttaaatgaaaataaaaaaaatatatacctatgaaaatatatatatataatgtgaatgtatatatataaacgaacatgaacgaaaataaatatatatatttatatgaacactgtatacaggtatatattatgtatgaaactcaaacaaaatcaaggcagagatatataatccgctctgatacaa

SEQ ID NO: 86706 - DNA, 1373 bp, Cannabis sativa
taaaataaaaattattaaaatgtggtgtctttagaagtttttagggtgtaaataaaattttattatttttatataggatggagactggtttcatagattttatatgatttttttatgggattatttcacaaatatacaaaagtaacaaaaaaattacaaaaatacgttatacgaaattttaaatatttttatggtttttatgattttatttacaaaagatacggtctttttatattgtactcttgttaatttgttattgattttttattatttatatattattttttgttgttgttttgatgttattttcttgtagttttcttattatttttttgttgtttttatagaaaattgtaaaattgtaaaaagttttctttaaacataaaaatgtaattttttaacaaaaacaaaaaatggtgccttatgtaattatctctttttttatagggttgaaactgatttcagaggttttgaagattttgtaatgagaatgcttcattttatgtttttttatttttttattttaagtttctttatattattatttttttaaaatttgaaattagttttcacatttatattatgttcttaaattattgttgtgtgttgtttttgattatgtttgttagtgttttttctaaattattgttcgaaattgatttacatattttgagagttaatgtaatgaggttgctctattttatgatgttattacaaatattttattttaagttattttttttattattttgtttctaagttcgaaatttacacctatattttatttttaaattattggtatgtattatgtgttgttttgattatatttgtgattaatatttttttgtgtgtatttttatttttttttattttttatttgattgtgtgatgaaattagtttcagttaactttattatttaatatttatattttgttacgattttttatagcgtcaaaactggtttcacagggtcgaaactagtttcacaggttttaactgttctgtaatggggttgctctatttttataatattattatatattttttagtttgtatgaaatcaattttattattgtatgatatttgaacaataatttctattttattttaaataatcagtttctgacacacatattattttattattttcataactggttttttttttcaagtaattagttttcataactagttttttattgttgttcataattgagttttaagtttcaattttttttttatttgattattttaagaaactggttttcatctgtttgtttttattttggttattttactaactggtttctcacattccactatttttttttttgttattcttttatgggttttattgtatttttgtctcttt

SEQ ID NO: 86707 - DNA, 1002 bp, Cannabis sativa
ggtattatttgacttatatgtgaaatatattatttctgtaatttttgctcggcgacaacgaaaaatgcgatggatggctagtttgatcacatggaaaagtttaaaaccttatttcttagtagaatttatgttggaggaaataatataccgaggttgtgcggggttatagtttttgaccattttacccctaggcttaaaataggctaaagttaagcattgggggaattttagtaatttgttaattggagagtggttgctaccgtaggtgttgacacatagcaaggaaatattcagccaaggtttaatttagttaaacgactaattaattttagaaagaattaaagaaaataagagaaataagccaaaatcaagaaaagttctctctttccttccctctctcttcgaaaccagctagaataagggagattgctgcaaattcttgttgttttcagcaaggaatcctgagagaatcaagccaaagtaaaccctagatacttcctagctatgttttctcaagattttcattggtttcaaatagtgattttacaaattattgtctgttagggttaggttgtttgatagttctaattctagggttcatttgagttgaatatagcttcttgtagctggttttggtgtatgagattggatttatgtaagtttgaatttaaaaacctaagtttaggtgtttaatggcataatttgattcactgagtttttctgtgattttctagttggaatatgttgtatatgcattgtttaggtgttctggaaagtatggatgcacttggatgagttttgagcaagttggagcttgtttggggaaacctggtgcaaaccggctaaccggttttggcaggatccccgaacaagccattttcccaattctcgtccattgtagtgctgtagttgggtgtttccctgtttcctgagttagtgtgatccctagagagtgtaacaaaatctggagtggtggggttgggtttcctggattaggctttt

SEQ ID NO: 86708 - DNA, 1271 bp, Cannabis sativa
gtctggttccatgtttgggtctgagtttgggtcccgattccaggtttgggtaaggaactgggtctacgacccagttcaggtctaggtcttagttggactccaagttctggtcgagttacggttccggttctatgtcttggtctagttacagttccaagtctaagtcctggttgtggtcccgttcttggttcccggtctactcccaatttttgttccaatttcgggtcaaaaggtacgggttcgggtctaagtttgggtctgggactaggttcaggtctgggtctgggtttgggtccttgtttgagttcaggtctgaggctgggtccttgatctagacaccgactacgagtttggtccaaacccttggtccagatctggaccctaatctcgagtcctggtctgtttccatttcaggtgctggttcatgagctgggtcctaggttcaagtttttgtttagggtcgggtactaggtcccggtcctagtttccttgcaaaggttcctatctcgattctctgtccaagtcccgatgctggtttgggtttgggtcccagtctaggtttgggtttaagtcctagtctcgcttaaggttttgaatctcggtctgggtttgtatctgggttcaggtttgggtttaggtcctggtcctaatcctaatcctagtatgattccaattccagttgcgattctgagtttgagtttgggtcaggattcgagtccttctccgagtttgggttcgagtgtgggttagggtccttggtctgggtctaggtcaaggtctgagtcccatgtttcgataccgatctcagtccgggtttagttcccggtctaggtttgagtttgggtccaggactaggtctaggtttgggtctaattctaagtctgaatttgagtttgggtcctggggttgggtccgattttgggtttaggttcgggttcaggtttggtactagtccgtgtctaggttcctgacctggtttgggtctagggtaggtttcgggtctgagtctgggtctgacttcaaattcctaagtgcaagtcaggtcctggttcgggttcgagtcttggattctgatgtgggtctgggttccaggggctaggtccctagtctaggtccccatctaagttcgattcataggtcatggtctgggtccaggttcgggtcgaggtctcggtcccaatcttggtctaagttcgagttagggtctggatcttggtttgggtctcgacgagggtttcagaccaggtcaggtccaagtcccaatccaggtt

SEQ ID NO: 86709 - DNA, 1151 bp, Cannabis sativa
ttatctaaacctatggcttgtggtatacctaataatttacttactctagtgcaagcaacttactttagtaaaatgtttgagcatttttctaattgctaattctaaaggaagtcttttggctctagatatagatttcatttatcaatgagtagtttgaactattttagaaaagataaaagtcatgaaaagaattacttaagaatcaacagtgagaggtctcatgtatgcgttagactagacacatactattgagtgggagttatgagtaggtatcagttttgtttaccaaattttttggaaaccaagtatttagagagaataaaggaaatagaaaacagtaaatgataaaaacagtagatttttatgtggttcaagcgttaatgatccttagtctatgagtctatattattggcctcttagggtggatgttttatgattacaatatattataatataaaagccttatgtaggagaagctaagtattttttgtagtgtgacggccgacctagggtcctctcccctttttgagagaaaatgaagatatttataggcacacatggggtaaagggcctacctacggtttcatcctccacgtgttattgaggcctgcgcttgcaaaaaggacatctgaccatccactggggggaaccttcttcatcgtgcggtgtagagtggctaataaggacatttatacaaccttggacacatggcacacaaaggtctctcctttacaaaatactctctacccatgccatttaggaaaaaaaaagtgctcgagggtgcgtatgtgcaccaccatgggctggcacaggggacaagatctgatcatgtgtcagaaaaaggtataaccatctttagagtgccattttgttaggagctgacgtgtctaaggtctctggaacctatattgctatccgggttcctcatcaagggtcgctactcccataagccattacgtcttgccaccttctaggtctaggagtcacttctttcaattttccaggatgccttacgtggaaactgttcctttactccgatcgtgccacatgttcgattaaggaaaatttggatgacaagtttaatccaggaaatgaacattggaagataattaagtaaattttaagatcaaaaagaagaactatatgttagt

SEQ ID NO: 86710 - DNA, 835 bp, Cannabis sativa
tagttctggctaaacattctaatatttacacactttaacacaataactcctaatcaaaaattttggtggcagtatctctcaatgtttacttcagttacaaatttaaggtgttattagttcattttcattgttaaatgctaacataggctatctagtttatacacgtggtatatttacattgatctaaataatttaactatttaaattaacagacaggtgcacatttgcgcaatgagaggtaacgtgcacgtttaccataatcaacctcgattccctctatattttcacttgaatttgtcgccaacctcaaagttctttttgttcgttagttttagtgacagtggtgttggtaatgatggtggtagaagaagaataaataaagaataaaaaaaatgacgaagagtactcatatgatgaaattaccactactaaaaatagtttttcctgatgtttttaaacagtcgagtaagtattcccgtcaatttctataaccatattctatacaaccatcgcaaaacggacaaaataggcaatgatttgaaacagatggtaatttgaaattctcgacggtttaaaactgtcacctatagcctattataggcgacaattttaaaccgtatcatatagtatatatgttacgttttttattttaaaaagtttttttcagcaatgattttttttaatcgttacattagaaaaataagaaaaaaatacagattttctaccattctttcctttgcattagtttttaaattttttacaaatcgatatagtcataagaattaaacaaacgctaatatcatctaaatatatatttaaaaatctatatagtcac

SEQ ID NO: 86711 - DNA, 1526 bp, Cannabis sativa
agggcataaaacccaacatgggaacgagagactgattatcatcaagaatacatgaatggtattttattttgaatccatttatcttttgtttttgatagacactgaatatcaatccctattctctttctttttggttcttgtttatttttgtatcacttacatatatataattgttgatgaaaaattttcaggattcattatgattgttaattgttgagacatgttttgtttgaatatatgattccgatttaagatatttatttttaagcctatttaatctctctcttcttttttattttttttttttgtgagaaaagccctaatccttatcgtgcacctatatatctcaattatgcctttttttgttagtaatgttgtgtgtaatgtttctaaggtttagtgtgtatgtgtaattttacttatgtttgagggtttatatgctttttagtttgcttggctggtgatacgactatttaatcctttgttctaagtagttggatatctaattcttccttagttttgaagttgtatttttgtttgtctctgttcatgcttttactttacacgattataaattcattagccaaagaaaaaacaactatatgcatccgaaaacataggatagaaatttattcaaacctgtttggatgtacagactctttgtatcttcttttaaatccctaaccagtttaaacacctgaagagatttttttaattaacactcgaatcaatacaaagtaaataaaagtcatcatgatatatatcaaatttcatttagctcgtaccttaacaaatatgacccttaattgctcttcaaatgaccctcgctcttcaaatttgttgaggccaattaagattcttttgagttaaaagaaattaaagtgaagagtgaacaagaaaagaaaaaaatttcacgataatttatgtgtatatatagtatactagtaaacatcccgcgcttcgcggcggatatataaaattatattaaaattttaactttactattaaaaatttgtgacgcaaatacttaaaatattaaattaaataaaataattttcataataataataagtatcgtatttactaaaatagaataatttaactcaatgctaacttaaaaaaacaaaagtgtgatcagaaaaaatatatatatatttttaattaatttattatcatatatattaaatattaaagtaatttatataaattacccaaaaaaaaaaaatataatttttatagactgagtcaagaagactcaagaagtatagttttttgaaagtgtcctttttttcttaagtcaaactcacttaaattattattgtgtacaattgtattgtatttttttttactctcaactaattttttttggcaaaaaatactattattaataaatcgtgtattttaatcttatattttttatatatattttgaaatcataaaataaccatcattaaaatttattatagtcacttaaataaaattttaaatatatatattaattaataaacaccgttcataatcaataa

SEQ ID NO: 86712 - DNA, 680 bp, Cannabis sativa
atgtaaaccatgcaacattaaatgttatttctgatctatattattaagtaaatctgattatattgaaatgagtttttatttagggcataaaacccaacaaaagatactattcaatctatcctctttacccccactaacccctcctccaaggactgtctcatttggggacatgatccctctggtatgctcactgttaattctacatatcacctagctaattctaatcagacttctccctcatcatctaaccctggcaccttcaaaggttggtggaaaatggtttggtcctccaagatccctcccaaaataaagcactttatttggaaggcttttaatcaaattcttccttctaatcttaatcttttctctagaagagttcttgacaatccctactgtactctctgttctaacaaagtggactctaattctcattctcttctagagtggtccagagcaggtaaattttggaagcacacaagtttttttgacatcttaactagtaaacattgtgacattaaagagtaccttttttgagaggctttgaaaagttttccaaacatgaactaaacactttttttggtatattatgggctatatggaattatcataacaagactctttttgcagattagaagccaaatttccaagacatagaacatgttattgttgggttttatgcc

SEQ ID NO: 86713 - DNA, 1469 bp, Cannabis sativa
  modified_base (1132)..(1164): a, c, t, g, unknown or other
tcggaaggccaagctgatatcgggtaaccagtcggtggatgacttcaatctgtccaaagtcatctgcccgaacgtgagggttccagccgcacaaaaggcgttccgggaagacattatcgccacgacagaggaccggtaccagaagtacctctttaagagggaacagccatcaaggcccaggcggctgccgggaggaccctttgtctggaagctccgccggagcgcaggacccttaggcctaagcctggggtcacggtccccaatactggtgctcccgacgccagcacttcgggttttggtaagtctcctttaataatacattatgttcctcccgtctgagagtatacccaccttacacctatagggttcgatgagcgccttcgtaggtttagaatgccttctacccggtgggggaatcatgctaaagagtattatttttccacacttaggccattttttaggtcgatcccggatgggttctggacttccggcgcctattcccctagatcattcagcccacttatcttccagttggtttcttccctcggacagctttctcggggatgatgaagccagcattattatttgagactttgctagggctgaattagagagtcagggtaggactagttttattgcttttttttctaagtgcatgcctttctcatgagtatcctaacacttagcttatttctttgttgcagcagtcaggcctatggaagatctcctggctactcttgctgaggcctacagtcctgatgcctctttgcctctggctccctcccagtcggtgacccccgggaggtcctcctccaatgccccttcaggcgcaatcgtcttgatagacgaggagggggaagtcgaggaaggcgaggtggaggatgcggccgcccttgagtgcaagcgaaagggcaagatggtggaggcgaaccttccaagcggacccaaacgggggacactccggtgccgagcaatgattccagaattccttccaaagcggaggagtacaccgtgccgcacgacatagtgttgaccccggttcccgcggatgagcagaggcaaaatctctgagtggccaagcacaactacgcccttgacgagtacagttgggggcatgctgaggtggaggccnnnnnnnnnnnnnnnnnnnnnnnnnnnnnnnnncactcttcacgaggacgccttccggaatctgtgggacctgaacatggatccgctgacggactggttgaaccgtttcgtcgggcccaccttggctccctttgcctcggagatgaccagccagttcatctcccacctcagtcaattcccaactaaaagatatgcggcttgtgcctctctaaactctgttttccaggtcgaagacattagctctgccatggccgcggtgagtacttgtaatttattccttcctttgatattttgtctaaggcatctgatctcactcttgtctcttttttcagattact

SEQ ID NO: 86714 - DNA, 744 bp, Cannabis sativa
tgtgcagacatgtctcagcaaatgtttgaggctctgaagaagagaatgggcagaagctctagcgcctctcctccggtcaagaagtctaagggcggtgacaggtcctctactaaagaaaagaggccttccggggaggtcattgatcttttcgaggagctgactgctgcaaacccctctacccccaaatctgccaagttcaaggagtctggaccaccaatggttgggtctaaactggttaggagtgatcctgaccgggtgcgggcacctactccacctttgccagtgcttctagaggctaaaaagggcaaggagatgctggcccattacatgaacccgctggttcatgaggtcagtgagcaactgacaggtgctgacaatgactcttctttggatttgctggtgagcggagtcttgaaggagttcaccagggtaagcctttcttgatacttccccttaatcttccataattagctcaatatgctaaagtttttctttttgtacaggccagtgtgaagttggcctacacttactcccgggctaagtctgttgcttccaagaacgcgactctgtccgacaccctaagggcggaggcggacttggccaggaaggatgatgaggaagccagggcagaagtcggagctgtgggttggagctgggtgaagccaacaaggagttgtttgctgctcgaaagaaaatcactgtgctgactaaggatctcgaggctgctgaccattttgaggagac

SEQ ID NO: 86715 - DNA, 602 bp, Cannabis sativa
gggcgcatatcacccatagtagtggcattttcttcttaggaatcaacactaaattagtatgattaagacccgtaggcagctgatcaaataagaaaaaagagcggacctgtttgatgacatcattacccacaattgccgaatacttttgataaaaacccagagtcatgccatcgggcccaggggatttatctgggtgcatctgaaataaagtctctttcacttcctcatccgtcaagggttgcaagagagagtcattctgaagtggagtcacagttgcagaaatcccatcaagaacatcatccatagaacagttaaaactagtaaacagattctggaagtaagaatacatgacatcagatagtcccaattcccagtcggaaaaaaaaaatcttaatttcctaaataattaaataaaaaaataagggtaatatagtaattaaaggtggagagaagaacattctctcaccacatggcaaaggtgttggtttgggctgtaaaaatgttattgttccccaagcaaattcaaactatggccttcagaatcaaaagatgctccagatttgaacgtgggttgttcgattcctcgagatattcgaaacttt

SEQ ID NO: 86716 - DNA, 1450 bp, Cannabis sativa
tagcaatgagcacccttctaaggaaagaaaattcaccctcctataataacaatacataactactctatcatttttatacaccaaagtagtaataagtaatttgtttagacagactaaggagtttagaaacctttacctgcaaatacttgccaagctcaacacatcattctccaatccccaaaaatcctaaaaaacaatctccctaacagcctcacataaggtgaacaaagcttttactgtcttcttatcccttagctgacacttgtgcaagtgtaaacgctccagagttggacatatgcccaaatactcatctagctcaggactagagtcaatcattgtgttatgaacacttaaaacactgtaaataatagtataattataaaaatatacatctaagcttttgataaaaaaataaagtacttaacttatgcaaactttacaatttcataattccaatataaatcaaaactataaaagataaaactatatttcatgtaaattcctcatattctaaactaaataatcaaaattcttaattctgtgtataaaatgataacaaatattataacataacaaggaaaaaattacaatgcctagggactaaaggagtaatctaacaaaacgttagtaagaatgtttattacaccttaaattgctacaaatatacataatttaattatattatcaaactacaagcatgatgtgtatcatcattctttctagtgtcattgaccccataactttcatttcaagctttgtcctaattcgtttaaagaaggaaatcactttgttgtcttgtgccccattctgtagaactttcttctgcctttgggtgacgccaagttatatcatcaaccaattcaaagaaggggttttcaaaatttatccatagtcatttttacttcctcccttcttttccatgccataactgtaatctcaaaggtcataaatctagagatgaaccagaaaccattgtagaaaatcagggcaagttataaatcataatcagttgaaggctgagtcttttaaactttggaagaatatgttatagcaggattgatgttttccattgcatttgacttaaatagaaaattcaccttcatatttctcataattgaaatgtgagtgatgataatattatccagaagaatgacccttttgttgcatctctctccttagcgcatcaaattctgatttagtctccagtggttataaaaccatatgcagagtcagtctgcacaaattcacccattactattttcagtaacatgtcatattgtttgtgactgtgatattgtttgttatgcaatatagttcatgataatatagtttttgatttagtgcctataattgttaaatgacatttttttatatacatggaatgcttaatagatatggatatgcaacaaaaaaaattatgatatttcttttcatgtggcatttacaaatg

SEQ ID NO: 86717 - DNA, 552 bp, Cannabis sativa
aaaaaaaaaaaaaaaacttctcattgctattgaatttttcttaaaaaataaaacaaaataaattaatgtcacaattaccttgagtattgtataaagttggatgcaaaaattttggtatagaatggtaagattctaaatattgaacgtaagatccatccatatgtttgaaattagctacctcacttggaagtgatgcataaggtgcaactatttgaatatgttcctaaaattaaaattgtattatcaaaataatttttttaaaacataaattgaattaattaaaaatttaggttaattattcaccttggaaatcattgttttttgttgcatatcatttatagagatttcactagaaattgaggatatctccttcccttttttagcaaaatcatctacaacacctcctttatttataatatcctgtaaaataaaatagcaaacaggatgtatatattttattagttaaaaaaatatttataaaaattttaataatatatctaagttattatgtattaccttagtcttttttctacagttatttttcttattttg

SEQ ID NO: 86718 - DNA, 769 bp, Cannabis sativa
atcgctatatatcacaaattatcgttaaatattacaaaatatcgcaaatcatcgctaaatttcatccctaacatcagatttgttctattattgcaaatacatcccgaaatatcacaaaaaactaataaatgatcagaagaaagaaatacaaaaaacgagagagaccgttagagaagatgatgtcgacgccttgcgaccgaggttctaggtctgtgtgttcgacggtaggagatctgggtcggggttaacgccagagagtgagagagagaagtttttctgaaatgtaagggtatttttacgaaaaaaaatattaaaagtactatatatatactctttctaattttgtggtatattaaaacaatatattttacattaagcatactaaaccaaattttccttgctttttcactgactttgtatatttttttttagcattgctattaggcacaagtggtgtctagcacttcttgacatgtcgcgtttcgattggctagcgatactctctaaatattattatattaaactatatgagacatcatacttagttggaccaataatgatattaacacataaaaatgtgctaggcgccactaatgtcctttgcttttgtagtttctttgataatttttatataggttgctatatagattttggttacaatttaaattcctccggtaattactataaaaaattctgtgtagaattccataaaattacaaaaaataattattttaaagtttaaaaattaaaaaaaaatactatatttttt

SEQ ID NO: 86719 - DNA, 554 bp, Cannabis sativa
cccgccgttaataataatgcaatctcggcagtctatgcccgtcgagataggtatttttttatcccaatttaatattttttgacaccgatctcgacgggcctaaccccccattattggtcaatattggcatctaaagagcccgccgagatagtgtactggtggaaaaataataattctcccttctattacattgattgcatacaaaaatttataattcaaatataatttacaaaataatctttcaatactttaaatagatgtatgtaattcatcttctaatataataaagtattacataataatatatattgtaattagttcaaaagtttgacaataagtataattaatcttacatacttaataaagtttaatataaatcatggcatatatactaagttaagtaggagacacattcttcacgcacttcgttgatctcatccattgagtatgttttctggccataacactacaatataaaagtcagtcaaattttttatatattatagtttctttatgattcaaaatttaaattatattataaagatacgatagct

SEQ ID NO: 86720 - DNA, 565 bp, Cannabis sativa
ccggcatctaatagaacttgttagtctgattttttattataatcatatacattgtagttatttaaagctacttgtaaatttgtaaaaaaaattaaataatttatagtgtcgaaaataaagttaaaacaattatttaccatgctaataacaaaatcacttatggaagaaaatatttgaaccttatattaagtatctgttgtagctatttaggaccatatgtaaattttaaaaattttcaaatagttacagtgccgaaaataaagttcacgcatttacttaccacacatatatataaaccagtcacatatgtaacaaaatatttattttaattttgacactgtaaattattcagaattttctaaaaatttataaataatcctaaataattataatgcacacaataataaaaaaagattagaataaaaaactctcctcaataccaaaaataaatagaaagtctaccgaaacatttatttaaaagaatgtattatacacttagagcactctcaacagtttctctactctattcaaaaaaatactgaaaaaccgtgtttttgcaaatgtc

SEQ ID NO: 86721 - DNA, 1141 bp, Cannabis sativa
agaggtatgtttcaaataaatataaaattagaagaaaatttgattaattgattaataaaaggggtatttttcaacttaccccatctatatatatatatcgatggtgattggcgcacgtgagtcatcattaggagttcttggaaaaaattgggtcagaagagtgcttgtgccaatctccaagaatattgtacattttgatcacaatcctctcttcatgttggtagataagtttaactaccgagttccttgagatgatgtccaaaagatgacttgtttgtctcgatccccatagatggttaatccagattcttcctagttggtcagcgttcccaaacatgtcctccaagctcacctctaagggaaaatatataacaccctactaatttaggcataaggatcatcgtttgaatatccaagggcttgaacttgctccattgataaactattcgcgtcatcttggcctctatcataagagtgaggccctcaacacaacttacatatcactagagccttttgcacttgaataatcatcatcttggttaaggcttctacttggacggttaacttagtaattgcataaatttcatgtaaacccgctactctcttcggttggcttttctcatttggccatttttgattattcatggccatctccttaagtaaatcataagcctcgttagtacttttcctcataaataccccaccagaagcggcatctacgagtgtgtaggtattagcagtcatccctttgtaaaagttgtggacttgcatccacttctcaatctcgtgatgaggacactttctaatcaggtttttgaatctctcccatgcttcattaagagactcattgtcttgctaaatgaagttattatttttgatctcagtttggcaaccttaacaagaggaaagaacttggagatatatttcagggccaattcctcccaagtgttgatagaatttggtggcaaagataccaactaactcatggctcgatcccttaaggagaatgggaacaacctgaatcggattgcatcatcactaaccccattcatattaaatgtttggcataactcctcaaaatttgcaagatgcatgttgggatcttctgatggcagtctcccaaactagattgtggattgaa

SEQ ID NO: 86722 - DNA, 1165 bp, Cannabis sativa
agtgtaacaccactattatctgccatccaactggacatacattgtccagccaggtgttgccgacactcttcctattggtcgtccatgttcggagaactttgacattccaattgttgttcctacttttacggttgcttgacattaacaccatccatccaacagtataatgatggcttgtacaaagtaaacgatgcgaaaggtcatcgcatctaatcctcatgtggcttagcttgccacattaccgagcaccgaacaagatctacccgtcatggaggagggagatcacgagggggacattgaggtccaggagattaaggagcaggacgacatccgtcctgacagcccttccgagactgaggaggaagaggaggctgaacctccaaactttgaagggtataatgaagccagggagccgatgtctgcagagggcgaagtcttggttgaaggagtagactacgtcatcgaggagcatactaaagcagttcctcacagaaggcaaggtgccttgggtgccagatgggtgagtcctctgtccaagatcactgaagcacgcatgagggccttggagaaggatggatatctgtgcggtcatgagtgttacgtcccttcttcgaaccactgagccactaacccgcggaaaaggatgtgtgcttggtcgggtgctcacactaaacaaggagaaatgttgtccttgcacccgtacttcaggaaggtggcagattatttttgcctttttcctacccagatcactcccaagggcattaagtatgtatttgccctgttcatcctctacgccattcagaattgggggtggccgtctccgcacgaggttagttagttctttgacctaaagtctacacccaagtaaagaaggtcggggtacttctacttctctcagccagatttcaagtggttgacaggcactatggacaaggtcatgagcaaactcaggggttttatttatgagtattattttgtggaaggcatgggcaccacttatactcggtttcagcagatcccgatatattaccatccagcccttacatggcccttagggaaagggctcaaaggattttccaactgccggatgctgctcggaatatcaatttattgacctcggaggtcaactttgtggagtacgggctttatccagcaaactttatat

SEQ ID NO: 86723 - DNA, 656 bp, Cannabis sativa
accaagctttactttctaaatggagcatgcaaatgatttctcagaatgagtcgctatattgcaaagttttaaatgccaaataccttagagggcaacattttcttcagtgtaactataaaaactctgactcttaaggttttggaaaggggttatcatggctagagatattctcttacgtgttgcttgtaaagttattgttgacggtaaggacactaagatctgggaggacccttgggtgacccataacgataatcatttctcgacgtctaatggcacacccacttttggtctcaattttgtggttgatctctgaaggcaggatggggattgggaccttccaaaaagcttacttatctttttgaccaagccacgatgagcgctattttggaaggtgggaaaccttctagccagggtagtgatttttggatttggactaaggagacgaatggtctccgtagcgctgcagaaccaattaagggtagtaagattaatgaacttcacaaggttactgtttagcatcaagagttatgtgctgaagctgtggctagagaccacttgggagcaattttgtagatagctactaaaaggtaccaatttttcgatcttcttagaggtgatcaagcagctacatgtcttttttctcttgagatggcggt

SEQ ID NO: 86724 - DNA, 501 bp, Cannabis sativa
aacaatctcaatagttcatggggtatttttaatgaccttaaaagttcagggagcatgatttggtacatgtcaaaattcgaggaaaaaaatcttaattagccttaaaaaaataagatattaacttgatgttatttcaacattatttttatgttgtcgcaatattatattatatttccgcagtatgaaaacaatgtgtaaacaacaattttttaaaacgtgtaaacaacagtctgtaaaaaaaattcgtaaatatatatatatatattaggtagaaggtacgtgcaaggcacgtactacttagtcttataattaaattgtttttagtaatatattaatttatttatattatgaatatttaatataaaatatgatttaatatttattctccttgggtaaggaagtttaattctctttcaaatattgttctaagtgttattacatcaattttgttgacatgatgaactatagtgagagtacggttctgttggaaatttattttac

SEQ ID NO: 86725 - DNA, 862 bp, Cannabis sativa
  modified_base (827)..(833): a, c, t, g, unknown or other
ttttttttttttttatttttcttacctagtttctcagtagccaaactgaatttggcctcaatattttggctcaccgaagcataaaagccatatgaggctggtgcaatgcactcgcgcttctatctcaagaactaggcgaggtttcgtttttcttcatgaaccttttaatttgtggtttgttgactgtacttctcacttcaagttttgatttttgaaaatattgtttttagtatgaacttgctacagactctctgggttatatgagcttaagaatatatatcttttttagtcaatggtgaatatctgttttgacaagcttgggtgaagaaatactcaaatagtaaactatcaatcaatttgattcaataatatgactttatttttcttcataggcatgtgaaccaagatttgggttggtttttgtcattgatgaccagagcctaaccaccttgtgaaatcaaagaaaagcattgtcgaatcaggattggttttagtcatcgacaactagagccattgttgatggtcaaattactacaaaactggactttagaggcgatttttaaggcctttccgcatcggttttagtaaaattcgctaccgctgatccaggtgatgttgtaggttccaaaacaaccaacgctgaatggtaccctatggcgtcagttatttcataggaatcgacgccatagggtacatatggcgtcggttaatagtatataaccgacacgatacacccatataaccgatgctatataacttaaaacccgatgtctaatctataatgaattattattttttttgttaatttaatttatttaaattatatnnnnnnnaatttatatattatattatttaaattaaa

SEQ ID NO: 86726 - DNA, 839 bp, Cannabis sativa
ttcttttttgttcagtggtggaataaccaacatccctaccatagacaagagtaggaagagtgggggtcccaccaacacttggagtcactcggggctcctgaagaaacataatcgtaccctcggctcgtagagccttctctaccatctctgcataagagattgcctcatttgtattaatcaataggtcgtgtctaattttcaaattcagacctaccaagtatttctcttttttactgaaatctgtaggcacaatacccaaagccaacttggccaggcgatcaaattttgttgtgtactcagttattgacatacgctcgctttgcaccaatttagtaaattctttccgcttagcactgtggactgcctcgttataatatttagagctgaataaatcttgaaactcttcgcaagtcataacagtgacgtctcgggcgagagacaccaattcccaccacacgaggccgtcttcctagaacttaaaagtagcgcaggtcacccgatcgtttctaactactcccatgaaattcaaaattctttctatcactgtgagccactgctcagccttcatcacatcaggacctcccaagaacactaaacgtggttacttgcgaaacctcgcgtataacgactcaatatggttgccagcagcaggttgttctgctggcaccacaggaattacaatgacctgagcttgcggcggaggcactacaggaggaccctactaccttaacctcagaggagcttaaggtgggttcacatgttgaccaccctgaaacctgccacagcctctgccgtgaccatacagattctgggagatttgatttccctgaccgcctccg

SEQ ID NO: 86727 - DNA, 791 bp, Cannabis sativa
tggtatgcatacaagctattcaaagtaaaatctctatgtcatcttcttttggtcttttagtgtatcatgttcatgtgttgcttttatctttagacaatgttgaattgtgttttgtcaaatgatctgcaaacaagccggctcactgcttagccagagattcttgtttctttccaagtcgtgtgcttcaattggaggattattcatttgaagaacattctattgtttttaacaatttgattaattaataaaaataccgatttgagtaaaaaaaaaatagtagtttttctatatttacagaacattattcattactttatttttaattatatatatattaatattaaaagtataaataaaagtaataaatatttttataaatataatatttaaatgatacagaaaataaattaaaaaaacttatatagagtgtaaaataaataaataaaaaaagatattttgataatatattttaaagaataaagtagatatgctgatataagtgtttaataagaagaggaatgccaaaattatgtagcggattcttcaagttttacaaatgcacaaactaaaatggaaattagtggtccagttcaataatgacaattctaaaaattaactggatttggtaggatgaatgaacatgcggtagattaccatagcaccaaattaacaaaccaaaagcattgattacaacattctaattaactctctaaaatcattctaacctcatcactccatgtcatgcttgtgttttcaaactctgaatgaatcaaagaaaaaaaaaaaaaaaa

SEQ ID NO: 86728 - DNA, 1219 bp, Cannabis sativa
gagtccatgatggctaacttttggtggggttcaactaaggatggctctaagattcattggcgtagttggaaattgttatgcaagtcgaaatttgaaggtggtctgggttttcgctcctttgttaatttcaacaaggctctactagctaagcaagcttggagaatctttgagatgcctaattcactactcagccgcttgcttaaacatagatatttttcaaataacaatttcttggaagctcggcttggtcactcaccctcactcacttggcaaggcatacattggggaagggaattacttattgaaggtttgcgatataagattggcaatggttttactgtctctgctggttttgacagatggattcctggtttcactgattttaaaccggttagcttcaatggggcagattcaatgacagtgtcacacttcataacagaccaaagagaatggaacatctctcttcttaatcaatatttccaatccatagatgttgacaaaattgttaccattcctcttagcttttttccatccaatgatcgtttaatttggcaccatactacttcaggttgttacactgtgaattcgggttttcatcttgctgagaacttagcagaaaaccagcaaacacaagcctcatcttctcatagcacctggtggaaaacattttggaatttggatctaccatctaaggtaaaaatatttgcttggagagtgatgcaaaatgcactacctgtagctactggtctagttcgaagaaaggtaattgattctgcaacttgctcattgtgtaataatgcatgggaatcgattggtcatgctttgttcaactgtacaacaacaagaaaggtctggagagacactaaattcatcattgatcacacacatactcataatatgtacaatggtgattatttgatatatttatcctctctacattctaaacaagatcttgaattaattatttgtacaatgtgggctatatggcatgaaaggaataaggttattcatggtggtgtgtccaaatctagtcaagatattgcatcctttgctagtacatatctgcatcaatattatcgggctagagctaaaaaccagcagcagtttaacaactgcaatgttcacaccagcagcaatgcttctgcagcagttcacaattctgcaacaactcccctacagcatcccaattctgattcatcttggtcccctcctggcataa

SEQ ID NO: 86729 - DNA, 667 bp, Cannabis sativa
tacctctttttatatgtactgtatccaaaatcttgacataagggagtcacatggagagtatattgaggtgacaggggtaaaatcggtaaagtgtttaaaaaagagaaaaaaatgatagactttcaaaagaatgtaaaaataaaagagaacaatataaaaaatgtatagaatctaattttctctaaaattaatttctggattgatatattaacttttgctgtccaattgactaatatgtgtttgcattaataattaattatggttgcatgaattataaggcccttggaaagaacttattcttgtagtgacatatacagtaaactagaacaatatagagaaaactacaaatgagatagacaataagttaactactataatttttttaaagagctctaatttaaataaatagaattaatagtataatatacaattgaatattgtaataatgatattgaaatgtttttgaattattatttattattttaataaatttacagttttctatttattatactaagccatgcaaagcacggcagttaatatatatattagtcaatatatatttatgaaaaaaggatgaaatcccgttgattaattaacattattattaagctaattagaatttttgccctaaattcgttaaaaatgtcacctaaatgtcaaagtt

SEQ ID NO: 86730 - DNA, 1116 bp, Cannabis sativa
gttaagtgtataaaaatcaaaacataagggggtttcgccgcaaattgctctattttttattttagtatgagattaagacttgataactactaagtataatataaacaccataatttattcacacaaatttctttttttttctattaatcacacctgacagaaaaagtacttaaattattacgttgtagtactttattttttttaagagattacgttgtagtacttaagttattatgtttataacatttaaatacacaaattatttatttaatggtaaaagtaactaaattatcatgtttgtagcacttatgttgtacctaaattattttttagtagttaaatttatttacatagtattaaatttataaaaattaaaattaaatatttatagtttagatattttttaaatataaaaatgatatattaagcaatttttctttttttgaaaaagatatattaagcaattaattacttgattttcttttattttccaaaaaaaaaaatctgaattttcttataaacgaaacaaacacgttacacattcttcaaggttagaaaggtaaatttaatagaataaaagggtaaataaagtcaagatctaagggtattttggtaatatcacacgtggtattgtcctactataattataaaagatattactaccactaccgcggactctacaaagaacactctcgctcctatatatatatatataatcaaagcttcggtccctaaaaccaaagctttccttctctctctataattcgtcgtcgttttggtattttccagccatggccgcctgtgctagcttcgtcaagctcaacgcctcatcatccaactggatcggtcaacagtccttcgctcagccacgtggatcatcctcatctcgtctcaccaggagccgagtcgccctcccgatccgcgccggggcttacaccgatgaactcgttaaaaccgctgtgagtttctctgattaattaatcgtgttcgtgttttaccgatttttgcattgtttacgcttattcgatcgaacctgacgatattttttttttgtttgatctgatttcttagatcttgatgagttttttctcttttatttcgttgttgaatctgaat

SEQ ID NO: 86731 - DNA, 589 bp, Cannabis sativa
atccaccattgatgagtatgttcttaaaatgaaggggtatgcggataatcttgctgctgctggccaacctctccccgacgaggatcttagactttatattcttggaggtcttggttcagaatatgagtcgattatggtgaattttacctccagatctgaaccactgactctttaagaaatacaattcatgcttcatagtcatgaagtccgtctccaacagttcacttcatcggctctaaacaatgtgcaagccaatctagcaaacctttctgtcaatggatccaaccgtggtcatggataccgtggttcatatcgtggaggcagaggccaatccacaaatcaaggtggctgaggaaacaggcccatctgccagctttgtggtcgtgctggacacacggcacagaagtgttatcaccgcttcgacattacatttactggaccacaaactcctggtgcatcaagctccaacacaactacagaagatcctcaagctcacatttctgagtctgccatctctgaagaatcccctggcacctggtatcttgatactggtgcaacaaatcatcttacagctgatgcccaacaactt

SEQ ID NO: 86732 - DNA, 597 bp, Cannabis sativa
gagcttaccaaaaagaatcagcagtttgtgtggacgaacaagtgtgaagcaagctttcaagagctgaaacaaagattaatcacaactctagtgttagctttaccttctgataaggaaaatttcatagtttattgtgatgcatccagacagggtctgggttgtatactaatgcaggccgatcgagtcatcgcctatgcctctcgtcagttgaaagaatatgaaaagcgatatctgactcatgatttagaactttccgcaatggtgttgccttgaatatttggcagcattatctctacggagagaaatgtgaaatatatactgaccataagagcctcaaatatttctttactcagaaaaatttgtatatgagacagaggtgatggttagagttggttaaggattatgactgtgaaatcctttaccatcatgggaaagctaatgtagtggctgatgccctgagcaggaagggtcccgggcaggtaacaagtatgattaagatttcaccttaattagctaaagacatggtcagatcaagcatcgagtttgttgtaggcaaacttcataacttgatgctacaatctgatctgttagaatgaa

SEQ ID NO: 86733 - DNA, 1075 bp, Cannabis sativa
ttccactttttagaactctcactcttgtaaaaagaatagtattggaaagcttcctccccgtcactaaattttggttcgataaaattactagtaccttcagtaacactagaatttcattgtttaatcaagcaagatatattggatataaatattcaaatcggcaatgatcttcttcattcatttttttaattagtataaagttcaactatgtaataatttaagggtatatacatgagatattctgaggccgattgggaaggttgccaaggtaccgcttcgtcccacactttactagaactctccgaggttcctagaaagtgcagagggtactctaccacaaacctttaaagccaatctttcttagacagaataatctcagttttcaccactttcatcattacacaattgttcttaacattattttttaaaaaaaaatattttgtaaactaaaatttatgtaaattttttttttaaaaaaaaaaaactaaaagataaaagtctataactaacctaaaaataaaataaaataagggtctaaataaaaatacaattaacaaaaaaaaaattaacaacctactacaatagctaaatatgaatatgatacaaccaaaaaataactatctggactatactaatcttttttttactaaacgaaagaagaaagaaaaaaaaaatctatgctatatacaataaccgaaatagttaagagagtatatatatattatttttagttaatgtaaactaaaatatagtaaaatactactaataatgaacacagttaaggaattttttttattttaattattaaaaaaatgaaataaaataaaataagctactatactaacctcttgtagcgtagaaacctccccgacaatggtgccgaaaattgatgtcgcccaattagttacactgcggtcgcggtagtaaacgggctatgtcgtatccacagggagacaaattactaccaaaggtttgtttagtaaatagaaaatgatagtgtaaagttcttttttggcaagttagttgacaaaataatttttccttttatggtaagattcttgtgcattcataaccg

SEQ ID NO: 86734 - DNA, 559 bp, Cannabis sativa
tttttttttttttttgggtaaaacaacatgttcaaatttagcgttatttatttgagatagttaaaagttgggtattggtgacttgtgtttttgtttgtagctgttgaaattaatgttttaattattcaaagacgaagaaaaaaaagagagcgcacacagaacagaagaggtgaagaatgaaaacaacttttgaagacagtgggccaatgtatcaaacaattaacggcaaaaaagttactcctctgcttttctattattattatactatatttgactacttttgtgttgttttgtcagtttttaggatttagacttataataataaacagccatggtgcatggtgtcactaagcacatgtatttttttttaaaaaaaaataataaagttttgagttgtgtcttgaatgaatatttaattgtaaaataggggtacggtacataatattatacactccactgcataacatgtatccataggccaaggcatatcccttctcttttttgattctcaagccttatctccccttctttttttttttttttttttttgaaacaacaa

SEQ ID NO: 86735 - DNA, 1019 bp, Cannabis sativa
gtcgttctttagttttatcttttaaatggttattgctgacgttgaaggttatatcatctccgatttgagttatcctccttgtccatcttgataaaaaaatacgctaagtgttgggaaggttcccatctcgctatattcttttgtgatatttgtaatgcgatgtgatcttctcgctgtataaaatgcgaggcatcttatgctgatacactcatttcgctcggatggataaatgttcctttcttgtcagtatattccgaggcaggcatatgtctcgttaatctcagatcaatagttactattcttgtctcactattgactataaagtcaaaaagttttgaatattatctatttaacctttaattaataaacgagttatttaatatgtaattaatgatattgttgtatcattttagaattatttcgtattctttgtgttagactcgtattaacttctaaagtgtagccgaatttcagatataacaacttatatatacatatgtcacctatctataaatacgcataataatttttatttaaaattttaaaagagaatatacttaataagtactataaaaatatcattttttttaagaagacattacttaaatgggtatttgcaacattttctagataaaatttaaagatgtattactatattgttaaatcccctctttaagtttactcttaaatctccctaatgtttctttgcattttgttagacgatcagttaatcgagttgcccactacgttgctaggcattctcgattcttatctggttgtagcattcacatacagaatattctgcctgatcttcaaggccttttgtactcataatgctaaatttgaataaaattgctatttcatttccacaaaaaaataaataaataaataaaaatcccctctttaagaaagtttatgccgaaaagcctaaaattctgcattctgggtaaactacattattattagtgtatttgcaacattttccagataaaatttttaagatgtattactatattgtt

SEQ ID NO: 86736 - DNA, 864 bp, Cannabis sativa
ttggtaaaatagtaattatttatttttgtaataaaaaaaatttcaaatttaaatagggagaaagacaaaagttattaagataaaaattgtcaagacaaaatacacattatttatcttaaacaagacataagaggcgccacatgcactgtgtctagacactaaggttgtacatcgattgatttggtcggtttatactacatattttctaacccaatgtaaacatcaggttgcgaaattctaagtgcaacccgcccaatttaaactaaaaaattagtaaccctaccgacaatttggtcgagttagccagtccaaactttcttaagttttttattttttttttagtttcaaaataaataaaattttaacaattacaacattagagagagtgtgtatgagaggtcaagtcattggttttcttaataattgtatcatatattattattattattattatgtcataataaaagttaaaaattaaaaagtacaaaataaaaaaaatgatacaagtcgggttaaattgggttcattgggcgggttgtacacattttcaacccgcccaattaacagattaggcggttcatactttggttgagatattctctccaagttggttgagatattctcttatcaaaaatattaataacctattcggttatggatatttatttgaataattaaacttgatttaattaattgaatattgactactataaatagaggtgtgatttgagaaatcaagacactttttttctacacaaattttgaaatacacttagagagaaggaaaattatttttctctcaaaaataattcttgctcatgtgttgaaaattcaacaagtacaaattatacactttatcctagt

SEQ ID NO: 86737 - DNA, 511 bp, Cannabis sativa
tgttaattctgtgagacattggggttaagaagtgaacaaagaacacagaacagagaaagaaagaaacagaggaaagaaaagagaaagagagtagaaagaattgaaattgagaaagaatgatttcattgattattgatagcactgagatcagtactatatatactggtacagaagactagccaagactaataacagaaacaacaacttgtaacaactaacagactaacgacttttaactaacacaatcattagctgtcttaacaccgtccctcaaactcataattgatacatcttcaattttgagtttggttcgaaaatcagcaaaacgtgtgcttgaaatagccttggttaatccatctgcgagctggtctactgctgggacatgcttcacttctataaatccttgctgcactttttctcttacaaaataaagatccagctctatgtgttttgtcctagcatgtagaacaggatttaaggtcaatagaaccgtgctaagattgtcacacca

SEQ ID NO: 86738 - DNA, 1202 bp, Cannabis sativa
tttcaacatacagtttatgttattaacagacttcctacctctgttattggtgacatctctccttatgaatgcctctttcataagcaacctgattacagctttcttaagccatttggatgctcttgctatccacatttacggccatatcagtctcataaactagaacttcgatcagcaaaatgcacttttgtgggatactctatgcaacacaaagggtacttgtgtcgaagccccacagggagaacatatattgctcgaaacgtcacctttaatgagcaagaatttccagcaaaatccatctcccaacagcaacaacaggtacaatcctcaccctccacattatttccaactacatccttttttacatttcccatggaacatgcaatctctaactcaaatcctattgttgttgacacacctactgctggtgcattgtctggaagttctccatctgactctactgatcttcaacatgccatttctccaccagatgcacccatttgtgagaccactgagcatcatatacatacacaagattcccccactaccaacaccataaccccaaacacaatcccattatcaacaacaaatcccactcctgctcagttaccacctcctcatcaatccacaaacactcaccccatgaccaccagatccaagaatggggttcacaaacccaaagcttatcttgccactaatcaccccctgcctgaatctctcactccaactgaaccaaaaaatcttaaacaagccctggccgatcctaactggtttaaagccatgaacgatgaatacatagccctcaaaaaaaatggcacatggaccttagttccctataattcatcaatgaccttggttgataacaaatgggtgcatcggatcaagttaaactcagatggttcagtcaataagctcaaatcacggcttgtagcaaagggctaccttcaaactccaggaattgacttcacagatacattcagtcccgttgttaaaccagcaacaattcgattgctactcaccattgctgtaacaaataattggccgatcaaccagctggatgtttcaaatgcattcttaaatggctcacttcatgaaactgtgtatatgcctcagccccctggcttcattgatactgaaaaaccaactcatgtatgcaagcttcacaaagcgttatatggtctaaagcaagcaccacgtgcttg

SEQ ID NO: 86739 - DNA, 709 bp, Cannabis sativa
  modified_base (664)..(683): a, c, t, g, unknown or other
caaacatgacttgtttttaaaaacttcaaaaactattttttggtctcatttctaaaaataattttttgaaaacaaaaaacaaaaaacaataccaaacatgctcataaagtcttagggatgtagatccgtcatttggttaaattataatgtatttttactaactcaatataaatggtaggttgtaaatatttaattgtaacctgtttgataataataaaaaaaaaagatttaacctacccaataatttcgttggtttggtcagattaacctgttcaaattaatctttattttttatttttttgttatagtttaaattaatgttaaaaacttaaacataagacaaatataaattgaatagcattaaagtattaaacaacattcttcaaaattaaaaaaatatatattcatgtgtaaattttaaaatttaactttaattcaaatgagtaattgatgtagccgaatcacccactctttataattgtgtaaagaatttgcttttgttggatcgttttccataactttagttgctgagtcaatttctaccataaatgttcagattgtttttgtatgatatctaaagagagttgagttcttcccatcttttacgtatattataggttttagagtaaatctttgaagagtaagtgcatgtttggcatcatannnnnnnnnnnnnnnnnnnnttttaaaaacagaaaattgtttttaa

SEQ ID NO: 86740 - DNA, 946 bp, Cannabis sativa
tacagaattctcgctagtttgaaggtcttgtataaaattctgaactggggatgccccacaccagtagaaattgagtatctgtactcgattaaggctgttccatcgaggaagaatgctacagtgggcttctactacctcggtacgtattctagcgagtctaaaatcattgtggacttgtagaacaaggtgtctttcaaaaacaacttcttttggacatctggtctttcccccattgacacaaccacctttcgcaaacttcgtaagtgattgttttcctcttgctcagttatatcaatctttttctttcaagtttttgaccagtattttgtttgttcttatagccctcttgacgaggcctactcctatccccgagatggttagtcgacacaggtgcctgataactctcctttgaggtcttcggtcatgtgagttccttttgaacgaggccaacctgagattggtgggccttcttgccgacaaggagcatacttgtgattataagtttcccaagtattcttcttggcaatagatcaccgttccaaacgaggataaggcctgggaccgtgtggctcgagcacaatatcttcaaaacactgcccctcgggaagccggtgaaggagcatcccgaggtaatcaatgtggttggtctcccacagtacttagggctgaacgtaatacattaatcaccttccaagattcccactttaatttttatatttgggattcctttcttgtagactaaattgctcataagtttgacagctggtatcctagattccatgtccagattaactgtcacgagtcatattatggtatagctgagcaataaagcactatggaagatagggcaggtcatatagatgcaagttgggatttagaaccaatcgagccttttgatatattcaagattacaggctgtagggactttagtggatattatggtcct

SEQ ID NO: 86741 - DNA, 654 bp, Cannabis sativa
aactaaatggtaataaataacacgaaattatttttcctatatacaaaaaaaataacatatacaaaataaaaatgcagtatatatatatttaaaaatgcatatatgtatatatgtatatatatatatatgtatatggtaataaacggtaatatgtatatatgtattatttttcctatatatgaaattattttaaaaatgcagtatatatatatttaataaaaattacactatatacaaaaaatttatatatatttacatagccaactaactaagtttggacctaaaccctacctaattcgggacaaagaaaaattcccattaaaaaataaacatatactattggatacattatgcaaatgcatgtttctttggctcaaaacaaataacacaaacttttattatttttcaattttctgatcagtgagaaaataaagtaaaagggtacatattcattctaatagtgagaataaaattacttagcagaatagaccaaacttttcattttaaaaaataatttagtaataataataataataataaaccttatgattacacacctttcctaaacaacagcagacaacattcacaaaaagatatatatgtaaacattcaaaaaaaaatttcaaacacaaagatatatatgtaaacattcaa

SEQ ID NO: 86742 - DNA, 748 bp, Cannabis sativa
tgtaatttctcattttagacaagctttaaatgttaataatggacttgaagaccccagggtaggtctaggaggtgttttacttttgttgtggaaagataatgtcaatgtaactcttctgaattttatttccaatatgtttgactgttatcttgcttttggcaatggtcctacttatcactttactgctttctatggttctccggaatgaagtaatcgttgtcattcatggatgactcttaagagattacgagatgttgctctactttcaccttggttagtgattggtgactttaatgaaatactctccaacctaaataagcaaggtggtgctttacaatgtgaatctcaaatggaggattttcgtgaaacattaaattattgctgtttgactgagctgccttttattggagatcctttcacttggattaaaaattgacacaagactgatactatcaaagagagactagactggtgtttcgtcaatgatgaatggttaacaagctttaagcgactaacaattccatttggactactatagatcagaccatcacgctatttctattacagttcaaaaaaaaaaaaatacaagaattgatcatgttaagcgacaaacttgttttaaatttgaaaagatgtggctaagagatgatgaagctgctagttttattaagcagaattagagctcgcaatcttcaacaacgggtattgatctcttcctcaacaattttcaagcttgtacatcttcctt

SEQ ID NO: 86743 - DNA, 1053 bp, Cannabis sativa
tgcatcggagacgatttgtcattttgaccagcaccaaggcctggaaactccagattaaaccgttgatagcatttggaggaaacatgaccagccctgccacacaattgacagacaggtttgttgccaaattgagtgggagagggacctctgggattggtggaagacattggagaaccttggccctgactgttgggtgagaaatttcgagatcctgtagcatagggattccaataaggagctcttgcagatggaggagcagatcctctaggttgattagtatttccttgattcgattaatcagaaaaagaagaacgattcttgaaggcacttctgttatgagcaagattagctgagggagctgaatcaagatcttgactgtgtttctcgattctatgttcttgagctagcagaagtgattcaatctcggcaactgtatattcatcatgacgagagttgatggagatgatgaagatatcataatcttgtggtaatccattaaagatggcagatatatgttcttttgcagaaagagactgtccaacagatccaagacgatcgacgagagttttgactccaagaagataatcgttgatcgatttggaccctttcttgaagtttcgaagctgagtctgatattgatcgatctttgctgcagattgagaggcaaagtattgatccagaatactccagacagcagagcacgtgtcacagccaacaatacgcataagaattgtatcagacatagacgaaagtaaccaggcatagagtaattgatcttgcttgatccaaaaaagataagcaggattgatagtacctgatctttcgtcattttcagtgaggaacttccttggaatctgaggtgttgctgcaagaaaaggaagtagatcatggcctcggactgcagctaggacttgaggacgccagagtaagaaattttgattgtcgagcttcactgaaagtttgtgagagaagataactggaggagtagttacagtattggcaggagcagaagccgccattgatgaatcaagaaagatcacaaaggttgatgaa

SEQ ID NO: 86744 - DNA, 530 bp, Cannabis sativa
ccatctaaaggtagcgctttacaaatggtcatcaatattctatagaagttattttattaaattatgtaagacccaatacatatattgtaccaacaatgatatgacacgttacataatgctaacatgtatggagtaaatatcggggtgctaagcgctactgcttccttttacgatttctcattaagtagtagagtaaatgttgtgtatgaagtaattaaatttatatatattatatatatacatataaaaggacttgtatttgtgttttgtcctcctcgtctttgagccttaatcccataatatgaatatggtaattgctaatagaaggtaaatttgtaactatttttcattcaataattcaatcaatttggccaagtgctaatctcaaatatgatccgagatgttgatttatttcttcttatttttttaggctaataagtaatttttcttcctgaactttgatatgtactaaatcgtgctccctgaattttttttgccgttaaaaattcccccgaactattgagattgtt

SEQ ID NO: 86745 - DNA, 730 bp, Cannabis sativa
gtggcattgatcgttctatcaatcagtctattatcatcctcattctctcttccatcacctaaaccagacccagacccaaatccctgaaattcagtagctccttcgaacgacaacctcccttcgttccctccgaacccactcacctggctcgccaactcgctctccaaacctcctcctcctcccccctccacgcggctcaccaccactccttcctgctggtccgtactatccgagctctgtacagggatgacgtcgaagaactcttcctccactacagagttcactagccagctgcttttccgtttgtttctcgagaaaatcaagtttggattcactttggggaaattggaggagctggggtgaagcttaggatgagagtttgttggctttggtttgggtttggtaaaggaaaggaatctctgggcagctatggtgtggatcgaagccatggctgcttaccagcctgagttctgaccgagttgggaaaaactgagttacgagttaacgcttacgtttctccaagttgggaaaatctgagttggagattttatatggctgacacatacctatgattggatgaatgataatatagtaccacgcgttccatggttttatcgtggactaactgttagaaaacataagttagagatgggttgtacttgtattggtaattttgtgaggtcgtatggaaatatcctggactgtcatgcatagtatacctaactctgct

SEQ ID NO: 86746 - DNA, 1553 bp, Cannabis sativa
aaaaaaaaaaggaaaatatataataccaaataatctatttatagatttttttttatataactatgcgatgatctaggtatctaactaataaattaataaaaagaaaaaaaacaaaagacttttatttcaaaaattaaaataaagaaacaactgtatcctacaatgataactatttagagactattttattttttcaaaaaaaaaatctattaagaaaagaaaaaactaatttacttatttttatattagaggtggaggtaggattacacatattggtagtaactatcaaagcatgtagtaatataataatatatataaatgaaaattataaatcatttggggtgtgggactggggggaggggggcatggccaccgtagcagtcaatgcacatttgtccctagtcctcacactagttgagataatattatcttgttagacttaattaattgattttaattaatcgattagaattctaaataagactatgtcttctttatgagtttcactaagcaagagtttatttgagaagaaaaaaaaaattagtgcttgtttattaattaagagactttgaaaggtctagttaatatataagttaaataaaaattcagttgataactgattataattatgaaatagatagaattagtttttctagagttataattaaaagataatatttgtgaaaagtaagataagtttcaataaaatagaaaaattaaaattcactaggctcatataaaggctcagccaaggttggtttagtcaaagctaatttttttttatcttttttttattcaattttaattcaaaacctaaccctaaaagctaccttataaatagaatatgttggctcttatttttagatgatgataaccataaccctaaccctaattatgactctctttgtcagacaaaatagaaaataaactgagccaccatcatattcgaattcctctctttttcttcttgaaaatttagaaccctacagtgattgagtaattacccacacaattcaaggcaatactcaagatagtgtggaagattgtatagatttttgtcacaagagccaggttcagatcttgatcatactatgcaatagaaaagatcaagggttagagatctaaacagaatgagtcatattatttcactgccatattatttcgcttccatcaatgtaaagttttctacaacttttatgtgtttttttcattattttaaagaattcatatttaggatgttatattataaaattataatcaacatacatgttagtaaatctaaatcttggtaaaataatttccaacacaaatcctccccttcctgaagacggtcaagttttgcctgaaagaccatatggcaggaatgaccaattcctaatgcagggcaacaattcaagaagggagactcgaagttactttgttccaccactgaacagtaatttcaggtaggtggatccaccaaactcaagaaagtggtacgatcaacctcccatttgttaaggtttatgccctgaaaattctgtaaaaatatttttaattattaaataaagagt

SEQ ID NO: 86747 - DNA, 806 bp, Cannabis sativa
ttcaagaagcttaagtagacaaataggaattaattaagatgagaagatagggaagagaatcctgttgatatgtttacccaattgttaatgtctaattactagcccaattcctgttgtgaatgacagattattcaaattaacctagctcttttcagatcttctaggttctagatcacatgctccctaattaatctcttaattagaatcatatgaaatcagcattaagtaataatctaaattgtcacataagtcatgcaaatactttcgtttcacataaacctagattatccaaagtttagcattttcaattctcacttttcagatttcgaattgagatcatagaacatgcaaaaggtgatcaagcgtaaacatggaaataacacaatattttcacaatcagaatgaacatgaatggcaaataacaataactagggaaaactttaacattcatcatcttccctaaatgagagtttagcttatgttcaaatccataattattcctaaaacataaggaaatgaaaaaggaaggaagaaagaaactgttggtggaatgaatctgggtcgccactttgctcctctcgccgctcttgactgccttctaggtctaaaaatcgcctcatctaggcttctactcgcagtttttttttatctctcgttccagggttcaaaagatgaatttgccctcacttgtacggaatctcgccacggccatgggttccctcactgcggcgagtgctgacttggccgcggcggtggagtagcttgctgcggctactgaccccagctcgaaagtaacctctctgcca

SEQ ID NO: 86748 - DNA, 810 bp, Cannabis sativa
tcctatcaataattaatgaaacactctacatttgttgttaattttctaaggtttatagatttgttgttattgttggaaaataaagagtatttggacactatactttaatatggaagagacaacttttgtgatttttgacaaaatagtagaattgcatctttatttataggactctatgaactattctaaaaatattactacatgaccaacttttatatttttctacataagtctcactactaattaacataagtaaaggagaattttaaaaaattcaagagcactcaaacaaacttccaaatacaattaaactctagaacctttaattaatgtaggaatactttaaaaattctagtaacaacaacaaaattctaagaattaactatattaaatctagtttaatattttcaacgcccataaaaaaacatactttacatccatttggtggatcctccatctattttgaacagctaagaacttattaatctaatagtttcaagacaagcaaccataacaaacacctcatcatagcctatgccttctatttgactataatgtttaatttgccgccaatcttgttttatatctcttcacatcacctttagcatttttatttttcttctacacccactttactccgattggcttgcatccttgtggaagagtagttgactccaatttgcttcctcggtcatgccctcttcctttttgactttattgttgtctgaattttcttcttttaagttgagttatagtaattgctccattttcttcgtttgtttcttttttttttatttctccccctaggct

SEQ ID NO: 86749 - DNA, 729 bp, Cannabis sativa
ccccttgcctaatccctctggtaggggagaaaggagggagaagggtattgttaatagaaagcttaaaagtaacagatgatagacaccaaatgattagggagataaaggaaggagggaaaccaaaatgagtgagaatagcctgaatgaaaccccactctacacgatcaaaagcttttcccttatcaagtttcaaagcagcccagccaacctttcctcctttgcagttatttatcgcattaatgacctcattggaaataagcacattatcaaaaataattcgatcacaaagaaaggcactttgacggtgagaaatgaggtcacagaggactaacttaagcctattggcaatagcctttgaaataatttcgtaaatcgttgtgcaaaggctaataggcctaaagtctttaagggaagaggcattcttccttttaggaatgagaaccaaagtagtgtcattgatcgaagataagtcgatttgattattaagagcatcaagaacagcctcagtgagagattttccaaccgtggaccagttcttctgatagaattgtgcattcagaccatcaggaccaggagctttgtctccaggaagttgaaacaaagcagaatggacttcatcagaagtgaatggttggctgagaagaaggtactggttggaatttagagtgtaggaaattccagggaggatagtattgatagcagtgaaatccgtgccctgggaagtgaaga

SEQ ID NO: 86750 - DNA, 1695 bp, Cannabis sativa
gcatcttcttctgtgaaagtaatgggctgatccatgagtcggggcctttgtgctggaagctgggtgacttcccacacttcatcatgcttcatggccccagcatagcgttttaattcctttatggtggtccccccaatatggggcccaccggagatcatagccactctcccattgggtcttggtgggagcccatggacctgctgagggattgctcccctaggggtacaacgggtgttccgggtgcacccctggtgccacttcaggccacgggcctcttgctggaaccgaattgagatgtggtagccggttcttgatccactcatacagatgacccaacaggatcaagttttcgatctcatccttcaaatttttgcattcgcatctcttgttgggatcccttcacgaattgtccctgtacaggggaggaggcttccggtagtgtgtattttgcctcgtggagaaatacactcgctcttgcatgtccgtgagatccgtgtattgtgtatattgaggggtgtacccccttcgttgtcgcttgtcttccatccggttgctaccctttgaggacctcttactccaggagctttgaggaggtcctttcaagcttgcggtaggagcagagtgagatggggcttgtccactcattcctgaagggttgcttaggggattcccaaaatgcgatgatgcgggagccatggctaggctctgattatatcccggtgtagcggagaactgtatgtcgctcatttgaggagtggtctggggtagggcttccgagagctgagctctgtgtacatatcctgatactccagttggatagtatcccccataggccactatctgggcctcttccaaattgatgtatttttggaccctcttctagaaatcttggagattagtcgctccttcctgttgtaattcattccagaatggggtccccgtacggatcttagcttaaagaagtgcaagttgttgtccgtcatccacttttttggtctttgaggcctcctctttgaacctctttataaagttcttcaaggtttctgtgggtagttgcgttatgttagtcaaggtactgacttcgagattaatctttcttactacgacaaactgtctccggaaactgacttgcaacttgttccagtagtccacagatcctggttccaacttcttgaaccattcctcagcggaaccactcaacgttagtggaaagcatagatatttggcatcattgctgaccctcataaccgtcattacccggttgaaaagagacaaatgattgttggggtctgagtctccggtatatgctgccatctcgggcatcttaaaattcttggggagctctgcctccaatatgtgccggacacatggctctcggtcctcactgtcagaatctgagtcatccccatttttcctccgggagacccgagcaatgtctttgcgcagtgttgccaactctgctagaattctttcatttagtgtccccgcggagtccgttggtacatttttcttcttgtccaggtgatcttgtagatcaccgtgtttttcgttgattttttatcttaactcaacgggagggtacctccgatttctccttcctctctcacgggctcttggtgcaaggatacgctctttcggtcctctcgatcttgagggccaagactcggttttgggagcttgcccctctgcggacct

SEQ ID NO: 86751 - DNA, 624 bp, Cannabis sativa
ttaaataacatacttgttagtaaatctaagatcctggtaaaataatcgatcttgtccagctcttggaattggtactgtcatgttgaatctagatggaggaaaagttactgaataaggcatgttcgacatgtactaaatatcaaaagaaatctgatctcagttgctgtgatggatcaaggtggttgctctattaaagttgaaaatggtatgttgaaggttataaagggatatatgacagtcatgactaaagttagtaggaatggtatttatatattgaatggaacttcagccaagaaccatgttaatgccaccacctcagataacaacagatcaacaatgatttggcaaagaaggcttggccatattagccttggtgatctaaaatatctgagtaataaaagagtgtttaggaaggaacaaatcactgacgtggatctatatgagcaatgtgtgcttgggaaatcaacaaagatcaaattcgggattggaaagcacacctcaagaaccaaattagactacatgcacacagatttatggggaccatcaaggactctcttaagaggtggagcaaggtactttctaactgttatagatgattataccaaatatgtgtggattcatatt

SEQ ID NO: 86752 - DNA, 917 bp, Cannabis sativa
aggttccgtaagcaggcacctttaatttttctagggggttccgatgttatgaaagtcgagcagtggctaacagtgattaccaaaatcttaaactttatgggcatcactggtaatgatcgggtagcctgtgccacattccaatttttgagaggacgttctagtatggtgggacatggtgttcctaactcatgatgttacaacaatgacctgggaagagttccaggaactgttcaatgccaagtattacaatgaggcattcagaagtgctaaaagaaaagaattcatccagctgactcagaaagaaaatatgagtaatactaaatatacgactcagtttgatcgcttggcaaaattggcctcaggaaccgtgccaaccgattttagcaagaaacagaaatacctggacgggttgaatgcaaagatcagacacgactttatgatcactactaatgccacaccacctatgctgatatggtggctaagacactacgagctgagggcgcagtggagtgcactttagagtctcgagggactccggttattggcggggttgctactcctcctacatcaagctttagtaggggaggtagtggctcgaccactaatcagaaaagaaaggcacctactgcattcagcagctcaggtcagaacaagaggtttcggggtaactagggtcgaggtaatcgttagggtagctatgaaactcgatacacttacccagagtgccccagttgcaaaaagcaccatctgggggagtgtaaaggtcaggggtgcttatggtgcggtatgccagggcattacaaaagggattgtccccagctcaggaccaaaacaccaaagactgcagcaaaacccactccgacaagggtgttcgcgataactgaggctgatgcagaagccagcccttcagtggtaac

SEQ ID NO: 86753 - DNA, 844 bp, Cannabis sativa
tgaagtgtatcgagatgaatatggactgtatctcactcaaactaaatatatcactgaactgctggaaagatttgatatgttgaatgtcaagccatgcccaactcccatgattgcgggaaagccgctatcgaagaatgatggagatcttctcactaatccgactgtgtacaggagtgccataggtgctttacagtacctaagtcataccagaccagacattgctttcgccataaataaattgagccaattcctacaaaatccaacaacaactcactggagtggagttaagcgaatcttgagatatctgaagggaaccattcgtcacggcttacacattggttttagtgaaagattatccttagttggttattcggatgctgattgggcatgttgtccagatgatagaaaatcggtggctggatattgtgtttatcttggagaagctcttgtttcgtggtcatcaaagaaacaagctgttgtttcaagatctagtacagaatccgaatacagagcattggcacatgtagcatctgaaataacttggattgaatccttgttaaaagaactaaagttcaaactgcctgagacaccaattacttggtgtgataacatcagtgccaatgcacttgcctccaatcccgtttaccatgcaagaacaaagcatatcgaaatcgatatccactttgttagagacaaagttttgaagaaagaactggagataagatatgtgcctactgctgatcaaattgctgattcgttcaccaagagtctttcacattctcgtttccaggttcttgtggacaaacttggagtgaaggtgtcaccccttcgtttgaggggtggt

SEQ ID NO: 86754 - DNA, 542 bp, Cannabis sativa
ggttgactttggttgagatccaatatagagaaggttgctaaaggaagagtcttaccttgtgaggaatattaagcttccacaaaactttctaccattcagaatctccttaagacgtagacacttcaccaattgaacaagctctaatttccgcccaatagccatgctttactaaatacctccctgattgatcatgagaccacacccttttatcttctagctgaaatatcgaacaaggaatggcgaggatgcttctagcttcttcaacattaaagttagaaaggataagagatatattcctactattatcctcattctttaacattctaacattggcatctaaaggcaaattctttggtaaaattgttgttgtcgcttggcttggattaagccatttatctttgaagatcctaaatttttttccatttccaataaaccagtgagaactgttaagaggtagcactttcctccataataaacttctctaaatgaaagatattttagagggagctccaacttccaagatagtcgaatttgggaagtaa

SEQ ID NO: 86755 - DNA, 734 bp, Cannabis sativa
aagaatttagttgatttatcgatatgatatcgttgtatcgataggatgtcgacacaaaaagtataataaatttttagacctaaaatatcgataatttatcgacactatgtcaatatgttatcgacaatgtgatttaattgctttttgtgattgctaagtgtgataatatcgacagaatatcgacattgtgtcgacaattttgttttctgaataagggtgatcttattattggaatatcaatagcatgtcgacaggatgtcgctatgttgtcgacaatataatgtaattgttcactgtaatttttgtgtgataatatcgacagaatatcgacattatgttgaccttctgtcgacaattttaattattttgacagtaatatatttttgttatatattgtttcagatggctccaagactcatagttccagcatccgagcattttactggtcgcgtgacatatagaggcactggtgcttttgcaaaaattaagcctcgatttgaggagtataatttaaataacacgacgaaagaaagcggtttcgacagcttttggaatgacgtacccctgacattctcctcggtgtcatttcaccaagtcatgttgcacaagatgaaggttgatgttgaggaggatttgcacgtgtagttttacattggtcggaagcagctcagattcggagtggttgagtttgccctcattacaggcttggacttctcctcggggccaatagaaga

SEQ ID NO: 86756 - DNA, 649 bp, Cannabis sativa
attttttattatctgcatgttattttttgttgttattttgatgttatgtaaatgttattttcatattacttttatatagttttcttgttgttttcatagaaatccgtaaaaatataaaaaagaaattctttaaatgtaaaaatgtaatttttttaccaaacaaaaaaagtatcttatctaattattccttttttaaaattcccaactaaataagaattctcatatgacccaccttttttgttttcaaaaccataaaactgttattgagttctaagccaatgaagcccaaatatttgatccacttgacttgggccctctagtcatgttatgtgatacgatctttcagacttcaatcaaatatgggcttgggccttggacttgggcccttcattgtttctatacaaaattgctcgacctattttgcattagtttcataaattcatggtatatttttctaaaaaaaatacttaggaattatattatttttctcaaaaagaaaaatcaagtaactactaaatgtgaatcgttcttagtggtattaatagtgaatgacattctagactaacatataaatatctagattctctacataattgtgcattacaacaataaaaattaaggtggagtttattaatatttttatttttaa

SEQ ID NO: 86757 - DNA, 945 bp, Cannabis sativa
ataacatggagagtaagagatcgtcgctgcccacaagaatcatacagtgagataccatcaattttatacatgatgcaaatatccaacacatgtattaggttacctaacctaaaataataaacatatcataaatttaatatgtaataacaaaaacgtatacattttttttcttcataaatatgtaataaatgtttagagcaattattacttaatattgattttcaatatactaagagtactattaaagtagttgcatgttgattataccatgtcttgactcagaaacctagactaaacttctaagccacacttgttccctagattggtgagaatgaaaatgttaagtaatttatagaagacacaaaaaatttatagtagtttacttcttgtatcgcaacaataatggagctatattttctttgagtttttatttctcacgagatggtaattgcagaagaatactaagtatcagaagctctaatttctagagagagaagctctgactttgtaggtagttttgttaaagtgaaaaatgagttatgggagctctccttttataggtgaaggagacccacaaaaataggaggaaaatacaaagtagatgtttttgactgttgatgatggtctaacaatgaaaattagctcttgtggtgatagctataattttgagcccgacaaaacccaattcgggtaactaagagcttatttttcctatttgatgataatagcttctgaattatgattgaagtgtgagacatgaattcatagagcatcaattagctttgaaatacaagttgaatcgtgtaaatcagagtactattgagtgagttataactgttttaatgaaggcagttcacgacctaatgcccaggtagacataaatgggcatgttgatataatgatcaggtctgtgttatacagacatattatatttgttatgattta

SEQ ID NO: 86758 - DNA, 820 bp, Cannabis sativa
atttttatttttattgttgcaatgaaagaattttgttgagtttgggaaaaacctgaaaggactccttgtaaagaatttagtataagtgttgcacaaactagaggcgccatgctcgtcacataatgtacaacttctttttcattgctgaaaacataaccgaatgtttttcggcctagaaagagagatgaacttacaataaccgcctctattgctacaagacacaagataactcgaactgcaaactgagctgctcttggtttaccagcacctaattcatttgaaactctagtactacatgcccccaaacccccaaaaggaaaaaaagagttaaaaaaatatttgaagattcttaaaaaaaaaatacttgtaatttttgttagtcatttggtaaaatcgttttattttcataaaaaatttgtataatattgtctcgttttgataattttttttataaaataacactccaagcaccctattaagaattcttagcatttagtgtgcaaggttatttatgtaaagtgacattataaaataatatttttttcgtcgataaaacttataatttattgagctaaccttatagctgcaccaaatccatctggtattgtataaagtgtgatcactgtagacaaactgttaagaaaaatataaaattcacatatttagaaaatttataaatgtaatgataaatctaaatttaaaatccaatatgtatatattatgataagggaaataaatattaccatacagataagactgaagtttcaagttgaggatttgatagaaaaccagataacaaagtaagaagctcgaatgccca

SEQ ID NO: 86759 - DNA, 617 bp, Cannabis sativa
cggtcaatatccgtacagcatgacgcacattgttcatctttctcgtttgatgacgtcagcctttcaaccccaacttcttttgactctattcaaattttttctattttaggccgaaagaaatgtaatatatttttcctttttaggatagtaaaacattttttttaaaatagcatctatactctaataggaaccattcaacaatttactataggtaggtccaaatttaaatgactaacttaagctaattcaaaacctacttaggcaattatttttctttttatgacatttattctaaaaaattacattatttattcataccaaaaccaaaaaaaaaaaaaaaatacactatttataggtgtattaaatatgtgtaatggggtgttaaaaaaatgtgtaatacaaaaatttttattataaaatagaaaaaaaaaataagagaagagaaaaccaaagagaagaagagaatgagagaataaataaaaaaattatcagttgtttattctaataggatgaatccttatttatatatataaaaaatatgactaaaagaataagaaaataaatatcaatataataaatgaaaatacaataaaatattaatagtgataattaattta

SEQ ID NO: 86760 - DNA, 737 bp, Cannabis sativa
ttaaaaaagactttaatcccattgtggaaatttctcttattatttgttttgtctaactaattattattttcctaattagtatcactcttaattagatttaccctaaccggccttatgcctataaaaataatcttcatgtgatggaagaacatatagcacactaagttctattggtgccgattttgtctaaaagcttattttttcttactaccaaacacttagggaacaaagtgaaaatctttttaggaatagacaagtctagatatttttctagatagtgctcaacaaatagaaaacaagtgtatgtcaagagtgaaccaaaacctataaggatactgaactttgaaatacaagcactctataccttatgattgttaccatctctcaattaggtgtaaatagacttaattaggtgatttagaggttaatggggatatgttagaagcaatgccaacgttcaaaaatacacactcatgataaaactgaaaaatatagtaactagttactagttaccagtttcttcaacttttgtcaattgttctccaaaacattccaaatcactcccacttaattttacatcaattatacatgttataaatgagcattggaaaattttctaagaccatctctaatagattgtgtatattttaggttaaatttagtccaaaatataccataaaactatgtttgaccaattttttgtatttgtgttacaatgcacaaggtgcaaattgact

SEQ ID NO: 86761 - DNA, 570 bp, Cannabis sativa
ggagaggtcagaatttactttacacatttttatttatcgatcctctatcatgtttgatgccttatttacaaagagttttggtaaattcataatgtaaacttttagcttaggtaacagtttccctcttacttcaaattctattgagttcacccttctgtcaacttacttgaatatggtcaggttggttcaggtaaatcatcctttctgaattcaattttgggagaaacacagctggtctgtggttcaatacagtcgagaggatctattgcatatgtaccgcaggtttataagctagtcattgctctaaagatacttggtttatctgctttcttttggggataaatctcttgctaatatttttttgcttgaattgtaggttccttggattcaatctggtactattcgtgataacatattgtttgggaaggattataatcgaaaaaggtttttgtcaacaacttcaaactctctactttcttcttgattacattatgctgaccatttctcaatattgaaagtttgattattatttaaactcatgtactttatatttgaaatattcactatgtt

SEQ ID NO: 86762 - DNA, 591 bp, Cannabis sativa
ttattattttatataatgatatacattatatttatatataattagtattctgtctgttttagaaaaattttgagtaatttaaattatgattgcttatgagattatgcacaacttaaagaaaaaacgaagagggaggaatggttatatggcacttaaactagatgttagcaaagcctatgacaagcttgagtggggttatctctgggctatgatggtaagggtgggctttgatggtcgttggattaatttagttatgcaatgtgtatcatctgtttcctataccattttacacggtgggaaggagttgggatccatttctgctcaaagcgggttgtgccaaggtgatcctttgtcactatatctgtttattctttgtgctgaatgcttctctagttttgttgcgtagctatgaacagagtggcttacttacggggtgtaaaatcgctcaaggtgcgccggtaatctctcatatactctttgttgatgacagctacatttactgtaaggcaactgaggaagaagcatacaatgtgaaggagctgttgcatacttatgcggtgtcttcagggcaaagagtcaacttctctaagt

SEQ ID NO: 86763 - DNA, 572 bp, Cannabis sativa
aaaagtcttcccttattgtgccagcatttgagcatattattcatacaaaatgaaaaaaatgatggggatttttggcacaattaaaaattgtggatttccatagaattagagaagctaaaagaagcagttgccaatacatagtgaccatttcattatactaacacgcacacgaatacttttatctaagattctataattgaggacataattattaagcatattcctcttgtcgtctatatgtaataataaactaaaaaaatataaaaatatccaaaagttaagtttcaaaatttaaacatagcaaaaatcattccaaatcgttgaatttgccaaaccacataatgaaaccgaacaagttaacataactaagcgacattcaattaaacaggatatgaacattatcaacaaatccccatccaaactaagcaccaaacagttcaaacaaaattattaccggtggagggcggcagagtggctctgggcagtggaagggcagcggaggtgcgtcgtcgtgagagagagagagacctgagtgagtgagatcgaaagagagatcgagggagtgggttgtg

SEQ ID NO: 86764 - DNA, 723 bp, Cannabis sativa
ttagaaaaattacagttcatagctccgctcatgaaaaagattttgctgctatttttcctcttaatattttcttttcattcattgtggttcacaaagagatattgtgctataaattttatcatgaaaatactattaaataattattgcatatgaaatgtttgataatagttgcaaaagaaacccttaaaatattgttctgtttttaattcatatcatgaaaatgctattaaataatcttgatctgctggtcttattttaagttattgatgttgaattttttaagtagtaaagttaatattggtagtgcatatatatatatattataatggctttataatatatatctttatatattaaattttttaattctgttaaagttaacgtcagtttacttatcaacaaaataacaaataaacatatttaataaaattaaaataaaggaagattacctattacagttacatattcctttgaaattcttaaaattcctcctagagaaactctaaccaccagtccacccaaaactctcttcatggaaactaaccccattgaaaacgatccccatcattcattgaaactctcttaaacatcaagccaggactctctctctctcggagtttctttcccactctcactcgtctcttccctcacatttttgcaggtaattcttcactcgtctcttccctcacatcttcagcaatgcaaaagaattcaggtatttgt

SEQ ID NO: 86765 - DNA, 612 bp, Cannabis sativa
tgatataactcaaacactagaaagtaaatgtaaattaaaagtataaacaaaaacccaaaatgggttcagaaaacagggaaataaacctggtagagagtgaacgattccaactgatgcgtttcgttggaccagggggaagaacaaccaagcttagtcgatgatgaatcccatcatcttccaagcccatttgcttcctgaaaaatccaaaacacaattaaagtgttcaaaagctacaaattaagcatgaaaaagtttggtagaacacttgaacaaaaacaaaaacttacggaggaaggacatcaggaggggttttagatggttttcttcttctgtaaaacacttcaacatgcgactgttgttgttgttgttgttgttgttgttgttgttgggaagctatgatctctgaccagagatcgacgccattaccacctgaagcataataaattaaataacttgtaaggaaagaagaaagggaaatttgaaaatgatgtaacatctagttttctctttgtacctgtatttgaagccatgactgcaagagagagagagagagagacagagagagagggagagaatctgtcagtgtgaagaaggcgggagtttgacacactt

SEQ ID NO: 86766 - DNA, 1092 bp, Cannabis sativa
  modified_base (1048)..(1051): a, c, t, g, unknown or other
aaggtttaattcaatttaaattttaaaataatttgtttcgtataggggttttgtgagttataatagttatggaggttctgcccttataaaattgttctcgggtagtcataggactagttctgatatagatggtatatatgtgccctgtgaagtttggagtgatttggataggttttgagggtgtttagggagtgcgaaatattagatttttgctcccaaaagcagtctgtcgtttgcctgtcatttctagaaattccagggagatttggaatcttatttttctcataacttttctctcgggtgtttgttttgtacatttaatataccatttttatgttggcaacgtactctaacatattgtgaatgttttagagtaaaatataagttttattttagtgtatttgaattacggggtttggtaggataccctaggttgtccattggaactattgagcaatattttgggataaacacttattggtttattattgttatggcataggaccggggatcatcgatcgtactctaagtatgtaggccaatatacctaaatctgtacttgaggtaagaaaagtatattgtactgcataggacgttgtattgtaatacaattaatattattatgaatgggttaatattgagatcaaaatatgattaatattgttatataatgaaaagattaattagttaaaaaatgataatgtgatgatactgtggacataatatatgggctcacctgatcaggtgatgcgatatacctagcgacatatcgggtgtaggtacgtacgtcagtgacatatgatgactaccgagcataaatgggctcacctgattaggggatgaaattttcctggtgacgtatcgtgcctagatacgggcatcggttatatgaaatgcctggttatggcatcgatcgaaacattatggggttttttcctagcaacgtatcaggcgtaggtacgggagtcaatgacttaagatgagtaccaggtgtacgtacgggctcgtctgattagctgatgcaatatatgttggaattattttaccnnnntctagatttactaacaagtacgttattaacatcctaaatat

SEQ ID NO: 86767 - DNA, 1080 bp, Cannabis sativa
gcagtgcgggtgtggtttggaaaactagaaaaaccgcatgtgcgggttggtttgagaaaatggtcaaaaaccacaccacctgcaccgcgaacactcctactttctacttttttgtctgaagctaattttgcgaggcagtccgtgtgggcattctgttctctcaaaatctgctcgattttataacccttgaactcctagagcaattctcttgcagcaacgacataggaggtcatcttttctccgcgagtttagtattctccaagtacttggttaacaatcaactgagagccactaaaaatctttattttttgagcccttacaacctttgacaatctcagtcctgccagcaaggcttcatattctgtctcattgttagaggcgtgaattttaaactgtaaaagtttgaagcctcaagcctttaggtgacaccatcactattcctgcttcgtatccattctcattttaggccacatcaacatatattttctaggtgggcaccatcacttcaggttcatgagcagttgcttcagtttcattacactctatgataaaatttgctagggcttgtcccttaattgagacacgtgggacatactggttgttgaattgactgagctccatggcccatttgagcattctcccaaaagcttctggctttagcaaaacttgtcataatggatggttggtcaaggccttgagtgagtgtacttggaaatagggtaacaacttttgggaagctatcagcagatagaaagccagtttctttattaagggataccaaatttttgcccctatcatcctcttactaacgtaatagatagggtgctggattttttcttcctcccggaccagggcttcactaactatgtttttgaagacggtcagatactggtagatgtcctctccctggattggtttagacaaaaccagaggcttggccatatgctcctactattattttagacaatgctcaggcttgtcattgatcaagaaatgaattagaacctcaacaagacaatgttgaacaactcccaaatcaggatgaggttattgttcttgaagaacaaattcaacaccctc

SEQ ID NO: 86768 - DNA, 3150 bp, Cannabis sativa
gaatgatcactcaacttgttttttttttcttctttatggttcaatttgaagagccaattacaattatggagaaagatagaaatagataccatatgctttgaaatttaaggaataattactaaatgctttccagatgtaattctttgttatcacttacagccaagccaacaatgattgttcttttcaacttaatcttagaaaaatctttttagttcaacttaatgagtgtgtttttcgattttgcttggttgaagcaaattgtttgacttgttttctctcatttgataataactgggttcactatgcaataaaagaaaataatcattaagcattggtaatctaatgttttgattttgaaatcatatctgattattagtaattggactgttgttatcttgtaatgagctttttgaatacaggtttatagacaagacaaaccattgccttgtgctttggtttatgattttgttgcttacaatctttatagattgaaattttgttgctgggaatatttaatttccagttctatgtaatgcttcttacttcgggttttggtaccttgtttattcgttttcctttcgcaacttgtaagagcgttctagttttcgatcaatgctaccattgctcagttgggattaattatcagtatttagagtgtgttttatgtttcagggactccatatgaaggcggaatatattttctcgacatcacatttcccagtgattatccatttaaacctccaaaggtatttatttccctattgatgatttgttctatctgttgaagataaaacatcttttagtaatgttttgttaatttggtatgaaatgacaacaatgcaaattacaaatgaaagacaataacatgtgtgagactaataaggagtactaatttttcttcgaacttatcagttgtgtgattaaagggcaacggaaagaaaatgcagtgagacataatcagtgtcctaattctcggtttttgattggatgtggtttcttcagaagagtgctttttgtattgaacattagaacaaaactaggactcattttgtatgtaatcttctgtagttagacaatgcaaactggtgaaattgtttaacagggtaaatgaattggttttcaggttgtgtttaaaacccgaatctaccacttcgatgttgattctgtggggaatgttagtttggagatcttgaaggatggttggagtccagctttaacaattacaaaagtgttaattgcaattagaaagattttcaccgagcccgacccatgtaagtgttcgggactgcacaatctttgtgttctttttcgtttgtgatttggtcttaaactttgtagtgaggtttggatatttgacatctcaaaaatcctcatgttcttactaatctacttgaaatgaaattcacattcttataggtaataatcctcttgttcctggcattgcacacttatacatggtagacaaagcgaagcacgataaaattgctgcagaatggacgttgcgattcgcaaagtaaattcgacataagagcatgtatccaacaattttgtagatatttaagtacttctttactacaagactaaagatttcacaaccctattgttacactatgaaatagtgtaggggcatattagtaatttataaaggatgtgaatgactataaatatgtaattgtgtagttattattgaatatggaatgagaaaatagaactttggtttaattgggagattggcactgtctcgaaaagtgcatttggagatttgtcctgtctcgaagaggacctgttataagcttactatgggcagcttttgtatttgagtgttaagccatagcaaacataagataaacttgttgtataatatatgatgaaggaattgatagtttttttttttcccaagtttatacatgtaacatgttcctgtgttttaaacttgatttgtaatgttcatatattttgtttgaaaaagaaaatatcaaacaaacaaaggttcaagataggagagtttctaaaaaccagatattgagatggctggaaggaatgacagatttcatattagcacaatttatgaaaaaaaaaattggcctgggagactaaagtagcttatgggaattagtgttgtaaatataggtcagattttttaaaacggcacgaaatttgcatgagcatgaccaggtacgaaaaaaatatgagtttagacatgagttggcacgatgctataaattggcacaatgctgttaggaaaatatgtgataaaacacaacacgatgtgagaagcacgaaaagtacgccacataaatacaaatagattagcccgaaaggtgcgacaagtccgaaaagtacaacacgaaacattaagaaactctataatttaataattataataataataataataatatatgtatttgtcaattataaagtaaaataataataaaacttaaatataatattgattattataattttatatttaaaattattacaaaaatgtaaaagcaatactatatattatttatttatagagcgcgctaaaaatttaaaattttataagtaaatatttaaattttaataattttaattatttttttttatataattgtctgtgaaatattataaaaaaattacataaatataattgaaactataagatatatatagtagtgtaattaactcattaattgtaaaaaaatataaaaaagtaaaacacaaattcgagcctgaatatgaaaacggactggcatgtttaagaaaaacgagtcaacacgagcaaaacacgacacgaatccgagcatgacacgaaaatactatgcttacgagccgtgccgggcctactctttgaaaatggtggcacgacacaacatgacctatattttttttaaagtacgacacatcacgacccatattggaaaaatacaaatatggatcgagtcagaacaacacacgcgaatttacagcattgtagttgaattcctaatcaattttgtgtgcggcttggtagtaaaaaatgatgcttatttattttctaccaatattgatattaataatgacagactattatggataaaataagggaaatttacacagtttactgtgttttcccattttctttcttttatactgttacacgcccaaaataacttttatact

SEQ ID NO: 86769 - DNA, 1122 bp, Cannabis sativa
tttaagaatgtcagagactgtttcttggtcgaaatagcctcgcagttggaacatcccactgcccattatctaacaataagtcagccacacggttaatgttgggggagagacccccaatcagttttgggcagaaacctttacgatgcggaatctagggatctccccaaatcttagtattctcaccattggtaaccaactaacaggcaccttttctcaaaatagaatttgccttaacaacgcttttccaaaaccaagaatcagaatctttatacatgcagttaagaaagtcttttccttttaggtatttggctcttaaaactctgcagcacaaagattggcttccgttgaggatattccacccccatttggtcagaaaggcctgattcatttctttagttttccgaaaacctagaccaccaagcgatttaggaagacacagtttatcccaagccttgagatgaatcccatgatttcctttctcaaaaccccaccaaaaatctctgaccaaaccatcaatcctgttaaccatgcgagtagagagtttacaaaaatattaaattttaggcaaaagtttataattttattatggggtggaattttttttttttttaaaaaaaaatactgtctttttataaaataaccataaacaactgtcaacgcagattttcattaactaattaataagtttttttcgtaataaattacacacatatactataagaaatttgagaaaaataatagtagaaataatgacactaagttttttacgtagttttgcagttaactctgcatagtccacgagtctatcttattcaagatatttctggatacagaatacagtattacaatcagtgatctctttctctcaaagattttttcgtctatttttctgtataatctgtccctatttataggaatataggttagcagttatttacatgtgaatttaaaatacataactgttttcacgaaatgtgggctttgatcacgttccattttaacacatgtagagctagaaatccgcataaccttctattattcttatctttaagatagtggacactgacgtgggataggagtatctcgctttgtacatagatgaatgacttggtttattcatat

SEQ ID NO: 86770 - DNA, 601 bp, Cannabis sativa
atatatatatatatatttactagaggcaacctacgtgcaatgcacgttttgttttattgttctttttgtatttttatttaggctaattgtgtataaaatcataatattagaaataactattaaattaaattagaaaatttggaataataatttgaaaacatcccatgaaaaaaaagttgctcttgttttcataaacgacttcgctttcaaaatatatatatacattttgaaatcctcaaaactatttcatttttatatattaattgttgaaatttttacaatgactcaataacagatatcttgcttatcttaaatccttagctttttttttccctttttttctttttttttttttatcttcctatcgatcttcctctacatctataacactcatcctgtccattatctatttttgaataaggataattatcttttacaattttattttcattaaggtttttggtgtttgggcttctaaacagtatttgatagagaatttctgcgtttttgttttcatctaaggccttggtgttggagattctcaagaatatttaacaggtttgggctcgaaaaatgttgtacttttcggttaattattcgt

SEQ ID NO: 86771 - DNA, 567 bp, Cannabis sativa
ttattttccaaccaaacaaaataatcaggcccattagtattccattccattcttttctagcccattaccatcaaccaaacgggcccttagttcatcttgaataaaaacaacaccagttaagcacatcattacttttttaatctaggcctataagctataacataaatagctcaaacaaatgtagaaagcaaaaagtaaaatttcaagaacaagagtacctaacttatgctagatgcgagagtaccaattttggtacttataagagatgtgacatggatatagctcgttggtttacttgttgtgcttaaactatttcaaagttgaaccaacagagccttattggacagttgaagtttggctgccaagaaattggcttagccattgaaattccaaaaaaaaaaatgggactttaccgaaaccttccacattggcttggtaagagatctaaagtaacatctatgagtctgaaagtagaaatattgttccaccactagttaactttagtggagttcagtgtaaatgggagaaatatgaaccgaaaataaattagctcaacgcatcttgcaa

SEQ ID NO: 86772 - DNA, 1387 bp, Cannabis sativa
  modified_base (484)..(485): a, c, t, g, unknown or other
tataatttcgtaaaaatacaaaaaaaaaattgttttaaagtgtaaaaataaaaaacccctaaaaaaataggtaagtcatttcgctggctacgtcttttagatattaattaatatgtttttcttttaataaaaaactgaaatataaaaattattagagaattctacaatgtacccccaatttaaatagatagtacattgatatatccttatctgttttagtatccgaaataattttttagtcaattttttttcatggtcaatatagctatttaagacatcctggaaaatttaaaaaaaaaaattaacacgccaaaaatagagtttaaagagtgtattgcacgcgtgactaatttattttatacgcgtgtgaaatagattttttgagcactactttttatattgtaaagtattttgaatttttcaaagttttgtaggatatcttaaataattataacgtaaaaatatgaaaaaaaaattagactanntttttttttttttttgaataacgaaacaggtaagggtacatcaatacaccccttttaagagttcgcgcacatgtacaattacccgaaatcgtttagctttacaaagttatatattaagatttacttacaaaattttaattttcaactaataaaaaatatatacacgtactaatattattaatgatttgttaaaataaacaattaacataataattcttagtttcaataattaatatataaaaattaaataatataaagattttaaaatattaagagatcgatataactatatatataagttagaaaaattttataatacaccccttaaatagagtattgatgtactcttatctatttcaatatttaaaaaatacttagtataattttttttgtgatcgtatacattatagttatttaagatatctgacaaaattttgaaaaattcgaaaaaatttaacacgtcaaatataatatttaaagagtctgttgcacgcgtaacttttttattttataggcatgtgaaatagagacggtttaaacattaatttttatattgtaattattccgaatttttcaaaattttacatgatgtcttaaataactacgtatacacgactataaaaaaatttagactaaaaaatttttatagataccgaaacagttaggagttacattagtagtacatctattttaatgaggtgtattattgaaggaccttatataaattttaataatataatataaataaataatttaatacataagctttgccaatctttcttttcggaaattattaagcacttagacctcaattaaacttactttttttttgaaagaagtgttctttattaactcgagcaatcgctcgtaagaatagacatcaactccataggaacactatt

SEQ ID NO: 86773 - DNA, 1007 bp, Cannabis sativa
  modified_base (957)..(975): a, c, t, g, unknown or other
acatcagtgcgattagagtactgagtataggctggattcgcagttagtcatactttgtcaagatcgatcctgattcagttagggtggccccctaggatgttttgctcgtgagtcgcactggaggatagcaactaaactcgccgacacatacagatctaacctggcagtctcacctatattcgatcccacaagccctcaaggtgctacccacatattctctgacgggtcgcacctttgactctattagctcagcctcgaaggtgacattagggtcttggggagtctttgatttacgtgtcttggaagacataatttcaaaatccaagtcacctggttcaaaagcaattgtgaccttgggtaaaaatagaggcttagccaaaagaatagaagacacattgagaggttcaggtcaagcagcatcttgcaagaaacggcgtttgccttctataatttcttgcaagaagcatctgtgtcgactagcaatatcatcttgttgggttttcactaagtgttccctaatgtttgcatcatttattccaaattggatttgggttttggaattatgggtttgtatgggatggaaaattcaataggatactcaacttctaactcttctggacgataaacttctaaactagattgggacattgctgcaaggagaaagaaatctcaattcctggaagaaatttatcaaactagaagttggtaaattggagaatttcaaaaacctgtgttttgtctaaaccctaacatttacctagatacaatttgaccctaaaaattctaaaaccaaatgagataacaacgatgctcaccaagaagttggtaattaaatccagaaacacaacataacaagcatgtaaaaaaaataggagaaaagtcacttactatttggaatcggtttttgggacgatgtacggccctgcaatctacgtgttggatatttattttaccagnnnnnnnnnnnnnnnnnnnagtatgttgtttaacaccctacatatgaactt

SEQ ID NO: 86774 - DNA, 1152 bp, Cannabis sativa
gccatgaaaatcttaagttggaactctcgtggtttggggaacccgagtgctttccgtcatctcaaattgcttgtaaaagagcaatccccgtttgtcttatttctaatggaaattaagttaggtcctaattctatttcccgtttttcgtaatgttttacattttaataacggacttgaagtccctcgtgttggtcttagtggaggtctaatgttgctttggaaagatgatgtaaatttaactttattaaattataatacaaatatatttgactgctacatggcttgtggaaatggtctgtcttggcactttactgctttttatggtgcaccagccactcataatcgccacatcacttggacacttttagaaagattaaaggatgttgctccattgctaccatggctggtaattggagactttaatgaaatattgtccaatcaaaataagtctagaggggctcttcgtagcgaggcacaaatggacaaatttagacatgttcttgatcgttgtcaactaaatgagcagccctttgaaggtgatccattcacatggatcaaaggaagacttatagttgatacaatcaaggagagactcgactggtgttttgtcaacagaacatggtgtgatacttttcaacaagtccttactcaacaccttgattactatggttctcaccatagagtaatctcggtacaagtgttgcaccactctacaacacaccagcaacaccaaaggcaaacaagatttgggtttgagaagttgtggttacaagaggaggaagctacaaacatcattcagcaacactggcagcatgctaatgacgaaaatgctgctgtaatattcacagaaaacattaaaaactgtgctgattcgctccagctgtggcatcgatagaagtttggcaactttaaaaagaagatttctaaagtgcgaaaacaagtttcagacttgaacaatacaactgaccgaaaccttgctgtgatggatgatctgaagcttcaagaaaatgtcttggatgacttgctagctcaagaagagatgtattggcagtaacgtttgtgaattgactggctacagaacggggaccaaaatactaaatttttccatgcctatgcctcttcccgtatacaacataacaccattaaatcttt

SEQ ID NO: 86775 - DNA, 788 bp, Cannabis sativa
  modified_base (133)..(154): a, c, t, g, unknown or other
  modified_base (310)..(319): a, c, t, g, unknown or other
  modified_base (414)..(429): a, c, t, g, unknown or other
gatcaaccaatattaacacttaaaaagaataaacaataagtttataatatcttatccaagatcaatatcaatccaatccaaggtatactccatatattcaatgctggtatacttaaccaatgtcctggaaagnnnnnnnnnnnnnnnnnnnnnntaagtataccttatcaccgattatcatgtcagtcgaaatccagtgtactaacaaatcatgggacttaaactattgaatatataatcatgatcatattccactgtgctgacgacactataatcatgaacaaaaatatatatatatgttctggacttnnnnnnnnnnatacattaaatatataatcatgaattaaatcatgtgaaccatgttatataaaatgatttctgatattttgctaattagtaaatctgattatattnnnnnnnnnnnnnnnnagggcacaaaacccaacaataaccgctaacttttagggtaataaccctaaatctggtttttcccttaacatacacaaaataacatacataggtgccaccgcgctaatctgtatgtgctatttcactatctcacctagtaatccaagtatgtggagatttcaaatcccgagtcttcctaagcaagcattggtaatcctagtcacatgttcttgggattttacaaataggattaatcccaaatttaattttacacatatgcataatttgaattccattaatagattagcatataaagcctgaaacaagctttccaacgatatcaagaacgtcaaaaacgaagtttcgagtgaaaagttatg

SEQ ID NO: 86776 - DNA, 644 bp, Cannabis sativa
  modified_base (27)..(27): a, c, t, g, unknown or other
gatttgatttcctgaattaattgtcanaatattctgacaattaatgtggcgcagatactaatggagtatctcacctacaaattcagggtcttggtccccgagctcctcactcattctattcataacaccaaaattttatccaaagaaagttaagagagcgaggaagcccgaactccagtatcaaagctatcacagggattaaagcttaaagatcaatagctggaggtatttcgatctttcattgcatatacatttcaatatgtttatagtttattccttattacatatagttcatatatgttgtatttccatattatatattatagtctaacatttctcacatgttaaaatggttaatttattatttatatatgtgtaaaattttgaaattatttttttaatgaaaaagtaacaaattaatagcatattcacatcaaaaccaatttaatagttgcttttttcaaaattcccaaaaaataaaaatttttagagaatatttttccattttttttattttcaataattattttaagtttcagtatgtatattgacgtggcacatcggtatttatgcaaataattttctttaaatatttttataattaaaatcaatataatattaaaaaattcctattttataaaccc

SEQ ID NO: 86777 - DNA, 627 bp, Cannabis sativa
tgtgaaggtgatcttctacgggctctggataaggaaccatggcattttcaaaaccatcacattgttctcttacaaccaacaatgttgcaatgtttctcctgaaattatgactttttcacctttctgggtacaagcatatcatttgccttttatgagtaaaactaaatcccttgcaagatccttggctgctatcttgggtgaatttgtgacggttcatgaagattcgttaaatgaaggatggggactgttcctccgtttcagagttagactggatgttactaagccacttcttcgcggacggatgatttctctgcctaaagttaaagacgagttctgggtggaattttgatatgaacgtttacccaattactgtatggagtgtggaatcataggccacttgtatcaaaaatgccttgtgttcttagaaaaattggactctggtgttgaacctgaattggcgtatggtcctgcaatgcaaggtgcaagaattcccacatcatcttatgatcgatacaggactgatttctctaaaccaatgcttggccattaatcacaagacttgcccgtagatcctattagaaaaattaataataaacctaagatctatttgtatataacatagaacac

SEQ ID NO: 86778 - DNA, 996 bp, Cannabis sativa
gggtccaggttcggatcccgatctgggtctgggtttaggtccaggttcatgttcgggtcccgggtgcgggtctaggtctgggtctaggtcagggtctcgttccagatatacgttctgagttttgatcctggtctggatccgggttttggtccaggtcttagtcttggtctgggtacacgatgtgtcagggcccgacttcaggtcacggtttgtgtctgggcatatgttcgagttcggttctatggtgggtccacgtcctactcacggtcctagtcttgttcgagggtccctgtgttgcggttcttgttcaggttctagttttgggtcaggggtcgggtttgggtcatggtctgagtcccaaatctagttccggacaaagattggggttcggttctaggtctcagccccaattgtgtgtccctattttgcttccatgtttgggtctgagttcgggtgcaggttcggcatcgattctatgtttgggttgggatccaggtccgggtttcggttcggttctaggtctaggttgtagttcgggtcctagtccggttacggttccaagtctaggtccaggtctgattacgtttccaggtccaggtccacgtccaagtcctggtttctaacctcgttctgggtcccggtctacttccagtttcagttctaattttggctcacaaggtacgtgttcgggtcttggttgcgatttgggactgggttcaagtctgggtctagttttgggtcctggtctaggttcgagtttggggctgggccccaaatccaaacaccgactacggattctgtccaagccctaagtcgagatctggatcccgatctcgggtctcggtctggttccatttcgtatgtcgagtaacgagttgggtcctagaattaagtccgagtttgcgttcgggtcttgggtctcggtcctagttccgttgcccaagtccgtatctcgattctgggtccaggtcccgatttgggtcccattctatgttc

SEQ ID NO: 86779 - DNA, 843 bp, Cannabis sativa
ccaggtagaagctgtcaaaaaaaaacattaaggataccttgaagaagtgccttgaggaagcaaaaggcaactcgcctgaattgctctgagaggtcctatggtcgcatagaattaccgagaagaaggccactgggcaaactcaatttgctctagcttatggctacgaggaaatgttgcctgtagagctagtgccaccatctcacaagagaacaacttatgaccaacaaacaaaaagtccctgctggaaaagtcccttgacgaagtagaagaaagaagagatcaagcaaacctaaagctgcattcctaccaacaaaaggtagcaaggaacttcaacaagcaagtaaagaacctgaaattattcataggagacctagtgctctaaagattcctaaacaccaaagattcagcagcaggagtggttggacctagctagaaagggcgctatcaagttacaaagatagctagtaagggagcctacaagctaggaaggtaaaacaagaacacggagctcattctcctaccaagatattggagtggagagcaccttcgcaaatactatcagtaacaagcttacagttatctactccgatgtagcagctctgcctactcaacattaaagtacaaaagagctagtacctatggcctttttggcgtggtctcccaccgttcttcaacggtggcctccgctatgcaaggaaagcaggggtagccatttaacatctaaaagctaaatctatgtaatgtaaacttgtagattcaattaatgtaagttgcacaacaacaaagaccaattaatgattaaaaaacaatgtttatattttatttattatgtctaaaccactt

SEQ ID NO: 86780 - DNA, 973 bp, Cannabis sativa
tctttttaaatatttatacggttatatagtttcagttttcatttttaccattttgtttaaacacatatacggttattatttaaaattttacattaaatacgactttacttatgtcacttaacagcctaaacgtttccctccattctgtcaaatatcaatcacatctcctgccaagtatcactctctaacccactctctcgttattctcattttattttgaatttcttcttcttcatcattctcatcatcatcttcttcttttttttttctttttttttttctaattgttctttctttattttatctttgtttttgaataatggttgttactcaatctcgttcgagttcattgtccccttctcctaagaaacccaaaaataagcctattaaacaatttaaacccaaattagttgctcaaaaaattttgaaaccccctaatcagaaattcaaagttgttgttgatgttggtgagccatcatctggtgatgctaggaaagctaagaggaagagaaataataatgacaataatttctttgttgttcgtcctagaaaagtattttttttgttctgttattttctttttgttgttcattttttattaaaatgattttttatctatttgtattttgtttatttaattaatttttcgagtttatggttttttttcctttgttgatttgatgttgtgggtttcaatcttaattttttaaaattatttttgtatgttctatgttctttgtttatttgtttatttataattttgttcaaatttctttaatcctatgtgaagttttatatgtattttattttttttttgttgattttttatttgtatattgtctcgggatttttcatgttttaacttagagtttttttgtaatatgtttttttttccatgttttttgttcaatttttgttggaaattttctttttaggcttttttttatctagaatgtgattgttttcatataat

SEQ ID NO: 86781 - DNA, 700 bp, Cannabis sativa
acataaataaatatatttacatatatcagttttttaaaaaataattatacataaataaataaatcaatataaaaataaatatctaaatatatatatttagtttataaaaaagtatataaataataatttataccttgcgtcgttgccgtcgtcatcgtggtggtgtcttcctctcggatgtcgccatggtggccaggcgcgatggtgttcgcgggtttcgaggatcgagggttcgagggaggagggaggtggaggcaccgtgggattgacggaggagggacgggcaaggttcatgtggtggattttgggttggacggaggagggaggcgtgggttcgatggaggagagaggtggcggcgaggagagagctgaaatgaaatgggttagcttgcgagtggggaggcgtgggttttgggttggaaccatggctgaaaatgaaatgaaatggggttaggtttttgctgaaatgaaatagggtacttttgctgaaatgaaaaaaaaaatgggggtagtactattcccgacagttcaaaaccgtcgggtatagaggggtattattatttttttcttttttaattaccaaaaccgtcgcctatttttgttgctacagttcaaaaccgtcgagatactcatttttcccgacggttttaaacagttacttaatttttttagcgacggtccccgaaaaaaatcgttttca

SEQ ID NO: 86782 - DNA, 1235 bp, Cannabis sativa
  modified_base (439)..(444): a, c, t, g, unknown or other
cattccaaacaatttacacaattttatttctcccagccctaattttgtctttatacctattaattaatatatatatatttatatatatatagcatcccgagaaatggtatatatgtttatttatacggagcactagaatgatgtatatttttaattatttaaaactgattataaaataaaagatatataagtacaataaaatatttaaattttataatttttaacttgttaaatttataattttttaaatatttataaaatattttaaatgattataatatatgaattaacacttatcaaaaatcaaaataaaacaagaatatacaaaaattataatggttaaatcaaacaataacacaaattaaaaaataaatactagacaaacaaaatgagattcatcattcacgggaagaattgttattttttttttatttaagcnnnnnnatattacaatcatgtataatttgggactcgaacccaagacctccaaccaacacaaacgtactcttctattgccacttgagttagcctcaagtggttgaaagaattgtcatttagcgaagcattattcgatcatcatcaataatggagaaatactaaagagaatacaaaagttgagctcatcaacattggtatcttttacctcaacaatgatatcttacaccttacaaataaacttagagagtagtgatcaaacacacacatcctccttaacataacaactattcttactccttacaaatgtaattatcatctaaatctctagatcatcacctaaagaagtaatgcacaaaatcttatataggtaacttaataaattgaaataactaactgtggagctaattggacaaacttgcagatctataaggtcactccatgaaaatagcactagcagtacaccatctcatagacaatgtacattgtcttataaaaaataattaaaattaattaatattatttaaatgtccaaattaaacacaaaatgggtgcatcagtactaggggtgtttgcggtgcgagtggtgcggtttttaaccattttttcaaaccaacttgcacatgcggtttttctaatttttccaaactgcacccacaccgcgatactaaaaaaccgcaaaaaccgcaccgcaaaaaatgatgcgatgcggtacgatttctacggtttatgcggtttttgaactatcacaatttttttttttaaatcatcataaaataattaaactatcattaatataa

SEQ ID NO: 86783 - DNA, 803 bp, Cannabis sativa
aatcaaactaggatacggaagtgtgtgcttaacccgtttagccttagcagaatccaatatgcgggtgtagatcagagatggtaaatcaattgatacaccagtaccaagagcatataaaaagcgagcagtgttatagttgatggtagatgtatgcgaattagcccaccaattagataaagcaattttatgaagaactcgataaaattctgagaggatagtgacatgaaattccttaccactccacacaaactcaggttgaccagtaagttcagcaccaacatctttgaacaatggcttatactcatcagtgtaagaggggtgagctagcctagggatttttagaatgaggctaatggtagacggagcacacctaaaccaagacccacgaatatatgcttgatatttgtgaggacttttttcattgataatactttcatctagattagcataaaactcatggacaaggttcacattgggcgactgaaggtgagtgactgtgcgttcccattttctagactgaacaatctgactgaccctagcaaaatgcttcaacttaaccctatactctggccacagaggacgagaacaaacattttcttgaaaccgaagaagtttgtcatgggagtagaagggcaacccagtagagggttcagactcagagacaatatccttaccttttttggagtcagactctttagccccctgaacagtttttcgtttacgggacaatggacctaagggcttaggacagggagggggagactcagaggatgatacaagggacgttgacctaggaggttcag

SEQ ID NO: 86784 - DNA, 647 bp, Cannabis sativa
tgttaggtcccgggctcttatcagggtgcatttggaagactgcttttcgaacctcctcttctgaaactgcttgacaaagttccatattaacaacatctgacactgtagtagacacacaatcgaccacttctgcacaaacgctacccgaagatgtgaataaattgttgaaatagtcggctacaatagattgcaaacccgaatccgatgaaacccaatttccattagcatcgcgaagctcattcaactgattattcctctttctattactagcagccttatgaaaataattgctattttgatcaccctcccttaaccaaaactgtttagccctttgcttccaataactttctctttggtcaagagcttcataaagcttctttttaatctcggcatacctctgaactgaaatggagtcccgtaagccatggagtttcttcaaatcagccttgtgacgctttattcgttgattgagagaacctgttaattccttaccccaagtagatagtctctcggcacaaagcttgagtttatgagagatgctttcattttgttcttgagaccaaacatcacgcacaatttccaaatagaaaggctcttttaaccatgaattttcgaaccgaaatcgatgattaggagtaaaattatta

SEQ ID NO: 86785 - DNA, 1307 bp, Cannabis sativa
aaaaaaaaaaaaaaaaaatctggacggtagaagatgatgaaagcttgggaaaacgaaaagaattgtactaagaattcttttttttttttttgaaagggactaagaacattacttaatatataaagaagaatgcatcacgtgttgcatattattaattaatcctttttacacgttttatttatgtatttgttttgtaggaacatatatgtattatgaagtattggcttgaaaatgttgatcgtcaagatacattcagtgtgtttgctaagaaggcacaataaatggaagaatgaagaaagtaatatatttgatgaaaacaatgtgagagaaaaagaagaagaagaagaagagaagatgatttcttgtttataacttgaatactttacttgagaatattgagagagatgaaaaatattctttattgaatttttttaagttgaccaacatacctgaattcaaaattgaggtaaaattagtatgatgatatgcatgcttacatgtttagcgtacatattttatagtattctattagataacatattagtaagaacggtattagtgtacacagagctgcactgaataccgacggatacatattaagaaaattctaaagctattagttcaacatatcagtaagagcagtattgatgcacataaagcttcattggatactaatagatatatgataggctttgtcgtacaaactttccaaacttagtacgtgttggacacgggataagatcatgattaaatgtatgggtatctagttacgatctagttatatgtttatgtttatgtttttttacggagtctatcgactcacatatattgtttatatgtgtaggttaaggcaaggcaaggcaaggcaagtcaaatgatgaacaatagtgaattcgggctagacgaagattgtacatatcggggcagttagacctgaagtgtttagatcttcgggataattatgccttattttggtagtcgctagacgacaacttttgtagtacacatattttgtgaacagatataactttcaaatgggattccaaaatatgtatttgtataaatttattttaatttaaatttataaatgaaagttttaattattcatgtctttcaataaactttttgattaacaaaggagtacacaatgttagacatttatatgtataaactgaaacatatatgtatgtgtatataaaaagcggaattatacactatataacttaaggatcgaaatacctccagccattgattcttgagctttagtcccacataagctttgatctgcaaaggaaactggttgatgt

SEQ ID NO: 86786 - DNA, 779 bp, Cannabis sativa
taatataacaggtaatggtccccatttgcatcgtatcttttcactcttgtatccccatcaccaagagaaaaagtttcagagaaagattttgatgaaaattgaaagatcatacagcaattaaagatcgttaaaaaatcgattctatggactctagtacgcttccgctattccttaatcctattgtttaattctcatgaattaattagggctatataaagatttacagtattctaacaactccttgaaagcatcgcccccaaatccccatgattgatgaaatcccattcatgggggaggaaagccttgaaatgacgtaagcatgctgcaaaaaactctacaatgtactctgggccagtttttctagcctcgacaggcaacgtttcgagggcttggctcgaggaggtagaagcttgggtcgctttgggaagaggcttgtcggtacttgcagggatcggaggaggaatcgaattctgagtttcaatttcagggacctcaagattaacggtcagggaggctcgcttcttgttagcaatggacttcttatgccttttagggggttccacgtcaacgtctgatggagcctccgcgatgatcctcctcttctttccctttcagtgaacgagaccctcaaaattcatttctgtgagataagataaagtgttaaacatgtatagaaagacaaataaaagtggcgattggggcatagtttcctgcataaggaatttaccataatcactagaagatgaggaagtaagactataattgttggaaattatttt

SEQ ID NO: 86787 - DNA, 1338 bp, Cannabis sativa
gagagagagagagagagttaaaacgattagggtttttttttcctatttaatttatttgtgtattttaaaataaaattctcataagaagtttgatttttttaataaaaaaataagaaatctgataagaaaaaaagtttttatatttattttttattaattttaaatgagtttacttaaaaaaatttagatgatttttataatatataaataattaaatttggttagaccaataaaaatatgccagtgtagttaagtgtacacaaaaaaattctatttgacttttaatatttaaatttaacggatgatctatacttgcaaacaacactaaatataagggagtattgcgacgaagaaaaatatacttatgtgtatacaaattaaaacatatggagattttactgccaattaacttttaaatatttagataattacataaaatattattttcataaaaaactaacatttttacgttgaaatattttttcattatatttttacagtattctataaaaacaatacaaaataacaagaaaattatgtaaaagtaacagaaaaataacattcaaataatagcaaaaaataacatacaaataattaaaaaataacaacaaattaataagagtataacataaaaatacataaaaaaatcgtattttctttaaataaaattataaaaatcgtaaaaaatatttaaaatttcgtataattgtatttttgtaatttttttgttgttttgtatcatttttaaaattaccccttaaatattttatagagatgcaatttattttaatgtttgtgctataaataatattacagtctaaattgagaatgaaagaagagaaattatagtaaatggcccaaaattataggattatgttagtaaatgtcatcatttcaaaatttatggagaaatgacttttgtgttttgtcacataagaaaaaatttataattttttttttcatattttttcagaattaaaagcaaattacttaaagattatgattatttatattagttttgttaaaaaaaaactatttgaaagttatatcgatttatttaattttttatgaggggttattggtatataagtttttgttgtacaatatatttttattttgttgtatgatatattattattcttaaatgatatttttttttattttgctatgtataataatagtatagaatttaattagcataatataaatattttaacgtatgtatataattttaggaaaaagaacaggaaaattccaaaaaggaaaaaaaattacaaaattactatgggccggcccattcaacatttatacagtccagaatgaaaaaattacaaaaat

SEQ ID NO: 86788 - DNA, 2137 bp, Cannabis sativa
  modified_base (469)..(471): a, c, t, g, unknown or other
taatgaatcattgtttagtttttgtttttaggttagaggtattaatttgtgtaaatgcttatcctctccttgttctatcttattaagtaataccaaacaatctaacattcacacaacataagacaacaaacctttattaattcaataaatggggtaaaattatgcattttccctttaaatttttaagttaaaacccaagggcaaaaccacataaactttacatgggccataacccccctttataatatatatacaccattattttaaatatatacatatgcatatacatttgttgctacacaaaaattgaattctgtctttttcttttctctaaaatttttaccactatgaaatcttatgaagtggtccaatggggattagaattttcttttagtctagttctagtgctgtagggccatttggttttggtctaaaaaatttcatttatggtatttttttattttttttnnntttttttttaaaaaaaagatatctttctcataatagtaggatcatcattatttttatctttattaggctttcggtatatagagaaattataattcaaatttttataaaacaatgtatattataattacagtatttatcttgacagttcttaaaaaatttaaaaactttcgatgttgaaaataacatttaaataattaatgctataatttttttattattatttacaaaatatttatatcaagaacaaaattgatttccctattataatgttatcctatataattaagaaattcttcacgctttggctctcctaaaattaggagctggttaaaaccccataaaatgagcctattttcacaaaattcaaacacatacacacacaactaatgtgctttgtactgagaacttggagtgtgtaatctgaagtattaagctagtggattggattagagatttggagtagtctgaatcaagtaacttattaacttgttcttgtgtgtttgagatttcttgttgactttaagattccaataggcttctgaatagttacactatccctatgttttatagctacatgtatttatgttattatgaaaggaatatattcaaaatttattcctttacctttatttatttatttatttttggactcaaataatgaacactagtaggggtggtctaagtctgttcggactgtctcctatatgcaatcaacaaactttctacattttacagtttgctcatttattaagggaagcccacacctcccactaacatatctaactcaacccaactaaccctaataatcaaatatctcattcatttcctcttacttttaactttttaattttgatccaaaaataaaactaaaaaaaattacaaatgaacttaaaccccatatgtgcaaatcactagaaaattattactcattttataggctcagtcattaaatagcacagtacgcatacatccattgctacttgtccatattatatttagcaaattagcaaaatatacgatttcaagatctaagaaatgaaattaattatccctattcaagaaattattttatatactattttttttaatttctttttttttttttaaatttacgatttgaatttttaaagtaatttttttggtaatttctatgtgagttgtcatacgatttttagttgcgatttaaattgctccgctagttgcaataagagtttttatatagaattccgtaaaaatacaaaaaaattattttgaagtgtaaaaattaaaaaaccccctattttttttaatacttttaatagatataattttttttggttaaaaaaattaaatttttttttacaaagtattatttttagttaaaaaattatattttttacagtattatataaaattaacatggaaataataaaaaaattatataaaaataacagaaaattaataaaaaaaaatatagacataattttaaaagtgaaatttggcctgaagaatattaggggtgttcgcggtgcgggtggtgcgatttttggctattttttaaaaccaacccgcacatgcggtttttccaatttcccaaactacacttgcaccgcgaaactaaaaactcgaaccgcaaaaaatagtgcggtgtggtgcggtttttgtagtttatgcggtttggactatc

SEQ ID NO: 86789 - DNA, 1548 bp, Cannabis sativa
tgaaccattcgagcatcatctctagattttgtatgaaaccgtttaccattgacaatgtaagcttgatgcttccatacgtcaaaagttggtccaagagctatgcgattcaacacatctgatactccatgatttggttgtcgtaacttcgctagaatggtattctttaaccacctaataaatgttttacgatgctcatctataacccacttctgtttgtttttgtgacctctcggaatcattgactgtaataactccatatgctcactacccttcaccaaaataaattgaaaatcaaaaataatatatgtaaaaaaaattagttaattgaatggattatgaattcaattgatcaaccaaatgcataacttacgttatatatggttgaacctctgcattattgtgcattaaaactaattgagcttgatctaactctgccttagatacagtaaccatttctcctttccctcgcaatcctttatcaaactcatctgaactatttcttggtttggtgattccgattgtgtcaactccagccatgtactctgaacaaaattcaacagcttcttctgatatataacactcaaccatactagcttccggtcgatgatggttacgcacatagcttttgagcactttcatattcctttcaaatggatacatccatcttgcccaaactggcccacacaactttgcttctctcactaaatgaaccatcaaatgtaccatgatgtcaaagaatgatggtggaaaatacctttcaaggttgcataaagtcttgactatatcctcatgtaatgcatccaacttgctcatttctaattccttcccacatagttgattgaagaaaatacaaacatgagtcaaacactctctaacctttttgggtaagaccgatctgatggcgattggaagcaaatgttgcattaacgcatgacaatcgtgtgatttcatacccattagcttcaattcatccgtatttaccaagtttttaatgttagaagagtatccatcagggactttcatattcgataatgatttgcaaacaatttctttctctttctttgacaaagtgtaacatgcaggaggcaaatataagcgtttacctttctgttcaggtgccaaagattgtctaattcccatttcaacaagatctaaacgacttgataaaccatctttagttttgccgggaatatcaagtaaggtaccgatgatactgtcacacacatttttttctatatgcataacatctaaacaatgtcgaaccattagatctttccagtatggaagacgaaaaaaaattgactttcgttgaaaacaactatttgttttctttcttttttgtgtctttccatacttgaaatctacatgttctacttgttcaagaatttgttcccctgacattggcaaaggagcactatctcgttcttcagtaccatcatatgctttctttttccttctatcaggatgatctcgaggcaagtaccgtctatggcccatataacacattttgtgtccattcgtcaagcgacgtgctcgtgtgttagtgca

SEQ ID NO: 86790 - DNA, 866 bp, Cannabis sativa
agttcgctgacgcacgcaatattacagcgtcagaacgtgtcagtggctgccacgtgtcaattttggacaaagtgcacttgagcgtgttgggcttcttttctcaaagcaacaactaattagcaacgaaataacaacttgaaaacaaccaaaactaaattaaaaataattatatataaaaataaatgtacttaaacccaaatcaattcaaaaataatgatacataaaattaacggcacataaacttaaaaacaacttaaaaataattatgcataaaaataaagacacataaactcaaaattaacttagaaaaagtaactacaaaatacttatacgtaaactcaaaaaatatgtaccataaaaactaaaacatagactatataacaaaaaaaatatgtagtaataaataatttgataacaatcctactttaacataaatagataacaacttatattaagatgtaaattaattaggcatcaacaaatttcatcaactcaaaagaaactcaaaaataacacataaattatcttaaaaaaaaaaacctacaaaatattagtgcattaactcaaaaaaatatgtatctatgaaaaataaaatatatactcagttagtttttacctggttgaacaactaaataataacgcacaaacaattaaatagcaactttattttaatataaaaagttatttggcatcaacacactgtgttaacttgaaaaatataaaaataatcttaaaaaaaataataaaacaacattcttaatatgtatatatatatatgtgtccatgatatataataaactaaatatgtttagacattcatttttttaacacaactagataacaacaaaaaaaaaattatataataa

SEQ ID NO: 86791 - DNA, 698 bp, Cannabis sativa
ttttaaagggaggggtagaataattatattgcaatgttagattcttttgtcttttagtgttcttaggctgagatttcgttgataaaattaagtgtatatgttaagtattatattagtaaggatttataacatagaaaaattaggaaatgcccaaagttttctccttctctctcttccattcgaaaaacctagaggccagctgaaataaaaggagttcttcatcaatttcttcagattctagcatatttcactcccaagctcagcctagaagctttgaagtaagttcctttctatgttgtttgaggatttttcaagttttaagttagttttgggttagggttttaagatttcagggctgaggtgttaaattgaagttagaataagttttagggttttgatttaaagattttttaagcttaaattagttaggaatagggctgttagttttgtgttagagggattaaggttttataagctaaatttctactcaactttggcaattttcttgagttgatgaattgttgtgaattgacgagttgaatgcattgtttttatgttacgggactgttctggagcatttaatcaggtttggtggagctcaggatcagtttcggggtgtaaaaccacaattaccccaaatctaccaaaatcggtcgactagttttacaggtaattggcaaactggttggccagttggg

SEQ ID NO: 86792 - DNA, 598 bp, Cannabis sativa
gatggtcctacctggaatagagtcgttttagccaagtatatctgggctatctctgaaaagcatgatgtgctttaggttcgctggattcatgctacttatctgaggaaatgtgacttttgggatacccctatgaaactagactcaagctagtattggaagaagctttgtgcgttgaggcagtttctccaaaactcaaatccttgctgctggttgtaagggtaaattcaaaacttctttactctataatagcaccatagttcaacaccctgttttgtattcaggcacagtatggaatagagttaacttgcccaaacatagatttatgttatggcaagctttaaactctcatcttctcactagggatcttctcactcgatttaatattcccttggagacgcttctttgtgctgtttgtggtctctctaatgagagtcatgcccacctgttctttgagtgtgacttttcaaggaaagttacagatgctatcttctcttggctgggtttttctgcatggtctagagactttggaagttggactacttggttggctagcaagaagtccggtgttattgctgctctcattacagctacattgact

SEQ ID NO: 86793 - DNA, 1018 bp, Cannabis sativa
ctcaccacaatatttaatcttttgttgaacattgaactcagaattaaaattccaacaatctttaatcacttgatgacaaagaagttctcttagacaacaattctcaaaacgaaaattcttcttcataacaaaagaattattaaccactaaatcaagaaaaatggggcaatgatcagaagtggaaagctctaaatatacaatttagcaaaagaaaaaagacctaaccaattttgagtacgtagagcccgatccagtctaacctctatacaatgattagtacctcttccattttcccaagtaaaaggatgcccaataagcttgatatcctgtagctcacaatcactaacagcttgttgaaatctccgtaataaccaattcgggtaattattaccacctctcttatcctcttgagacaaaatattattcatatctcccatgatacaccaaggcaaatctaaatccaaagccaaacttctcatttgatcccatgtacagcgacgttggccacggttaggttcaccataaagcccactaaagcgccacttctcctttccctccacagtaatttccatatcaatatgagaatgacaaaaacccaacaatcggtcttcctcctcatttttccatagaaaatccaacccccaactcttaccttaaggttcaatagtaatgataccatgaaaatcctacaagaacctcactttttctaatttatcttttttactaatagtttgggtctcttttagataacaaaatcctttaagaattgtaaagtccatgggttctcaagcccatggcaattccaacttaaaaaactcataatcctcggtgggcctggaaaccaacacccaccttgttcaagttttttggcccattaaagaataaaaaatagtttttttatttaaaatagttttttattgcagtttttattaaaaaaaaaactattttctatttttttttcccctccctggttgccatagggtggccattttattctgcatcgcctgaaaatcaaccg

SEQ ID NO: 86794 - DNA, 502 bp, Cannabis sativa
aaataatatcataaaaatacaaaattgactaaaattaaaatctatcaattttttaacattttatatctcataattaatcatataaaataaacttagatttttctaagtaacctaagtatttaacctaattaatttaaaacaaataattcaaaaaaatctcaaataattgcaagaaaattatgaaactttaccaaacaccctaaaataatatgtagaatcaaaatctacaaaaaaaagttggaaaaaacacatcagaactacccagatcgtggtcgccgatgttcacgtcagttttgtcgccgacaaagtgtaaatttgtccccgattgctcttgacgcgtcctttagattgggaaagctttccacagtgcttagcacctccaaaacgatcaagaactatccaacataacagctccaatgcgtcagatcggagtcatcttctccaattccggtgtaccatcaataatggagccaaaaatggcaattttcgtatggggccttaa

SEQ ID NO: 86795 - DNA, 943 bp, Cannabis sativa
ttaatttctcacgtctacaaaaaactctactttagtgataatttttttttgactaaatatcacttttagtcacaacaaaactaatacaaaaattacttctcactaaaaattagtatatttagatacaaattattaataatttaattttattcacaacaagtgttgtggctaaaaatacatttaataacaataaattatgatttttggactaatatacttttagtcagtgactttagtgatagcatgaaatagtgatttatgtttcatcacaatttttttacttttaaacataaattttgttgtaactaaaaataaaaaattttatcgtatcttatgatcgatggtgtatttgagattttataatataaatcttttattttgatagatacatataattaggaggttaaaattttattttatcccctcatttttttattatttttttcttttaaataaaaaaataaatctctcaattatttttgactcttaattattagacctctcctcgtgcatagtttaagctaaatttagctaaaaaaaaaatagcctagattttacaatagtactcatgtatacttgtttaggcaagtaactgtactttttaaattatagtactaacatttgctaattaagggatttaatatcaaatcatgtttatttaaaactttaataaataaatattttcataaataaacatcataaatgtaaactgtttacaaaactcgggatctcacaatctattttttaaaagtaaacatagcaaaagtatcgtccagggactaataaatacgagcccatattgtcctgaagatccgagcactctaggtctaataacatgcttcttgccaggtttttctcataacatactaataaaacaaactactaaagcaataaatgcttactaaattgtgagtcaattttatctctaatgatgattgtacat

SEQ ID NO: 86796 - DNA, 649 bp, Cannabis sativa
tccaatttggatttgggttttgaagttttagggtcgtacagggtggcaagttcagtgggatactctattctagacgataaacttctgaaccagattgggacattgctgcaagaagaaagcaatcctaattcttggaaggaatttatcaaatcagaagttggtaaattggagaacctcgaaaacctatattctgtctaaaccctacgattatttagacaaaattcagccctaaaaattgctaaaaccaaatgagatgacaacgatattgaccaataaattggtaattaaatccagaaatacaacataacaaacttgtaagaaaataaggagaaaagccacttactattcgaggttgctttttgggatgatgaacgactctacaatctgtgaatcaacgaacggagtgaagatccctccgaatgcttgaaggcaaaaattaaataagatgaaaatcgtagaaaaaatattaatgacagagatggcatgcaaactttcaagcaaatctggtaatgatttttcgacggagaagttggaaaaattctcagggtttctaaaatggccaaggtaaagcaaagatggttcctttttccattttatactcttgggttaatctctgttagatcacggagataattgatcctacgggtag

SEQ ID NO: 86797 - DNA, 613 bp, Cannabis sativa
aaaactactataaattgaagagatcaacagtagcatttgtagaacaagacaccaaacataactatcgcaacatacagtactcatgatcatagatgtcgtttcccctaattggccacgaggaccatagaacaaagctgaagaatttcacttctattaaaaaaaaattcctgaccaaccaacaaagggccaagaagacagcaaaagaattcgaagtaggtgacctgaccttacgacaataacaaagccacaagaagatgagacacagaaatttgagaaatagaaaaatgttcgaagaaaacccgattcgaaagagtgaaacccaattcaaggaaacgaaaatccattaattaaacacatacaagaccggaaaaatgcacgaagttgcagtaaaatctgagagcagcaccaaccagttcaagatcttttttcttgagcgagagaaaaggagactttgggtcactttctctattcctattcctcttttagtttaatttattttggttaacatataattatttatcttcaaaataaatgaaattaaatattttgaatttttttctttttattttctctagaacgaaaaatattctgacattttttttttttttttttt

SEQ ID NO: 86798 - DNA, 860 bp, Cannabis sativa
catgggtataggagactcgtgtttctcctttcctctttctaactcgacaaaagaattctcaattcttgtaagtggttcggccatagcaaagaattccaccaacgactccgatcgttgcgcttgcagttcattccaaaagtcaattattggtaaaacacttgtaatcaacatacaaactagcaaagactcaggggccttctcgaccttggtttttctcagcattaaaacatttaaaataatcctgtaaagactaactaacttcctgtttaatattttccagcattgtgtacgacggtttgtacgtcatcgtggcttagaaatgcgttaagaacaagtctacaaaggtttcccaggttggtatcgaagcctcaggtaattggctaaaccaatcatgatcattatcttctaaagttgtggcgagtatccaacactttgctagttgtggtacctggtctacttctataatcgtgttaaatttatctaaataatcaattgggttcgtagtacttttgtatttgagcaacttggatagcctaaagccttttggttctttgttgcatttggtttgtcatgggacgggtgaattaattttacattgtttagtttcctgtgattttgtgcaaaattgttggcgggtagcgggttcgactgtggttccaattgatgcagtgtcatttggggactagttttttcacttgttctcacaggtgggtgaggaacaatgtgctcaggctgtgatgctggtgtgggcaatttggtttgcacggaatcaactcttgtgggaaggtaagaaaagttgagtggatttcgttgttaatttggctcgtaccactcttgatcagtagaagaaagctcaagaa

SEQ ID NO: 86799 - DNA, 940 bp, Cannabis sativa
ccttcatggtatatttaatttgcactatagtatatatttattacgtgttaagatatattaacaaacaagaaattaaaaataaactcttaatataatattagattaagtttgaagtatattcatattgttctaaggtatattatttttatgggatgtcgtatatactaacaatttaattttattaaatatttaaaattactacaattgttttgtttgttaggaacaaacaataattgtggatcaacaaaagcataggaaaatgtaaattgcaggtataaaaatgaatatttgggtcaaaaagtatatgatgatttaagtttggtatatttatgttgcactatggtatatatttattgtgtgataagatatattaagaaatgagtaaaaaaaataatcaatggtggtatatcattttaaatttggtatatatttattgtgtgctaaggtatattctttttttaccatagaaaattgatcgtatattaattttttactatggtatatatgtttaggtttgtggtacatggattttgtatgctatggtttatatatattctatattactttcagtaattaatgaaatataaagttatatacaaatatttaacaaactgactaattcttttttttatgaacaaatattaaatcctaaaggataacaactatcaatttctaaaaaacaacaatcacaagaaaatgtggctgttgaaaaataggcataacgttgtttcttatgtctaacattttctaaatatgtttaggtctacgatatttttcttcaacgaactaaatttatttcttcatcttattttttcattttttttacagaaaaaaaagtgaaagggatatactcaagaacatgggtacaaaaaggcaagaaaaaagaggacaaccaacaggcaggtcccttgaagagaaagaagaagaattaggatatgat

SEQ ID NO: 86800 - DNA, 723 bp, Cannabis sativa
gccctttctcttcatcatacccattcatcccatccgttagatcgtggaatctaaaccgttgtgaaccctcactacacaatggtatttgatcgacactgcctcacaccctaaatgttctataaaaaccaacactttccccaactaggtcatttgtactaccctttagtttctaaattttcaaacccactcgacaaaattcaagacgcccctgattttcttctgctctttctctgccattgtcaggcaaagtattaccaccaccagacgtcatcgacctctgccttgctgcctttgtgtaagctttcttatttatacatttgtttcatctgttagggaaagtagtgataatgtgtttttatctgatttgcttggtttcctcgaagttgttgttggtgtgacgccccctttgacgggtgtccgatgacttgtgtcttttgtcatcatacattttattttatctactgctttcattgtgtatgcatttttttttgagaaagttgaaaatggggggtttttcatacgcccttttttgatggctcgaagcggttttcgtactctcatatttcctttcctttgttgcttggatgttttgcactcgatgtctgcctttgtgaattgttggatttcttttggcagacatccggaggggacctctttccagtggttaggggacccccattccccttttttaattttagggtttgatgtgggggctaactactg

SEQ ID NO: 86801 - DNA, 520 bp, Cannabis sativa
ttagctattgtttatttctcaaactcatccacaaaccctaacttctctctctgctgccactccagttcccactcccccacttttctacctccatgagtttctctttctttttcatttattttatatatggtttggttttaaattttagaaatgtagcaccaagcttagattcttatgagtgttctctgaccaggatttgaatgggaaattcaagatatgtttttcgtaccttctatgattgacatttttatttttaattagagttttgagaatatatcacttcatgtgaaactcactgtttggtgtttctttaatcagtttcgagaatgtttatatataatatacttttctattgtaataattaatgcctatttccatgtgaaactcttaatattatcgagctacttttttctgtgttgcgattgttcatgaaaagtttatcttctatcttgaatgagtgcaaaactagagccaagttggtgtatgtaaacacatttggataacaatcctttctcagctc

SEQ ID NO: 86802 - DNA, 524 bp, Cannabis sativa
taaaagtgatgttggtgtgtttattaaatattccacaaatagtagagcctattgtgtttacaacatgagaactcatactattatggaatcagctaatatggttgttggtgattttaaaattttttagaattttccataaaaattgagatagatagttttctagatactccacaagaagcagcaaatgtacattcttatgcggcagacttaaattttgaagaagcaaatgtcgaagctgcagctacaactgaagtaggtgaactagaatagcctgtctcacttcatccaaacatcattactgattctatttaggaggaacccaacaccagagtaaactaaatcatccaaaagatctcatccttagaaatcttgaagtaatcatggtaacaagaaaaaagtatgttaatttgattagttttcttttttttctctcacattttgaaccataaaatgtgaaggaagccatgacttttgaagaatggcttaatgcaatgcaagaagaacttaatcaatttgttcgcaac

SEQ ID NO: 86803 - DNA, 513 bp, Cannabis sativa
aaaacaagaaccaaagaaagatgatttggctgagtttcagaagttatggattgctcatcagaatgctcaaatggttccacttcagcattattatgtcagaagtgtagacgaagatcccaatgcttgtgttatctgctgagttttgtagatttaatattttttattcattttaaaaaagaagaggcattttaatttttactagctgttgtgatctttcaattcggtactcatctatttgttccataacaacatcaatctctattatgctcgccttgtcgaaccggcacaacaactagcataagcggtgcttgatgatgtactgaaaaggttttctgtgttagaaaggccttgggtcaagggtgtatggaagagcattgttagagcatctgggttgtagactccagtggtctttacacatatgcaaaaataaacaaaaaaaacctctaagtccgaccaaaaaaaaacgatcgaagccaaacaaaaaggagccactaaaatccaaaaaaaaaaaaa

SEQ ID NO: 86804 - DNA, 660 bp, Cannabis sativa
tatcatctacatagagtaataagaacatagtcgtagattgctccagattcttaaaatataagtagtgattgtatgtggatcgtttgaacctaatttgatgaatatacgtatcaaaactcttattccattgccttagggaaaattttaaaccatacaaagatctattaagcttgcacactaattaaactcctttaccttccacccaaaaaccctggtggttgcttgatatagatctccaggaacccattcaaaaaattagtcttgacatctagttgttcaacttcaaactctagatgtcctaccaaggaaaacatcaaccttatagttttgtattttaccacaagtgagaagattccagtatagtctataccttccacttgagtaaaacctttagccactaacttggctttgaacctcacgggttcattctcattgattccctctttcgccatgagaatccatttgcactccacaatcttcttgttctctagctttggtagaaaaacccaagtcttattcttctggagtgaatccatctcctcatccatggccttaagccattcaaacttgtttccacctgaaattgcatcgtcataggttccgagctcttcaattttagtctattcaactactcagtgcaaatactattatgtctgcttt

SEQ ID NO: 86805 - DNA, 1629 bp, Cannabis sativa
ttcaactaatggtgctgaaattgttgctttagaaatctcattttttattttcttgataaccacttgattatgtggctttttgtgactttttgtatagtcatgttcaagaaaagtagtattttttgacacaaatactttattgtctttatgactatagaaatagacacctaaagttttatctgaatatcctacaaatatacacacttgagtcttaggagcaagattctcagacttgggattaagaacatgagcatgacaaccccaaatacggaaatgtttcaaaatgagttttgtcccattccataattccattagagtattgcttatgttcttagagggtactacattcaaaatgaaggtagtcgctaaaagtgtgtatccccaaaagtttaatggcagtgatgagtaacacattattaatttgatcatgtctaacaaggtctggtttttttctctcggcaacaccattctgttgaggtgttccaggtgctgtaagttgagacaagatcctttcttccaaaaaatagtctttgaattcgaatccaaatactcgccaccacaatctgattaaagtgtctttaataatttacatatatgattttcagccatagccttgaattctttgagcgttccaaaagtttaagacttcttggccatcgggtaagtatgaccgtatgtagaataatcgtcaacaaaagtgacgaagtattcataatcaactcgagcttgaatattaataggtctgtacacatcagtgtgtattaactcaagttgttctttggctctattgccttttgcagaaaaaggtctttttgtcatcttgccttctaagcaagattcacatttcggaagagttccaacttttagttctctcaaagaaccatcctttgttaacatatttatcatgtctaggcatatatggcctaaacgtagatgccatagatacatttcatcatcatcagaaatcttttgccttttatttgattgagacaatgctactctacaattcattatttaaaattaattgctcacttggcttgagcacataaagtttgttactatcttttgcagaataaataggcgtaccattcttaaaaataataatctcattattaataaaattaaaattaaaaaattattcatgaaaaagagagaaagaaataatattctcggtacattcaggaataaaataaacattgttcaataacaaaaatttattattaaattttaagtggattttgccaacacctttggcagacacttgtgctccattccccacatgcatagtcccatcgacaagctcccttgacgattcaagtatctgcatagaagaacaaatgtgattaatggctccagaatcaacaatccataaggatttatcatcctccactgagttagcttcaagaacaaataaatcatatttacctttcttaagcttggagagatacttttacagtttctcttccagtgtcccattacaccataatggaaacacttgcctttagccttcttatccttggacttgggattggcttagttcttcttggccttgggtgacttcttgcctttgggctttccaccgttgttgtccttactgttccactcccttttcttatcagaagaagaagg

SEQ ID NO: 86806 - DNA, 582 bp, Cannabis sativa
tttcatgacaactctccacacattcattttgttctttgttgttaatgtagttctccacagattcatgtccttctttgctgttacaagcttcagataaattggaaacttccatctccaaatttcgaatcttccttagcagtccaggaatgacaaccaaggctcgttcacacatgggtgggtcataccacatccaaaaattacacccttgttcttgctgccacaaccaaaaaaaaattctgaccagaagaaaaaaaaaagaagaaagaaaacaaaaattagggcaaataattaaggcaacaggatctcacctgatggaatgggcatctaacgaaccttcgcccaggattcttattcgtccaagatgttttcatctctgcaaccctagggggatcacatcggcagaggtgaggccccgtcgacatattcagtagctttgttcttccccttcgacaatggaggatgaaaccaggtaagagtaccccaacccttcgaactttatggaccttaatcttcttctttgatttcgacccccttccctcgattttctttgatttaaaatgggtgtgacatctgggtttgggg

SEQ ID NO: 86807 - DNA, 634 bp, Cannabis sativa
gtgactatctactcaagatcaaacaattagtggatcttcttgcttcaattggacaccagatatcacctgcagaaaacatagaagctatattcaatggtttaacagtgagtataatgttttcattacatcgatcaataccagatctgaagcatactctgtagctgagattgaggctctcttgatggctcaagaagttcgactggaaaaagccactcaagatttggatataagcaaactagaagcgaatctggctcttactaagccctatactggtggacgtggtaccttttcttccccttattatccttaacctactcaatctaatgtctcaccattgtccagaggctctactttcaattctggacaatactcgatgcaacatcctccaccaggtttcggtcctgcaactcaaggccgtggtaattcagttaggcgtggcaatccctcaacttctcgaggtggtcatactcacggtcgaggatagtacactgcaaggggacagaaagtgcaatgccaactttgccacaagttgggacacactgttaaacagtgtttttacaggtttgataaatccttccaaggccctgaatcttttaatacctttactggtagtgctaaccttgcagaagctcaa

SEQ ID NO: 86808 - DNA, 633 bp, Cannabis sativa
gacagccaacctgacagttgaggcgaaggagctgcgtgactttagggagcaagctcaaaagaaagcaaaaagagatgagctcctggcccccgttacctgccagcactgcaacaaacgttttgacgacggtgtcttcatggcctgacagactaacagtaagaaccttaagcttgacttctatcccaagactgaggaggtcctcgtccgcttctgggagaagaagaagagacttgatgccttgatggaggagcgcaggggtcttcgtcttctgcctcggattgattaaactggttttttcactaccactaccactatcattattattatttttctttttctccttacatatttaatccttctcccctctttaagacaatttacttgtatacatacatatatatatattttaaggggagacacttaaggcccgtccttaggcccttatcttttttttaaggggagacacttaaggcccgtccccagcgcttcttgtaataaagtcttgtttgctgctggatcgtaagttgtcctcctatgggatgagaataatgtttccattgggaccattgcttcacaatcgtatgccattgagaacggcgagtggccggttgtggttcttggggtggtccggta

SEQ ID NO: 86809 - DNA, 538 bp, Cannabis sativa
gttgacatctgacgtcaaactagacgtggcataagtttgaaaatgtccaagaggagtcctttgagattcctaagtgatgattttacaccccttagtccttttatatgttttggtgaagttggtctcttattctcgaagatgttgttttgcaaaaaatggaaaactcgaaacttctgactttcggatgagccaaaattgaatttacaaatttagttgatatgacttcatggatcattagaattgtgaaaaaaactagtcaaataacgtagacgacattagattcagataagcagaacccagcgaacaaggacaaatgttgacctaagtgctagggccttttaacttgagcttcaagattctatttttatactttcaaggcttccaagacttttaaacttgaggacaaggtttcttcccccatttttgaccatgtcggattcaatggtttaatctgatttggcattccagcatttgaaggtagcgtccaaggttgattgtcaacttgggcagtgggcctagtcccaggtatcaacctggg

SEQ ID NO: 86810 - DNA, 748 bp, Cannabis sativa
acttgttagggaagaagaggttgcagaaattgaggcgttggaactgacggatgaagaggatgcgagggcggaggagactgcgattcatgatcgctctaacccgattttatcgcctaaatcttctctggaaagcattcagaagcaggaggaggttcggaatgactttgtgcacttcctacgagccaatgatcaatgtaacagtgatgtggcacaaggtaaatctccaattcccccaactttgcgatctgactctgttatgaggaatcttgaaaattcctttaggaattctggtgataacagcagtagagttagaatcacctttgaggatattgaagaggaagtctctttctggacaccgtctattgtttgttatgtattgggggctaatcctccattacatgttcttgaaggttttgttaatagaatatggaaagataaaatagataaagtgaaactattagcatatggagtcttcatcatccgatttagctctatagaatatagagatcagattttgaatggagggtatattttcttcaataggaggcctgtgataatgaagccttggaacccccatgaaaactttaagaaagaaaatgtgaagtgtgtgcccatatggattcaattagaggagttggaattgaaatattggggtcatggaacactgtctaaagtcaggttgggaagttggttatgcttgactcaattactagggagaaagagaggttgagctatgcaagagttatgg

SEQ ID NO: 86811 - DNA, 1661 bp, Cannabis sativa
ccagtacctctgttgaaccgatgcaagttgtgacaactaaagagggtaataccacttttgtttctaaatagaaagtcacagtaccttgtagtagtaggagggtttgaaggaactcacctaaatatgtcttggagacactagtacttgtggtatagctagtcatttatgtagatgatatctttgttgggttttgtgccctaactaaaactctatttcaatgtaatcttcaataatcatttatcaatgaagaaaacataatttttttattacttgtttaatatattgcttggttcacatgtttgtttcatgatcatttgtttaatttatatattcatctaaatccttatcacattgttattcatgattactgtgttttctatacagtggaaatgaatcaagattacgtgttgtgatcattgcaacacgcaagtacacgtatcgtttgaacaagtattactcacaaagagtgaggtcgatcccacgaggattgtagttaagtacgttaaaattaaaaattcaacctctttctctctctctctctctcttggttcggctcccacacaaccagaaagtaacctagccaactcttaattcctttgaatttcagcaagggttcatcaagattggaggttgttcaagctaaggtacaccctagaacattatctttgtgttatttaagcttttagttgagtttagcttatcattttgagatatagtggttgtttaggttaggttttattctagggtgtttccagagattgttctataattgaattgattatttgttgttggttttgctggtttgtttgtggttttggcaagtttgagcttttgagctcatacttggctcattaatggtgaaagtggattcaggggttgtatgttgtttttactgcttggaatttaatgtttgggattgttacatgtgttcaggaaggtttggtaaagtttggatatgaattggacaagatttttaatttgtttgggttacctagtgcaaaccggttaaccgaatcagaaacaagtttcccgattttttttttgtcgattcgtgttattttcagagccttggttggttaaatccttgttagttagggtactatggtattagtagttaaccactgaacccttagttaggggtttgagtttctcaaattcgggtttggcaggctatttacccggttatgtgaatgtggcttatggcatctatccagcgcgaggtattccgttcaggtcgacaaactcaattgaattcggaaatgacgtaagaatagcgtagaacatatgatatatatgtgaatgtttgtatgtgtgatatatatatgcatgcttgttgtgattcgtacactaccaaccctggtagggtagcggtacagagtttattggtaaagtgtaagatgtctgaagagtacattacggttttacgaccactagtacaagtaggtagaaggtgtatgtggtacaacacttaacaatactcaaggtgcgattcataccctacctacactagtacgatggtggtattgagtgcatgtggtacattggtccatggtcgtatcttagttgagtacgtttttactcatctattaagccttgtaaataggtgtatgggtgcctagatacatgtcgatattatatgatttgttatatgcttttcttac

SEQ ID NO: 86812 - DNA, 1257 bp, Cannabis sativa
ttaccatggcagtcgtgagccacacaaccccacccaaacctgccttcaaccatctcaaaccagacaaccataaaacatctcaaactagaaagtttactctctcaaaccagaaaacttagactctcaaactttaaaaaaaaggcaaaaaccagaacaatctcaaaccaataaacaagaaccaatctcaaactataaaacaatcacaccatgtcacaaaagacaagacttgcggtaactgaatcggaagacaaaagacaaaagacaaaagacaaaagacaaaaaaaatttctagaataaactaataacagtaatctataagaaaaggatatagctagggctggatagagtttcttgtccctctaaagtatgtaaggataaccaatagtttgcatccacatattataattattcactctgacgtctttcgatgcttttcaaagcacaccaatttaagaatagtaaatttcctttcctagtctgtggtgactaataccgtacaagatatgttgaaattcaaataactaggtctttctaataatggtttttagtcccaaaataagaaaaaccctaagtgaagacgaacagaggtccatccctcatcgaatcccaaggcggccagcccagtgcgcacgtggtctctgttcatcgtctttcgcctctcacgctggcacttctccgaggcctacctagtcgcaaaactcacgaactccgacacgcaaccctctttgttagtgatgtcattagttagttacaactgtatatagtttgttataatctgttagttcattttccctgtatatattctgttagttagttatgttaactaacttatcctttgtatatatactgagctaacagctcatattaatcaatacacaagattcaattcattcatctcttgttttctctctctgtatctaacatggtatcagagtagatttctttgtcgcttccgcctcttcaatttttcgttttcttgagtgttgttcacaatgacgacttcctctgcttcaactccggccatgtctggttctccagcagcctctggtacttcgtttcatccagtggttttctctcatacgctttctgttaagctcgacaacaacaactatctcctttggcgccctcaaattctctctgcaatttgtggtcatcaactatcagatttcatctccgattctgtcgttccaccggagaaatatctttcggatgctgatcgtcgcgatcgtcgtctcaatccattatacattcaatggg

SEQ ID NO: 86813 - DNA, 512 bp, Cannabis sativa
aaccttccacatttgtgacaaaaatcaggtagtgactcatatttgaaatcaacccataaactatcattcatgttgatgaatttgaggaaggttccacggaggaggggttgggtagcatccatatcaactctgacgcgcataaaagggccccaaccctccattaaagattcatcatcaacctccagaaattcacccatatcagacccaattttatcaaccaagactttgcttttgcttagaaatgggagaccatgaacctgaacccaaagggaaatgtgagtaaagttggattcaataggaattgtaaaattagaaatagcaacaaaaataatgggctgattattgaaatgccaaggttgatgataaagagtcctctgtgtatcgccagcacagccaaattgaaccagaaaatagccccttcgatttgttatggtgacttcaaaacgtttggaccagagatcagacatttgaagaatgaaggcacctgtgttgatttttttgtgggttagaac

SEQ ID NO: 86814 - DNA, 780 bp, Cannabis sativa
  modified_base (490)..(497): a, c, t, g, unknown or other
actttttaaaccattcctccgcggcaccgctcaatgttagtagaaagcataaacatttggcgtcattactgaccctcataactgtcattactcagttgaattgagacaaatgatcgctggggtctgagtccctggtgtaagcttccatctcgggcatcttaaaatttttggggagctccgcctccaaaatgcgccgggcgcatggctcccggtcctcacagacgaagtctgagtcatcccttttttgtctttgggagacccgagcgatgtctttcgcagtgtcgccaactctgccaaaattccttcgttcagcgttcctgcggagaccgttggtatatgtttctttttgtccaggtgattccgcaagtcactgtgcttttcgttgatttggtgtcttaaatcaatcagagggtatcttcagttccctcttcctctttccccgggttcctgatgcacagaaacgctctttcggtcctctcgatcctgaggnnnnnnnntccctttttggagtttgcccctttgcggacctttccctttcgggaaatctgagcaaacctttcacggatcctgcacctttttctttctccctgggatggaagtggcatttttccgttgattttcttcagagggataccgtataggacttggttccctagacttgtgtttctgagtgcttgtagaggactcttccagtgtttcctcgaatcctgctgggatggccttagggtgtatgtgaatccctgctgtctccatggctttctgcatggcgaccatcacctc

SEQ ID NO: 86815 - DNA, 519 bp, Cannabis sativa
ggtttcaacttgccacccatggatcttccaccattccccactcctcgtggtgttggatcgtcatcgcatcctcccaagactcagtgaaacaacaacaatgacattactcgcatatagatcgttagatattttatataccaattagaattatactttttttttccgaacatcttttaatgttttgtttatatactaattttagtacaacattaatatttgcttatcttttaatgtaaattatttttgttttttttaatataaaatacaataaaatataattaattataattaatttatttttttttaaaaaaaagttatgcgacggcaaaacttaacacaaaaaaggttcgcgccttttctcagattggcgtgaacaattttgttggtgcaataatgcgccggtaaaactattggtgccaatctgggaaaaaaatgcaaactttttatcaacgcattactgcaccggcaaaacaatatcaaagtaggttaagagcagataagggtattcgtttacaccag

SEQ ID NO: 86816 - DNA, 1280 bp, Cannabis sativa
aagatccagcgatgaatacttccctgactataaatggtcagccgccaaatccctggtcacaagtttcgcttgggggcctagcggtaggcgggtagaccttatcgagtaattcatcaggagaggtcatacctgatagttccaaccatgttaacggtgccattccacctgtcaaccaagaaaatcaatcgctgaggcagacatgcgcttccgtattcgataggttggggacaactcatgacttaagaagaaatctgaacataaggagaggagtcgacgatcagaatgtcacgacgatcgtacagcccggagcccgtgctcaaatttcgactcataaagatactgatgtgattcaaatcgaccaaaataccaagcatgtaagtccaggtgtgcaggcacaggtagacgagctgaaaaatatgttccaaggcatggccggacagagaaataatgatctcgagctggaccgagcacgtggaactcccttctcccctgaaatcaatcttttggcgttgccccacaagtttaaaatgccaacatggaaaatgtacacgggaagagaagatcctctttcccacctcaagtatttcgaaatgcaaatggatttgcagggggtacgaggggatgtgtgttgcagaatctcctgctaccctttcggaagccgctcagcaatggtatttcaaattggcccctggaaagttcaactcattgaaaaccttctctttggaattctatgcacagttctcctcctctcgccaactttcattgcatctgggagatctagtcgaagtcaagcaaagaccaagcgagcgtctccgggcatacattagcagattcatgacagaggcgaccaaagtttcacgggtaactgaagatggaaagttctccgcgatactggggggcattgaagtcctcggtgaactttgaaggacataaggaagaacgacccggtagactcaatgagtgactttctttaccgtgctgaaggcttcatcaagctcgaagaagctattcaacgagtggaaggtgagagaaagcctagcaagtcaaaggctccttccactggaacgtctgcccaactcccccattaccgaaataactcaagctcaaatggtaaacgttccaacaacaacaacaggcaagggaatgggaagaagggaaggttcgtcggcaaatctgagcaagctccccgggagaatcaagcaaagtacaatgcatttaccatcttgactgaagacacagaaagtgtttacatggctactcaatcgctggccccatataag

SEQ ID NO: 86817 - DNA, 555 bp, Cannabis sativa
tttttttttttataaataatttgaaatatgatcttttgatataaaattagatttttttttctctattttaatatatttaaattaaatattaattttatgtaactaaaaattaaattgataagctaaataaatgtacatatttacattactttacataaatatattacacaaatgttctaaaattactctaattgtttaatagttatttaaatatagaaaaaaaaaaatattcttatacatgttctactactaaatcatcgcaatcaattttattaactattcttgctggtaacaaatctttttttttgcgtcacatcaaaataagtgtcctaaactgtaaaaagaaaatataaatatttttattagtatatgtattagattcttcgttaataaaataaataaattaataattacaacttacttttttctctctatgaatctactagtattgcagagttgacgatgtaagtgatgtattctaagacataaaaattgcattattgatttttttgggcaaattgcctactatttttggatatggtcaaaggaactcat

SEQ ID NO: 86818 - DNA, 865 bp, Cannabis sativa
cctaaatttactttttctttttttttcttaacgaatgattattacaatcttctattataattttttaattaaattttatgcttgaaataacataaaatatttttttatttgacggggtaattcatgattagtttaggtcatcatttaatttttatttctttttaaaaaaaattagtttaattaatataccaataaaaaaataacaactgaataataacttgctatttaacgactaggtatatatggagttctaaaaatataatttaagtattacttctaaaaattaaacttgagtatttatttgtaactaaaaattaaaattaagtatttatatcacaaattactctttatttattttaaaattttaacttgttactctaattactcaaaattatttcttagagaggtaaagatgatgaatgaattaagtaattcttattgattaagataaatttttacaaagagtaaacatatagataattatagacaattaatgaagaggctgacaatataattaatctctaataacaaatttaactaccttaagctgtgactctctcaaactaacaatggacaaagaaaacaggcaaaagaatcttttagtaattggaattgagaaagtaatagaactttgttaatatatctacaacttggtcatgagccggtttgtgcttgaagatttgctcataactttttctcaaacaaaatataaatttaaatcaatatgcctggttggagcatgcaagactgagttagtagacatgaaaattgtgcttaaattgtagaagtttttgtggattcatgaaataaacttaataagcaattactaaattgaaactacgtcgattatagactcatatattca

SEQ ID NO: 86819 - DNA, 814 bp, Cannabis sativa
agtgttttgcatggtataagtataaatattattaattttgagcaagctggtcatttggcgaaaaagcagtaaacttgagattctttcttaacagcttcctgcactaatatagtaatgcaatgttaataaacttaaaaaaaaaaaaaaacagaatttatgcgtataattaaatgcatttgtacaaatttattcaaaaaactgtaattttaataagctagagacatataacctcacattagtggttgtacgttgatgatatttgagaatttgatttacttttgtaagggttcatctcttcatctataaccttaataaaaggcaaatatagtttagtcctttcttaattaaattaccttaatatcctttagttattcaattttaaagaaaatatcattctcttacatagatatatatttattacatttataaaaaagtattaaaaaagtgggttgggatatagaagttagttgacttattttatctgagagagaagggaatgaaaaaaaaaagagttgaaatgacaaaatgacaataaattactcttcccaattatgttaatgtttctgttgttacagattcacttatttacctttaagctgaattaacaccactcacaaggtttgataaatatacccttacatcagatacaacaaatatcaagactaaagaacatagggacagttacaaagacaattacaactgaagcagttacaaaattagttacaactctgccctagatcagaatcacagatcagtataaaaggaggtatttttctcagatacaagcaataatatacagagcaaaaatagagag

SEQ ID NO: 86820 - DNA, 2963 bp, Cannabis sativa
  modified_base (2486)..(2497): a, c, t, g, unknown or other
  modified_base (2555)..(2555): a, c, t, g, unknown or other
  modified_base (2671)..(2671): a, c, t, g, unknown or other
ctcaatctcttttatcacactttgaggaagaaggaagactctcatccaataattccttaatccaatcaatgtagattggattaattgaactcgaccagcatacgaaagatgcttattagcccaagaatggagtctacgtttcatttttttcaaaaccaacccacaatcatctagcctccattttattagtcttagagggatcccaaggtacttaagagaaaactcactgatagaaagatttatcttttgagcgagaggaattggttgagaaaccccaccaaagtaaacttgagatttggcaaaattaatggaaagacccgaggtcttgctaaactcatcaagcataaccttgatagcacttaaagagccctcattctctttacaaaagataactaaatcatctgcgaaacatagatttgtaagtttcatttttttgcataagggatggtacctgaaatccttttctctagctgttattggatccttcgggaaagatactccatgacaagaacaaagagaaggggagagatgggatccccttgtctaagcccctgctctcctttaaaagacccctgaattctaccatttagcagtaaagaataggatgtatttctcacacaattcttaatccacttgaaaaacttagcagggaaacaataggccaccagaagcttttcaagaaagtcccaattaaccgtatcataagctttactgatatcaattttgatagtgcatttgggggagcaattcttccttcggtacttcttcaaaatgtcctcaagaattagaatattgtaagcaatggattggcccttgacaaaagctccatggttctgactcactaaagcaggaagcacattagcaagtcgggaacaaatcagtttagaaacacacttgtataatatagtacagcaggcaataggctggtaatcaatagctttagaaagaatatcaatctttgggataagagagagagtcgttctatggagctcttccgggaactgattagtgttaaaaaaaatgagttatagccttatggatatcctttcccacctcaggccacactaacttaaaaaaccccaaaccaaatccatcagggccaggagatttagtattagggataaacatcgcggctctgacttctttgagagagaaaggttttaagagatgaacttgctgatcgagggtgagtttagagcccatggctatgcaatgagcttgtatctccatggtggtaggcttagctttccccattatgcctttaaaatggccaagaaagtgttgcacaacatcagaaaagtgaacatttaggaccccttgctcggtagtaaatgaaacaatcctattatcttcctttcgcttcttcaacatggcatgaaaataagctgtgttactatctccttgttgaatccaattaaccttgcttctttggtggagaaagttcaagtacattttttcctgaatgtgaatttggttagcagccgcctgctccaattcaaggaaatgattgttgtttgacattggaactgagcctccttgtaattgtccttggccttctcataagcatctccaatgttcccaatcgagtgcctattgaaagcttttaacttgtgtttgagcctcatggtttttaaataaattcccttcaacccaccacatctaagaggcttgccctagctatctaacacaatgttcttgtaatcttgatgatcaatccagaaattatagaatcgaaacgtttcgctgaagatgatggagatgagaagagcaataagtaatgagtttgggaaaacgtatgctcaattttttttttttaaaaaaataaagtaactcaaaagaataagttagaacaacaaaagaataaccgttaaaaaatataaatacaataagaaacaaaaaaaatatgaattacataacaacaacaaaaaaaattaaaataaacaaaagacatagattagagaaaaaaatccaaatgtctacagcaaaaaagaaaaaataaaccgtaaaataactaacaaaaataatataaataccttcatttttcgctggtttacttgctgaaaaacactagagaaaggaatcgacaacaactttgggtttattattcattagtttgcttggtgaatatatacatgtgtgtatttactaatttgttcaagagaaatatatatatatttatatataaacacatatattttcttgagtcgagtttttatgggaaggattagaagcttcaaggaggaggagatcaatattatcatgggcctccgctttaatcatcatttaaaaaatgttaattaggatttttgcccctaaactttcacatgtacataatcatgccccctcaacttttaaggtcgttaaaaatgccccatgaactattgaaattgttggatttaaagacttttgtccaatttttgtaaaaagtctaacatggatgaaagttcagaggcatgatttagcacatgtcaaagttcgaggggcannnnnnnnnnnntatcaaagtctgaggagcatggtttagtacataaacaaacactgaaatagtaaaattnaatgaaattaaacaaaagtccttaaattcaacaatttcaatacttcagggggcatttttaacgaccttaaaagttcagggggcatgatttcgtacatgtcaaagttcagggggcanaaatcctaattagcctttaaaaaaaatagaaaaagaaatggataattacataaggcaccattttttgtaaaaaaaatatatatttttatgtttaaagaattttttttacaattttacggctccttataaaaactacacgaaaattacataaaagtaacataaaaataacatcaaagcaacaacaaaaagtaacatacaaataacaaaaaatcaacaataaattaacaagggtacaacataaaaagaacgtatcttctgtaaataaaattaaaaaaatcgtaaaaatgtttaa

SEQ ID NO: 86821 - DNA, 860 bp, Cannabis sativa
  modified_base (418)..(424): a, c, t, g, unknown or other
tgttatatagccacattttatatgctatacattgcaaattagattagtttgtgatatatgttggactcgttggtgtgtgatattgttaatgtgatagttttttagttatattaacacctctaacaatcatgcatttagatgttgatgtggtattattttttgttgttttgtaatttagtttctgaatttgtatagtgtaggattgatgatgtgttaattttttgttggtttgtaatttattctaggttggcgcaaaataagattgatacatgtcgtttttaagttgtttgttggttgtttcatattggaatggcacaatgcgagttaagtgcaagtgaaacgatagttggaacgatttagctgccaaaaagccgtttttttagttaacaatgaacattattttttatattataaattnnnnnnnatttctcaaaattttgtaaaatattttaaacaattagatgactatagaaaaatagaataattttttttaaataccaaaatagatacaatgcattatagaaacacctaattgtaattattcaaaattatgttttgccatctctaacacttaaatgccttatctctctcaatctatctatagactacatcgaaacaaactcacttatggtggttcagggattgaaagctactcctgcttgtaattctgcttttcacactgtcttgaaagatgttaactttttagtatcctttttcctgcgagcaaatcactcatgtttctagatctactaatacttatgcccatgctatggctaaatttgcccttatggtggatactgactatttttttttttttgaaataaaattatgatctttattaattgcaatccatagtgatt

SEQ ID NO: 86822 - DNA, 794 bp, Cannabis sativa
accagtcttctcaacaatctcttccgattcaaccactttatgcaatgaaggagctttcgggtttgttttcgtgtcaaccacataaattctaccagaactgtaaaaacaagttaaaaccataatcaaaaccaaaaccgatcctaagctaaggcagactaggcccggaatgaaatattacattagtccaggtacaataagaaaacgacgatcagcagaggaatctccatggcacgaactgcatgaattccatcctgtatgatgtaactcatcacctaaatatggcacagggagcctgtggatgacttttgaataagtaagagaagttggatcaacatccactgttgctaagtaatcaggcttttgtgtcccagtcccttaaatttacaccatcaaagaaagtgtgagctgagtaaggtaatccaaagctagtaaccaaaattggcaaaatgatgaactcagtaagtgattatacaatcaatataagaaagtaaaatcaataagaattctcatttttctttatgactaaacttgtaatttgggaagcatggtcaatctaaaactctaactatggacaattcaacagaatattagactgagtttttcaaatttaatttaaaaataattttcctatcatatttaatattatagaatatgattttttcttaggacagaattatttgatctgacggctgagattgatttaggggtaattaaggttaaaaagtaaaaacgtaccctaacactcattctcatttaatgtacccgatacttatctaatgtactacgaaatacat

SEQ ID NO: 86823 - DNA, 690 bp, Cannabis sativa
tttacagtgagcatcttgatgtgtactatagtcaacttgtacacttgcaagtgtcaactatagacatggtaaaaacaatttttatgctacctttgtgtatgcgtcgaatgatataaaggggaggaaagagctttggagggatcttcaaagaattcgaaccaaagaagcatggatagtcttgggagactaatgagatattgctgaaataagagcaagttggcaagagaatcagctatagaccagcagctgagtttattgattgtctcgagacttgccaactggaagatattaaatatagtggaagttttttcacatggagcaacaagcaacaaggaattgatagggtctattcaaaaattgatagagttcttgccaactaacagtggctgcttaaatttaataatgctaaagtaattttcttgtctgaaggattattcgatcacacgcctgcccttctcacagttcatcctgaaatgcaaagtggtagaaaaccattcaagtaatttaggatgtggtcctctcatcctaagtatgcagatcttgtgagctcgacttggcatcaaccaattaatggagcaaaaatgttccaaattatgacaaaactgaaggcacttaaaggcgtcatcaaataccttaataaatagggtttttccaacattcaaacaactgaggagcaagcaaaaactcact

SEQ ID NO: 86824 - DNA, 815 bp, Cannabis sativa
aatcccccatattggaaaccatgccttccaccccattaatttcagaagtggcccacttgctgaaacagtagaagccattgtgaagacctacactatttatgtcaaaaaagtaactaaactcctccattgaaggctccctatgcacatactccatatacatcgcataaaaacctaaagctatgcgataactatttggggttagttgaaaaggatatacatcataccgctgaagaataacggagatgaatggatggaaagggatcgatactccacattgaagaatgggtattgagactatcacttcctctgtaggtatgatcgccgggttagtaaaagaaaggtgcgctctctgggtagggcgaggacgcaaggaggcaagtcgtagtagatttaatttcgtaaaagttgtaagatccgatttggtgactcgcgagaccaagtcctcgcatgagaaaggctcatccaattgagtgttatccactgaatcggtcccacttccctccgcatcctcttcctcatctgactcgcgatctgaggccatccagtcttcgtccatctcctcgacctcgacatcagaagcatgcctggaatgaacgaggtgtttacgagctgacaccgtagactcgctgtctcgaatctcgatagtctctggttcagcgagttcctataccatcctctcgatgtccgcagaagaaaacgaactcagctctgtgtctccggcagtagggatctcctcttctgagagcgaagtcgggatgaagctatcctcgtgatggtcctgatcgccatcgaatgcattgcctcctgagccaagc

SEQ ID NO: 86825 - DNA, 504 bp, Cannabis sativa
tgccaaatatgtgctgttttcatctccgctctcttcattgtgagtgtttgctcaatagccgaatctgtacattttctgttcgatctaagtaaaggttttgtaaagtttaccgccaacatatgattatgatggatgttgaaaaatttagtccaccaacgaccagtagtagcatttctacaaatcttaaatgaagcttgataaccagttcttgttaaataacgtgggtcgcgtttcctattctccgaaagaaaccattttgggtctctgaaaccttcatttgaacacaaccaacttctaatgtaagcatcaccttccgtgttgcgcctttttgttttttttcctaacactaaatccaatcacttgtgaatacaaagtgtagaattgttcagcttgttccatagataagaaatccttgccccttagatccgactcgttaattaactctggctctttggttatggtcagaaaattgagcataattttccatgcaaccagctcattttc

SEQ ID NO: 86826 - DNA, 830 bp, Cannabis sativa
ttgataccgatacttggattggatatacttgtacagagtatatatatttacatatacttgttttaccaattactttaggctttttggaagatgttttgatgtaatatggaaccagtgtattacatatttaacagctagtaacaatgagtgtaaaggtcgagcttgttggtttaacttttacgaacaatggcaaagcactatacctcataagttaactacaatgactatggctaaaaaacttgtcaaacaataaaaaccattaagccattttagtgtcagtttactcagtatggaccattaaaaccttgtcctgcgacttgagaaagacccatcattacacttggcccaataaatcattcctcatagttaatagcattttcaggacatgaaatgaaatgcccccttttcgtttttcaattccacgctcacagatacaggaccactggctttcgtcgatggcagatggtgaccttgctgctgtgttgaaacgcagaaaaagtgagacgtagaaccatgtgagctacaaagggttgggattgagagggtataaattcactggaggagattattgtgactgacctctcaatatcatttaatacataatataggtcccagttgtttcaaaggcccaaatttgtttttgttcagcactgctggattttgtggaccctcaatgatcagtaagaggtccaggcctttttgaactatgggaatgtagttgtttcatccctttcatatatttatttcatgcaatttgtttacacagattagacttattgtgtttgccaatttttgaggccatcaaattttaagtcgatccaaaaaaaaaa

SEQ ID NO: 86827 - DNA, 896 bp, Cannabis sativa
  modified_base (38)..(40): a, c, t, g, unknown or other
  modified_base (386)..(389): a, c, t, g, unknown or other
tcttgtatggtatatggtttttgttgtctatagtatannntttatttaagatgatatttaatttctattttattatatataaattttttggaatgtatacatattttttaattgtgctatatataattttgttagcctgatatatatattttttgagtattaatttaatattgttacaatttctttatggtatatataattttattactactgtatattaattttcagttatacggtatatcaaatactgctgtatatatttaatgatctaatatatttattcatttttattataatataataatatgcaatactaaaaattatataacttaattttattattatatatttttttaaagaaaaatatgtgataaatatatttttannnntttttattagctaatttattatttttggacattttcttaattttttttaaaaagggaacatttgctaacttaatttccaaatttaaaatcattttgtgtcttaaccctttaaaagaaaattaatatttagtgtaaatttcccattagtctagccataaaatatttataatattgttaccttttggactataagagtatacttcgaagacaaaagcacatgtgaatctaagaaaatcaagaaaacaaaatatatttaatataaaaaggtaattttttaatttaatctacagctatatatcaattttaaaattaaaattaattaatgtaaagaaagacaaaaacacatcgaatatgagaaaatgaaacatatttaattcaaaaaagtaattatttaatttaaaattgcatgatgatctgatcacaatgagaaaagattctactagctcccactacatttaattatataatattgaagttagtcaagcatgaacccatcaacatttaatg

SEQ ID NO: 86828 - DNA, 911 bp, Cannabis sativa
aaaaagaaaaggaaagaacaaatcttgaacttatgtccatcacttttcttttttggtgttagatccttagattcttacgatttgcttccctctttgggactgaatttgtttatgaatctctgttttcaattccatttttaagcaagtttgtttggttttagagtcgcaaagactttgagggatctctctttgtcgttaaaaggtaacaacttctatcttgaccgttttgtaattgtctagtaatacttgttttttctgtgttggggttttctttatggttaaattgtaattggcttaggctcacctagttcactgtatctttttgctgttaaggaatactcaacctcgatttcagttcattgtcatgaatcggcgtaacacaggttcgcattcgtactcatttgtaattcattttaggaattaactcatttatttattatagtttgtttattattaagctgttgagatcacatttagagcatgttactaagttgggctttatctttctatttgaatattccgtaaggttctagatactcatttggttcttagtgttattccactttgtagatgattgttatctcttcatgataatgttattggtttttacatgccttagttagtacaaattagttactggcagaggaatttcaaattgagacaaggagaattagaaacctgtacaagtatgaattttttttttttgatacagaaggaaccactttccattgaaaatggcccatataagacttacaatttgttgttctttttacttgctaattctttcgaaaaaataaaaagaaattacacaatgttaagacacacaatttggccctaaagtttcataacatcaaattccgcaaaccgaaaaactcttttatcaactaatttcagtatgaagtatctacaga

SEQ ID NO: 86829 - DNA, 1076 bp, Cannabis sativa
tttgtttcagcatcgagttttttagtttattttgttatgttcgtgtaaattgtagttatttaagaaaaaataatcatacatgtaacaaaatatttgaattttatttttaacgatataaactactcagaattttataaaaaattacaaatggtcttatataattacaatgtataaaattttaaaaaaatattagactagttaattttttttcctaaatgtctaaatagaaaaatatactaaaacatacttttagggtatattatgtacttcccctaacatatatgccatctttctttgttttcataaaagtcaaccaagcatgtaaaaagagagacctcatagcttattaagaaaatttatagtacacttttttaaaagaatgttttgttattcttttgttctcttatgtatttaggagagttttttaatctacatgattacgtacgttatagttatttaaaataatatgtaaattttaacaatgcaaatttaagtggatccacttcaaattaatgtgttatcacatttcgctatcaattagaaatagctaggcattttcaagtgaaaatgactattattgaaaactaagttacattaaccacttaaagctagctcaagtggccatagggggtacgtgtgtattggaagttctggattcgagtcccaaattatattgatgtaatatataaacgcttaaatcaaaaaaaaaaaaaacaaagttacattaataacccaagggaaggataactcttttgtagctgtgctacctcagctgccacgtcaccgccaccaccactactaccaccgctgtccagtttgcagtggcgacccaaccaaactttaaataatggtgttatttataaacttcaaatttagaaggggcttatatgttattttccatgatttttgaagaatattataataattctttaataatattttaagtaactctataaaacttgaggtgggttttgagtttctactactttatcatgtttccttgtcactatttctataactagtactatttatgttatgttttaggtcatgaccaggactcaaaaatatatatacta

SEQ ID NO: 86830 - DNA, 775 bp, Cannabis sativa
attttgagaatttcttaattagtaaaagttggtgattatttaattggtttatttatttaagtgataatttaatacccgttagttaaaaaggatttatatatacatatattctttagatatactgttagttagttagatttgattaattgactttttttatcttaatattaatttcctaactctaggagatgacacctagctacgccactcatcttagtgattcttatcaattagccatcatcttaattttacccattaccataacaaaagaagtccatatctctcatttctctttgctcatatacgaccaagtatgcccataaccaccatcaagcttatttcctttactattattaaattaataaatattggcctttgaagatgagttctatctagagaaatttcttaagagaagctagagcaaagttctcaaggtaagatctcatcctttggtgttatgtttagttttgattgatgggaaaatctaagtttgaaactttggccttgaataagttaggtatatatattgatagtattaatgattcatgttaaaatacaatagataaagtgtagaattttattttagttgggtatttttttgatagtaatggaattcatattttctaatattcatatgtaagcttgtggagttgattttattatgggatttagctcactagctactgttttggttcaatacatatataaattgaaattttgtgtagttagataatattattgcaggttttggggtatgaaaatacaaagaaaattg

SEQ ID NO: 86831 - DNA, 627 bp, Cannabis sativa
ataatcccctgaaattatgagattagattatgtcccatgtaaaacaaatgcaattattatttaaaaatcacataattgtgatttatccgcttttactaggtcaatgcgtatgtggattaaatatgctgcaaagtgtatcgtgctgagacatctcgttgggaacatagcaaaataaccttggcagcgagctggagcttttcccatgtctttccaaggttgataatgtaaatctcgtcgtttctgcgattgaagacataacgctccatctgacaatcgtagttcttggtgacaaggtgaacttcagcagtcaacatcatttgaatgtcagcttctttctgagagagctgacttgatagaacagtgggtatcattgaaagatgtttgaagctgattagtggaggtatcaggagtgtgccttcgtatagcgaaacggatgcctcgcttttcgttgtttaagttcattcaactgttatgcttagtttgtataatgtatattatatgttaagtcttttaacagtcaacatgtctcgtctacctctcttcgtatgtaatgaggttaatgcctcgctttgtacttctgacataaaatggtttcttgtcaacgcgtgagacaatagtttgtatatc

SEQ ID NO: 86832 - DNA, 944 bp, Cannabis sativa
actcacaggtaccggctttcatctatttttaacttctctccgtttctgtttgcttctatggttgtgtactgtagtttcatttatgttctctgatcagtgttaaagcaattaaatcaaccttctgataaatggcttagaagaagagcatgtgttattggttttgaaatatgctagtatattgatttgattctgttatggtgtaatccggattaagttctccacttgaaacatgtagtttcattatgcagccctaaatgcagagaaacgattgaaactttatctggttgtttgatttttctcaagtgattctctctgttcggatatgattgagctattatcctttattttttctttttttttaatggtgtcaggtttgtcataattaatttatcatgtttagttctaagatttagaaattgtgtataaatatgttgtaattatcatacgagattttgttctcattctttttccatttgaaagtttgaaacaaaagaaaatttcatatttttgtaattttgattctatgggattacacctacaaaaaaaaaaaaatatctgcttctttcatgcgaactacatggtatttgttcctcgtttgcatccttgatcactctagatatgacatgactaataagttcgtcaatggatattattgtggggatttttttttcttttagtactgtgtttaagtaggataattccgtatatggggctctgagaaataaaagtattggttttgacgaagtgtttggtgacattgagaaacttctctccaaataaaatcatatttatggtgtttctaggcaatttgaattggaattattctcatagtgacaaattagctacctttgcatgcaatgtggagcaatgctgtgttgttgttgattggatagataatttgtagttgaaaggcaatgctcattgaattaatttctaagtaatga

SEQ ID NO: 86833 - DNA, 942 bp, Cannabis sativa
tgtgacacctctatgataattatagcatcttataattaattagcagttttttataattttcattaaattaaaataactaaaatttaatattaaattacattaagtggcctttaacatataacaaatcttataacttaagaaaataaaatttaaaaaatatggatcactaattataaattaatacttatagtaatgactgctctctaccttgtctattgtgtcatgtgtttggttcaaagatggtgtcggcagcacgtcatggtaacgttttaatatttctgaaaaaatatctacaatttggaattaaaaagatggatgattatcgttcctatctaccaagtagcatttctcaaattccacagtaaattctagtatttttctaattattattatgtatgtaattataatgattttagttattgttaaaaaaattaagataatttgcggttaaactctcacaatcgtttattaatccacttaatatgaataatataaattttaaaaaaaataattaaaataaaaaaaatcaaaattaaaaaaaaatttaaaaatatttttttcctcattctctttttctttctttctttctttccaaaaattaaaatccaaaacccaaacctattactcgcgcgaagccgaagatacaaacgagcgaagaccttgctatcgtggtgaaaattttggtgcgattcattggatttgaaggagaacgacaagagagatcgagagggtgggagaggatagatcgagatggtgagatctcaaagagagggagagatcgaaacggtgggtagtgggtttttgctggctggttgataggcaggagtcggcgtggtggttttgtcgagattggagtctcgtcagggtggttctgggttttggggtgggggttggtgggtgcactataaatttttttacttttagtcgtaattaaatttgtga

SEQ ID NO: 86834 - DNA, 683 bp, Cannabis sativa
ggtgctggtgcccaatatgtgtagataccttcttcaacgacattataagcgttgaaacgcgatcctcttgtactgctggcagaaagtatagcttctgtagctatgttatgtgagaatattgacaatctgagctcactaaactcttgaagcacttttatatcttcaggtgaaattagacctgaggagtttggaggcacatttagcaacaaaagacagtttcttccagctgatttgtagtatatgtcaagaagagtcaaagcagattttggaacttctgatgcatgccaaaaccatccaggcctaattgagacatcacactcagctggcacccaatcatgtccatctgggtctccgcttctcgaatatctgttgaagaaataaccaattcaacattcaagtgaaacaaatataagaagttgaaaaaggaaaataaattttcgaaaggaaaggataatgctcaataaaatcctttgtttctatcttcccttaaccataatgacaaatcaatcacataacaaacaaccaacaccaaatcaaccatgatagaatactgatgacagaacaaaacaacttcattcattctcagtcaagttgtttctaaatatcactggattgacaacaaaaagattataatgacaatcacataacaaaaaaccaacaccaaaccaaaccatgatagaatg

SEQ ID NO: 86835 - DNA, 603 bp, Cannabis sativa
tagtacatttataagtttttagatggaaataaaactcaccatatcatctcattactaatttactctaatgtaaatcttcctatcctatactatgctatcctactctatgttatgtaattatgtatgtaaatagactagtgttcttagaaccaaacaaggaaatgggaagagggagggataagagtaagtagagatccaaacaaacactcccaatttcgatacaaacaaaggcttaaaagccaacatcccaacaaatctcaacaaacaaccaaaaatgcatttaatattttcatagcaaataatataaactctcttcttcatctccccgaaaacacacactcacactcttcgtgctctccgtctctctctctctctccatcttccttcatttcttttctttttcaaatcagacccttcattcccagatctctctcactcttgattcttcgaacactatggcatctattacaggagcatcgctttccatgacctctctttccagctccttcaagcctagccttgtactactactactattactttctctttactctctttaccaattatatcatttctgccttaaaaacatgtttttgatttctg

SEQ ID NO: 86836 - DNA, 871 bp, Cannabis sativa
acactttcataaattctagcatatatatataatatcatataaatgtacaaacttccacattttaacaaaaaggcaatgttgatgagctaggtaggacaacttgttaataataatctaatttatcatagtctaaacacgtacggacgtacggacgtacgaggtcaatctagctagttgtattgttcttgtcaaattatttataaacaatatataattattagatgttgacatatgggcttatgtgcaaacttaattttgtgtattaattatggaacttcatttcattttatttgttttgactttcaatacttaacaaccgattcatcaatctagtttaaattattattttgatgattgtagagtgagcagctcaccatattataagccaagattattaccataatataaaagctaattagaatttatgacttttaaattttgatatattttttaaatcattaaaatatttttcgaactattgaaattgttagatttaagaatttccgtctaattttactaacggacgtctgacgtggatgataattcatggaacttaattcggtacataaacaatcgtcacattagtaaaattaaacagaatttgacaaaaatcgttatatctaacaatattaataataattcgagaaaattttttaatagcctaaaaaatttaaaaattcatgatttgattcatgtgaaaaattgggggcaaaattaaatattcatttatgaatttgattgaatcattttcattaacccaacaagtacgtgtgatgtatgtgatttaaaagaaacaaattaccacttttttataaataaagaaaatgaatatgaattaataattaatataaagggtcaaaatcactccact

SEQ ID NO: 86837 - DNA, 752 bp, Cannabis sativa
tatgcttcttcctatatttcatccaacatttattttagtttggagtcgcaacgtgttgtattcgtgtcatattttatgtgatttatttttatatttcgtattagacgtattgatttgttttttttgacttgtgtctaattttctcaacttgtaaaaaattgtgttgtgttcgtattgacttactttgacttattttattattattgaagctaaagttgtagaaaaaaataaaaaatttaagttttattagctagaaaatttatattacatttatgtatatatagttgcaatataataaaaataaaaatatttttaatttcatgttaaaaaaataaatttaaaactttttaacttaacattaaatcattaaatatatattcttttacataattgttattaataattttttattattttatttcatttaaaaaaattgtgtcaaacgtgttaaattcgtgttaaacggatcatgtcatatttgactagtttttatttcatataaagtcgtgtcgaccttatttttaatatgcgtctaattttttcgatcctgatccgtaaaatttgtgttgtgtttgtattcgtgtaccgtatcaaaatccattttatccttttaattttggcccttcaattaatcaagacattataatcaactcggagcaagttatacgtgtgctcctaaatcctaatataatcaatcaattcttttaattcatatatattcctcagttatgagtgattgaccaatatgatgt

SEQ ID NO: 86838 - DNA, 1041 bp, Cannabis sativa
ttttatgtatcataattttaaatccatattaaattattataagtgctccaataaagattatcattatgtatttgtaggttatattttatatacctgtcatcgattagacatatttcttgtattgttcgctgtccataagttgtgttcatcacttttgttgggtttattttgacagctatacctatgatatctaaaaattgaatgtaacgttacttaaaacttcgtaaattatttgttatgtgttatattgtggagatccgaagttaccttgtggtttgttggagtatttgtcagatgacaagttcttaaacgcaatgaattcatggactggtttagaaatttgtttgccttcttcttggacttcaacaacttgtgtttttgagttcaacgtccagccataatggtaatttgtgtcatttttaagatatcttgcaggtgttttgttgacacgggcattattgatgtagtaggtgtgtaactcatgcaaagtctcttccaaagtgaaatgagtctacctttggattatataaaaataacttttgatatcgaagtggtgaattcatacttgttcgtggtggaaatttatgttgaactgtcattttcattttccatccaactgtggttggagtgatgtcatctactgattggtgtagagtcggcatctgatgtgctcatttaataattatattttataatttaaataaaattaaaaacttattgtgagaagaagcagtgtctcaaatgtaataaaataataatgcaatataatattaatatgaaaacaataataaatcatattttaaaagcatttagattgatatatgaaacattcaagagtttaagaaagctaattacacggtcactttgcaagttttttgaagagattaatttaaacaagataatgctaataactctgtctacatgatgtttttaatcgaattcttatcttgttgggaagttgaaacaggtcggattaagactctaactgtcaatgatgtctttgctcttaatattgctacatataactgaccgtgtgaaaaa

SEQ ID NO: 86839 - DNA, 938 bp, Cannabis sativa
atgacatggtctccgaggtaaatacatataaatttacactacaaaaaattttacttttaattacaacaaaagttataacttaaagtgaaaaagtcgtgactaattataaatcattatttttatgttgtgactgaatgtgttttagtaacaatacttgttgtgactaaaattaaattagtgacaacaagtaactaaacattatgttttaatcacaagtaaaaaaaaaattgttgtgactcagataatttggtttgttttgatattatttgtaaaatggccaacgaaatactcttatctgaattctaaagaggtcattttacaaaacttattaaaataatgtcattttacatagtaacttgtaactaatatgtaacaatattgtgttattattttagggcataattgaagagaaaagtgttgatgatttcaacatgccagtgtattgtcccactgccaaagaagtgacaaagattattgaagatgaaggatctttcaagttgaaaaagcttcaagtttaccaacttccttgggacactggttttaattatgataacaacattaatgctgatgttaatgatgatgatgatgataaatacaatagaggaaagtatgtctcagattacatgagagcagttatggagcctatttttgaaaaacaatttggagaaagtgtcatggatgattattttgagaggttcactcacaagatcatcgaatcaatggccaaggaaaattggcaatacataaacttggtcatttctttaacaaaagaatcatcaaggttaaattaatctcaaagttatttaacatttgaacactaatgagaaattgaatctcatggaggaagattggataaaacatttgtgttaattctttcttttctctgtttcgattgttgcttttttgtgttcttcatcatttgggtttatttctccttt

SEQ ID NO: 86840 - DNA, 679 bp, Cannabis sativa
  modified_base (443)..(449): a, c, t, g, unknown or other
ccaaaatggtatttaccctcatatttactctttttaattttatgtttattttttattatttttaggtagaatcataatttctgtgatcatatttattttttaattttttaaccgatcttatttaatttgataaacttaaagatagtcctataaaagagaatctattggctcttgtatttttctctaatctagcttagctttttcttttaagaagttttaattgattaattttttacttaatgtctattgaatattattgcgtaccataaagttaagtggtttgtttttgtaagttgtgacttattttgtaagtatagttgtatgtgttgagtgtactttgtttgatatcagtatatggtggtggttgttttgtgtttatcctaagtaccagtaacgcatgatctgttccccagttagtaaagataagtttttttttttttttnnnnnnntaatataatatttcaaaatattttcatttaaataaaaattttcactttaatattaccattgagtagtgtgctaattaaattttatactttttatataggtatatttttagtttactcacttagtcaagagacaaggacttcaaaagataagttttatcacaattctctttcttcaaaattttactatattattaatttatataacataattttaaatttgttattttaac

SEQ ID NO: 86841 - DNA, 745 bp, Cannabis sativa
tttttaaaacaaaaaataacattttgttgttttcaaaattcttgtttttttgtaactttattttttgaaaaatattttcaaaaaactaggccaaacaaatcaaattgttttcaaaaaataattttctatttttaaaaataaaaaataatttttagttatgatttcaaatattcactaaattagcctattctcaaaataatgagccgatgtacacaatttcaatttatttaattttatatcattattattattattttgaaatatagtttatattaaatttctctatcattaaattagattcgttgaaccagaggtataggacgagtgaaacgctttcaggaattttaatattttaaaaatgaaaataaatataatttcacacattgcaaaagtgaccagtaaagtgatatttacaaattttgattgatagaacagagaaaaagctatgcaaatccatcaatacagttacactttggcttttttgcttttgtttttgtgctgaacaatatcttggcttttctttttttggttaaaatggcaatatcgttgaaagtctttgtctacattcagtggacttttactaactccatctcatctctccttcccttactaccatccattaaccaatgtcagccgccacccttgcccggaatctctacgcacttctttctctgctctgtgttctttctcttatctccggaaataaaacagaggacctcccaattctcctcgaattcaaatcagt

SEQ ID NO: 86842 - DNA, 506 bp, Cannabis sativa
atctgaaaaagatatttatttatggcttagtagaatcacatcttagtattctagtatagcgaggcggtatagttaaaaattgggaatgtcgggatttgtcaagatttttgaaatgaccattttacccttggaccattttgatatttatgcttgtggggaagggtattttagtcatttacccttagaattggtggctaaattttaaagtggcagttggccatagtatgttagaataatctaagtgttatgttgttatttgggaatttaaggaaatggaaatttgagagaaaaaccattttctctgttcctcttggtcgaaccctaaaggaccagcagctatgggggtgttttctgtctgcaatcggagttgtagagcaagtgttagtgatataatccaaggtagaattcttagacttaatctcctttattttcttaagcttttagtgaagaaatttttgcatgaattgggtgtttgagttctgtgattgctgttggtgtatgaattt

SEQ ID NO: 86843 - DNA, 1091 bp, Cannabis sativa
  modified_base (224)..(224): a, c, t, g, unknown or other
cgcggcccgcccttgagtttttgggaagttttgaattcaaactttgaaaatgcatatcttttgattccgaactccgatttgggagttctttatatcattggaaagctcattccgggctctatattattatctaaattttaaatgccatgaatatattttatgagtttaagattaggggttaaccctagttgtgaaaattccagattgtgtgactaggattaccngcacctggtcaggagcacccgaggatttggaatctcttttattgcaggacaacatgtaagacagtagttagcacgtagagtatgcacggtgacgcttatattgaatatgacatatgtgagcaattgtaaccgacatcagggttattaccctaataggaacagttaattgcctagggttattaccctagtgttataagtgagtaaattctatgccatgttaagtgtgtgattatattgagattcaagggttatacgttcaaggcataatcaggttggactcgacaatcataaccgagatgaaccattctaaggccttattgtatctagacgtgtgagagcaacacgtaggtctacgccacgtagatataagtagatgtgtgagcgcaacacataggtctacgtcacatagacataaatgggcatgtgagtgcaacatgcaggtctgtgtcacacagacatatatgtgaatggcattaccatttaaatagcatgacgagcatattattgttattatttatactgtcttgctgggcttggctcacgggtgctctactctgcaggaaagggtaagactttagctaatcagccatgagtgcaggagctaagcaaagaatgtacatgtctgggccacatctgaccaagcgagttaagggtctactagtgatgtatttttttgaaactctatgttgccccttaggtcggctgaaagaaaaagatttgtaataaaatttgtaaatatttttgggatcccaactgttgtaatgtttattgtaatgtttaaattattacaagttttattttcattccatttaatattaaattttaaattctgcgcctttttgattagcaatcatgtttaggggattc

SEQ ID NO: 86844 - DNA, 528 bp, Cannabis sativa
  modified_base (63)..(66): a, c, t, g, unknown or other
tcactaagggttcaaatatggaagaacaaatgaaggagggtttgaatcactaaggaaggaacnnnntcatctaggttgaaggcaatagttaaattgacaaaagttggatcagtgagagcatcatgtcccttttatagtgtttcaactacggcttagggctgaattatatggattaaaaaaagaataatatattggacaaaataaacactagggccgatcacttaaagggaccaatctctagttacaattttgccactttttcaacaactaattattctttcaataatactatattttcaaattcaatcctataaatgccaaaactatttgtttaataattataattaattatcaaataaaattttcatttatgttaattattaattagaacatacaaagtctcttaattataaattgacccaaaaatttcttctttttttcacaattaaacccttacttagtgaaaattcataaataaggcataatctaattttagaattataattgattacttaaaatcaattaact

SEQ ID NO: 86845 - DNA, 778 bp, Cannabis sativa
taaaataattaatgtgtagtatattttaaaaaggaaatgttgcttcagattttttccaaaatacgtggcagcggctgagggtgacacgtggacctaaaaaagggtctacccacgaaaatcaattaagtcttaaacaggaatgtgcacctcatggagtgagcctcctggagaagagcatgagacacacctttactctccgaaaggctaggactgtaacaaagcattctccgggaaggaaagggattgttcgaacagtcacttcgcatttaatgctgcatggggggaaacctattagaacctccataaaaggatttgacagatggcgtaagccctttttacggcgatcacacaaccaatcgacgagtatagactcaacagctacattatgagaactcacatcaatcaagaaaagataaaggattgtatccacctaatccctaagatacctacggtataggtcatgtatttcctattttgtattcattaggaatttgtgcccctaagaggttaatacaaaaagacaagtgatccctttctagggatcccccgaaaaacactaataccccatagacataatggaaaaggggtcgatcgatttattaaggaatcgaagggagtaaagaagagagagggattcaccaagaacattctctgtaaaaatactctcataaataacaaagactcgtggactaaggctcattaatgtctcaaccacgtaaaaatcatctgtattaaactatctgcattaaactttgtacaactcttctcattctattat

SEQ ID NO: 86846 - DNA, 682 bp, Cannabis sativa
tcattgaagatgttgatggtagtaccatcaccaattgattttctgaggcctgactggagaagctctttgccccaattaatactagaccaaacaagggaaggtcatgacccttgccagagtgaagaaaactagtgtgtgggaaataacgagctttaagaagggtggccacaagagagtgaggatattggagtagccgccaagcttgtttagccaacatcgcctggttgaaagccttcattgaacgaaacccaagacctccatgaaattttgaatagcaaaggaaggaccatgttttccaatgaatcttcctgttatgctcagttccgccccaccaaaaacgagccatgagtgattcaatctttgaatgaaaagaggcaggaagtttaaagcaagccatggcatatgatggaatggcttgaacaaccgattttaaaaggacttctttgccacctttagaaaaaaacttagagttccatttatttaagtgagaccagacacgatcgttaatgtaattgaaagcatcttttttagatcgtccaaatgtttgaggaagacccaaatatttttccatagtcccacgaataggaatgccaagaagcgaagcgattgcattctggagctcaggagcggtattcggagaaaaatataatgccgatttagtaaagttaactagctgtccaga

SEQ ID NO: 86847 - DNA, 706 bp, Cannabis sativa
  modified_base (44)..(47): a, c, t, g, unknown or other
tagaaaatcgtaaaaatatataaaaaaaatctttaaacgtaaannnntaatttttttacaaaaaataataccttatgtaattatccctttaattttccattatttggtaggttttaattttattatagttttattgtttggtatgtagtcatattttcctagttttgttttgttgttaggaaaatttgttatccaacattcttataataacatgtcatttagaatattttcataataattaattattgatgtaaataatgaataatttgtgaggatacagaattaatttatctcaattaaaactcattgatattttaaagatttatgtatatatatatatatacaagaggagtgctatcaccaagtcatgacttcaccaagaaaatttgctttccgagccatgggttgttctgcacttataaaaggccccttaaacgatttaagttaattctaccaacacatttcttatccagaaaaatatattgtatatccactttagtttttttattttaatttttacatttatttttatattctttaagatatattatttttatatatgatatcattttttaaattaatgtaaattatatactaaatttaagtagaaaataagagtatattaagcaacccactcataaaagtggatatattttaataaaatataatataaagatagttttaattaagggaaaaaaacaaaaaa

SEQ ID NO: 86848 - DNA, 3030 bp, Cannabis sativa
  modified_base (2932)..(2932): a, c, t, g, unknown or other
tgtgatgaaagaatcattttaatgtgaaagttatatttcgtagagtactatttacacagttgatcttaaaagatatataacttaataatataaaaagttcaagaaacaaaaatactaattatatattatttatcgtataataaaagtcaattctatacctccatccactcttgtcctattgctcgctcccaaacagttaaaccaccatttttcctctagcaagcaagtaaattatgttaattatataattttagggtttcgacagtacactactaaaaattagatgtatcgatacactcattaatttgattcattttttttcaatattttatgaaaattataagctaaagaaaacaaatatatatcattgttatgaaaaattattattacctgtaaagagagtaaaagattaacagaatcataaagatgctcaagttcaattttctcaccaacaatttttgttggtaacaatgagagagaaagacaacactgtaaatatacatataaagtagagttaggaattgaggcatagagatatatatgtcaaaaataaaaatatcaaattaattatggaaacagtattattaattaatgatacttaaattatgatttaaataccaaatttacctttaaattttctgcagtggaatcagatacttgccaaccttgatcttgatcggaaaatgtccatgatcctttagaaatgtgacgatacatgcttttgaagttaccagaaggattatctttgacctttaaaattttatgtaaattgtagtaaataatacaactctgaagaatgcggtgaatgaggttttatctcaaaattaattagaaataatgaaatagttcattcatcttatatatgacattttatttccacacattagtaatatgagaccaactctaataggactaataacaatattgacacgtaaaaaggtattagacactaatttttaattgtatttatatatgtacctgggaatttttaatgaagtgatgacctcttgcaagtgttggtccaatttcatcaacaagatcactatcaagcaatgcctgaatggcaaaactagtgtcccacgattgactaccaaatgtctgaaaaatccatggtaaataattaattaatagacaatttatttgtagagtaatattattagctacatacccatgcaaattacatatatacacttaattattacaatataaatattaaccaatttataataaagttacctgcattttcattccatcctcagcaatccacataaaatctgggattctagctaggtgtttcttaaaatagtccccatttggattttctacccaacaagcaagcatacacaacacctatatacatgtatatatattgaaatccaatgttagcatataataaactaagatagtgtatgcattaaaaaaaaacttagatagtgtaactatttagttagttacattatcatagtttatattcttaaaatggtacaaataaaatctcaaacttaattttttgtcaaattaaaacataataatataaccatgagcatttgttcgtacatatattaaaaaaaattaataaaaatatttgagttcagaatattattttatattttgaaaaacatagagttcgaatttttatttaacaaaacagatgattcaatttgtatctttcgcgaaatacaatcttcaaaatagtatttatcctatataatatatatgtatatcaccttttgtacacatccgagtgtgatatatcgactattttcatcctcgtaatgaatgtgatccatagttttttgaagggctctttctctaatcaatttgtttaagggccaacgagtaacaagagactcaaaaaatatatagagaccatcccaaatcaaatcttgtacccaaggatgtgaatagtatacatcctcctatatgtataacaaaatacacccaaattaattatttaaacatgtacaaaaaaattctataaatacatagatttttgaaactaggctacaatttttgtaatgttttttttaaaattttattaccttggcacaaaaatggcaaacttttctccaatttatttcatcataaggttgagtatgaagttcttctctcaattgcaaaataagaggtgtgattggacccacaaatctttttccatataagtatgacataggcatataaaccattcgagaattacaccacaatttagctgcactagtttaaaaatacagaattttattgtataacattttagaattttattgtgaattattctatattatacatgacataataaaattatatgcaaacctgggtgtatgggaagaaagggaggaagaatccaaaattcaggaggcattggattgcatccaacccaatcgaaaagaccaagtatctacaaataaaatgatgaagagaaaaagtgatggaaagcatagtttattgttaattataaagtaaaattaataatcaactgtgtatatatattttagactaatttatagcgtaaataattaagtttaactcttatagttgcagataaatagctaagcttaattttttgcgataatattacttgttgagagtaaaaatgtgacgagactgccaacaactgtgagtaaccttttcacgttgcggttgtggagacaatagacggtggtttgagcgggaattgagtgagaagtttggaattgagcttgtgttagggtgtattctctgtagagagttctagatccattctcaagttgcttacgtacccttatataagggatcaaaccttattgtagttcagttgaagggtagaatagtcatcatgctccatgattcaaatgtgttaacctatcgttgtgggttgtacacccactttctcgcagataccgatccatgacctagaatagtaggtggttgtaactgtgacagtcagtagtcccgngatccgtaaggggaaatactgggtaagctgtgcaatcccacatcgcctgggaaaggtcaagtgggatgattctgagagtgtgtaggtatgggactaca

SEQ ID NO: 86849 - DNA, 559 bp, Cannabis sativa
tttgatcaagttatacactgtgtgttccaacactaagagggtcaaataagatgccaaaaagatatgtaaaagcttcattcaaattcaaacagagccacatatatatcataaaattaagatatgttccaaaacataacacaaaacatatataagtgaagcctccaaaactgtgtaactcaaacattaaaataatgaaagggcccttcaatctcataactaaggacctagtcctttcaagccattggagattgcattgtacgagtgtgtaaatggttaaaaactctagagagtttgcattttccatggcatacttagtaagagagcctccagaggtggggtaggcatgctccgatgccacacaggtagaatcgagagagagagataacaagaaagagaatgagatggattcttgtgttctctttgagaaaggttaaaatatggtattcctgaatttatttacaaaattatcacattaaaaaaacttataagaaaataaacaaaataaaaattccataccctataaatattatataattatgccataagaaaataactctca

SEQ ID NO: 86850 - DNA, 821 bp, Cannabis sativa
agtttgaaaataaaaggaagacagaaaaaataaatgctcaggaattgtaaaagctcagctcaaactttgatgctggcaaaacatttcatttataggcagaggaaggaatacatgaatattctacataattacaactcaccaaatctatacaatcattaccaaataatatcaaagaatatcctaacgataaaggggcaaaagttgttatacaatttgggaccacaaaaggaaagacgaatcctatgagtgatggtgcattgtaacacaggagagaatgcatacagctggctgctgactcattttattttctaacagggcctggggccgaggccccggctgccttaccctttggccggccctgattgtatagtttataatttaaaattataattcactaccatttcaaaaaaaaaaaaaaaaatgaaaaagagtagtagaaaatatttttgtttatgaatatttataatactgcaatactttgtacaagagtgtaatgtatttagtatgtaatgtatttagtgccaattaacaccactcctaatcaactattaatacgagtccctagtaatatatatgagaatatgcaatttacacacatacacgtattagggcggacctacataaagacaaggtgggcagtcaagtccgaaaaaaatatatatatgaattttagttagttacaacatatatttataaataaaaatgatatttatgcgcataaagttttggtataatggaacagacaactatagactactatgatggatcgaatttcaatttcaacaaacaacacttttaactaatgtacactaagatcgttt

SEQ ID NO: 86851 - DNA, 630 bp, Cannabis sativa
tggtagcgattgattacttcagtaagtggacgaaagccgaaccattcgcaacaattaaatccaagaaagttcaggactttgtggtgaagaacataatctacatgttcggattggcgtacaaaatagtttcggacaatggcaaatagttttacagcgagtccttcactgatttttgtgcgaaccatagtatcatcaaaagtttctccgcagtggcgcatcctcaagcaaatggtcaaattgaagcagtcaacaagaccccgaaagatacaataaagaaaagactcgaagatgctaaaggaaactggccggaagaacttcttgaagttttatggtcgtatcgaacaactgagaaaacggcaactggacagaccccatttgctatggcatatggatatgaagctatgctgcctgtaaggctcgagccaccatcccaaagaagattaacgtacaaccaagaagtaaatcacgtactccttgccgaatcacttgatgaaatcgaagaaaagcgaaccacagcaaacttaaagttgatagcccatcaacaaaaagtagctcagtatttcaataaaaagtgaagtctcgaaaattcttggtgggagatatggccctaagaagagtatttctaaacac

SEQ ID NO: 86852 - DNA, 1702 bp, Cannabis sativa
tggagggaccgtatgcgagtatgtggttagcttgcgagttataccttgaggggtattcctataagagattagtttttcccaagttgaagtgggggagcttactaattcttatgtttgaagaatcagggtacttgttcagttttggtatgtgaatcttgagggaaacaatacaacatatgggttgttcagtgcaaggacttgcatgattgctgcaagctggagatcgacaatatgtaggggcgtaggctgagatcaagactgagctagtttgcgacatgttatgggcgtgctttatgtttatggggacactagtgttgtatggcacactttaagccaaatggttcaaagagcatatgccgatgggagatagcggattgggatcacttcaagtcttaagagtaagtctttgtgttatcaagtgtgttaaaagttagtgagtcatcagaggatgcagggttgattttgggagatggacttgtgacacagtgttagtgagccaacacaagcaggagccagagggcaaattcgtggttttgggtgattgatagatcattggcaaagtgaaagaagctcagaggagcatgtatgtaatgggtcatgggaccttttgcatgaagtcatgggtgtgcggtagggctagagggtcaatgttgagaacttcatgaagagatttgatgcaagagtgcacttggtggtgcattgggtgcagttgtcttgcgagcctcgttcagagtgtcttgctcaattgccattaggaggatggtgcgccacggagttggcgtgtgaagtttcttgagggacttgtctttagtggaagcgtgttctgtaggtgccgttgggtacggttggtttgcgaaccgcagcttgaggggtgcgccatacatagtccttgtaaaaagagtatgcattgggcgattggcaagtgagctactatcaaaggatgtgttagcttcagggtcactgttgtaagggatacttgttaattggagggacattgtggtagactcagaggagttcatgttaggggaagtattcttgtgttgaggcactattccatgggtgactatgaataacaacagtggcataggttctttgatcaagtccaagtgtgggcaagggagatcgtcactaagagggtggttctacgaaggtaaagagacaagtgcagacttaggatttgggtgaagcttggagtaagcttaggagtcgagattaggaagattttcctgtggtctgtcaatgaggtcattgacatgttgaagtgggggagattgtaacatgcatgacaagatggcacgttacaagctaggtgatcccacaagttggccaagtggtggtccagtggtggtgcatgttgttgtgtatgctgatgcttagtttgtatggcagtggcatttttgtaaatatcttcaatattgtccagattgggatgggactaggtatttgctatttatttggttctacgaatacaatggtgcaatcagatttgagagagtctgtgatttggtatatggtttggccatatgtctacagagccataatcatgtatgttcctggtagaaggctaaaagcttataatgctctttaagggggagtgcttcgtgtaccctctccaccaccccctggcaccttggtgctaggtgagctactactaatcagtggacctagtagggcgggcatatgaggaccacgaggagactca

SEQ ID NO: 86853 - DNA, 867 bp, Cannabis sativa
cttgttttagggatgagagtgatactagttgcattgatttccttaaaaatcttccctgaaattaaaaagagatattacaacagccaccacttcagaacccgccaaatcgcaattatcttgataaaaattactgccaaaatccatccggccctagagatttgattacaggaatagagaaaatagcatctttaacttcttgagctgtaaactcagcttggagaatgttagtatgttcagaagttaactttggagcaagtctcatcacctcttgactcactcgagctctgtctttcataataatacttaagctatatttttagaactttgtaagtacatgatagttaaatgttaagtcattatatccacatgtcattttcttattgatatatttaagctaattttttaaaaaaataaaaatttaatgactttaaccactcaaggattatcacttggcaatttacttaatacttaattaacatctaggtacctatagaatttttagaattataatttaggtattatattaccacaaaaaattaaacttaggtatttatttacaattaagaataaaacttaaatatttatgccataaattactctttataatattataagtgaacatagattcataaacttgtaaactatatagaatcagaattgcaaaattattatacaaaagagaaatacaacttttttatcatataataacgttggcattggtaatctcatataaatataactcttacttatactattatttttagtactaatgagagtaagaatgagctctttctccaactgtcaaatatacacaaatttttatttcatatgaagcaagccagtactatggctactgaaggccaccac

SEQ ID NO: 86854 - DNA, 955 bp, Cannabis sativa
  modified_base (213)..(215): a, c, t, g, unknown or other
acttacgagatctccacatgaaccaacgaattcatccatcctgtcgaaccaagaataccatccttgtcatcgaataatgaacccacgaacccagaccatccctgttgaaccacgaacccacgaacatgtccccatccccttcgagccacgaacaccatcgtcatcctcgtcaaacttgcacaagaaaatacagagtgagagagagagagagannnagagagagagagagagaaggaaaacaaaagagacgagtttcggggggacttgagttttggggggcgtagtcttgatttcgtggtccaaacgcatcgcccgagtgcttctccatcaccaccgacgacttctccgtgagtgcatctctgacagaaaaagagagatagggacgaatatagaggttttgagggaagaagattttgattttgtgtttcgtttcaacaattagtcgccgggagtttggggtttgctcttgggcaaatcccattgacagagagagaggtcaataaaagtataacgtcctcaaatagcatactaaaagaactagagcttcaacttataacattgaaaaaattacacgccaacttattaacatatcaagaatggtccacaaaacatttaaaaaataaaataagataaagaaaagtgaattaacccttaacaatgatattaaacactaataaaagaaattctcaatagttaaacgataacaactctcaaacaaattatattcaaaataaatttattggcaaaatctcataatagtaggccctccacaaaattaacctacagaaaaataatattttggttagcacattttttaataaaaaaaaataaacaatataaataaaggtaataaaacaattcatattataattttaatactgtactgataaatttaaaaagtcttttgacaaatatatatgctagttttttttttttttttgctcttatggttcgt

SEQ ID NO: 86855 - DNA, 515 bp, Cannabis sativa
atatcctttttatattgtcctcttttatttttatcctattttttaaagtctatcattataacctccttttttaaatactttgtcaattttgctcctgtcacttcaatatactctctatatgactctcttatattagggtattttgggtataatacatataaaaaaaagtatgcttcaatcaaatataaattagaggtagatttagttaattgataaataaaagaagtatttttcaatacacccccatctcaaactcagaagggccacagcgcggtcctcctggaaattttcaaataactgcatattcttgactcagttttcgctactttagcaaggataaaattgtgttcgagcaccatctctttttgaagatagccgaattcttctcataacacacgcatgctcaatacatgcaatgcttccatggctgtgtcctgtaataaccgcgagcatggtatgcagaaaacatgtacttacatgttgatatgtcaggtgagattttttctcagtacatt

SEQ ID NO: 86856 - DNA, 525 bp, Cannabis sativa
taaggtgccaagatctttaagtttgaattgagcatcaagagtggcaacgaagtcgtttagagccatagtgttgttggtggcaactattatgtcatcaacatattaacaaggccataaagaccctgcctggtgtttaagaaagagggaattgtcattctttgactatttgaacccttgttcaagaagggtgctactaagttttgcatgccattgtctggatgcttgtttcaacccatacaaacttttctttaatttgcatacaacattgggggggatgacacctttaggagtatagcctggaacaatttcatgtaaatatattcatttaattgaccatgtaggaaagtattatttatgtccatatggtggagatgccactatttgattacagtaagggcaaacagtagtttaagggtgttgaattttgcaacacgagcataggtgtcaaagtaatcgacaccttgctgctgagtgtaatcctttgtaaccaaacgagctttgcaccttttaacaaacccatctgag

SEQ ID NO: 86857 - DNA, 936 bp, Cannabis sativa
tatatacatatatgtctatatataattgagatatttattttcaaaaggaaaaaaaggaagaaaatatcagtttgatgattacataaagtgatacgtctatacattaatttctttatgaaaaaaataaataaaaaattcttaattagggtttatcatcacagtgaggctgattttgattatgtcttcatatatacttttcagttttatttttgtaaattttcattatttaggactaaatgtaaatttttaaatttttttaaataatttacagtgctctaatagagttcaaacagttgattactaagtgtataagaaaaatatagtcgcgcgtgcgtacaaccaaatatttgaaacttatcttcagcactgtaaattattcgaaaatttttaaaaatttacagatcctacctatataactgcaacgtatgcaatgtattatggaaaaaaaaaataaactaaaaaactctcctaaatatcaaaatagattaaaaaaaatattgacattggccctaggtacacaagccaattggaacctaattttaaaaatattaatattaatattttttttctatacaaaacttctctaaatttcaaataaaatactaatttatctatataattagaaaaatactaaatggtacttataatgcctagtacttttgtaatcggtgtaatattactattgatataattaaatttcaagttccacacatactataatttaataaatattatagaaaactgctaattaaatataaaaaaacatcgtgttatagaaatgtttagtacattaatacccgatagcaatgttaaaaaacattatgaagactaattactctgcttatcctctgcctattctttgctaatgtaattgttctcttgcttttgctgtgtatggccccatgtgcctttttcatttttctgttatgccttttc

SEQ ID NO: 86858 - DNA, 1466 bp, Cannabis sativa
tctcatcacaatttctttatataggcattcacttagggctaggtttagatgagatgggcttaaaataaagacttggactgaagtcttactatcttaggaccgaatatatcatatgggatttagagtttgattttaagcactttatttcaactaataaaactaaagtgtcttttctaattttgccacttatctcatctaattatttatataccaattttattttaataattatcaaataaaaggcaatttaatatatttattaattatacccacaaagagtactaattaacaaataaattatatttttcttttcttctcaaaatcgccaaaacttggtggaaattctcaaataagacagtttatttttgaattctaattgacttgttaaatcaattagttgagtcttcaagatgatattatctcggacaatgtggggaccgagtgcctatgttatcaagctcctaataagtagatcttgatatttaccgagtaaattccctaacttattaatttcttctaactctaatatagattcaaaattgcactcatgattacaaagaacgctctatacaccaagtatagatacactatgaattcatccattgtttcaatcacaacaatcattgatcctctatagacgatttacattgagtagggataaaattactgatttatccgtcaatgtgttttatccttaaaatacttagctacttgtaaatgatattttggataactaatataattatcaaaatgagcactctatcatttatcatgttaagccaagatctaaggaaccaccatttcacttctaataaacataaaagctatagatgtacatttctatgattgacactcccatagtaagctagtaatgaacaagtcaaagaactcatgcaatacaagtttaaccatctcaagatgaaatcaaatgatctatgatcaactaagtgatattgacttacaaaagatataacgataagtttatagtatcttttttattattaatattgatacagtttgatgtatagccattacatccgattgtagtttactttactaatgcctttgaaaaaaattctactcagctaagtgtaagtaaaccttatccctgattatcacattagtgtaaatccaatgaactgatagatcatgagactaaataatttgaagtataaaaaattatgattcaagctcgcaatgtctttgttgataattacttacagaccttgtctttgagtaactctcagactgataacttcgtgaattacttgtgctttcttggttagcataaatgtcgagatctacttccatctcgtgtttgtttactaaactgattatgcccacgagatcgtgactatccctgtgttaatttcttttttttagcatatttaattgacaaaaatattttattatttattgtatatttcgactggtatgtttaatttggtttccttattttgtgtatc

SEQ ID NO: 86859 - DNA, 1840 bp, Cannabis sativa
aagataatttaaacgagctgaagcagcaaaagtatacacaatgtatcagcacaaatgacacctgagcatactcctgaacgcatcagactcttgactatcttctgtgtgttatctttgtagtttgatcaccatccatttataaaattcttctttcaaatcttgatacttaagcaggctttattcgagtcaccctatcgcgtttactactgccttgtggcaacttcaagaggattgtggaatgcttttctgaattcgattaaaccaaattcagatcaacattagatcactttatgaactgatgatcaacatttatgctctggtgggttgcttctaagctaattcaagttttccatactcctgcagcttcagttaacagccttcctagtcattttagtgtagaagttgtgaattttataaccttatttgtttcattcctttttgaatcagataaatttgtatgtatgtatatataaggatatataaaaattgtttcttatgtttgcatatataaagcatacaacctgtggaaataaaattcttgtctcaaataatgcagggaggtgttctcttctttttaaatgctcatatgttcccccattattctttggatgactcacccaacgctggtggaagattaacatttggtaagaaaattgtctcaccttttccatttcttgtttttcttttcttcatttatttatgtttaccagtttttgaactatggtttacatatgtttattgatgttaatattgtaaattaattatatttagggtagaaacttataaattaggtgaaaaagcatgtcttgctctagtacctcatgatattattagagaacaagtaaaatcacatatgaataaatttaacaggtaacatatgacatagaaagtacaaacggttgtgccatctaggaatttcatttaaaaaaaaatcaccattttttttgactaataatgccttctatgatgaaattagcgaaaaaagttttacttagaacagtgtatgactaatatatgcttttacagggaattttatttgtaatatttttgggatgtagttgagaatgagtttaccagactgaaaagtaagaattcatacatccatcttccctcttccacatttattctccaactttttcattttggttgattttttaaaacttgctttctaatataggacatgagacatttttgttgtttattctgtgatgtgctccatttaattttgaattaggattagatttctgatcactgctttgctgcatgaaacttagttttagctgtattatacaactcaacatatgtaaatctcgtttttctgtaaaattgtaccttaagaagcagaacgtttgttattaattttgtggcttcgtgaaataattcatcagtatttcttattcctttgttttaaacaggcagtttcattgatgaattcatttgaaaatctttattacacttttcaacaagcctactcatttgctatttttgcatcgaagtaggatttaaacattggtgggcgtttcatattctggtgagaatcagcataaaatcattccgtttatgcaaggtaatgagtaacactcttcgcattcccttttcccttagtttttgcacactgagggtggcaaagttatatgtttaaaaaggtttccctctctgttagggtagggatttatttgatcgttggaactgattgtttcaattttattctgtttttgaagatttaacagattggtaaatcgtgacgtggttttcattgattggcatggcggcaaagaagtccttccaaaacacattgaggataatgttgcctatcttatgtactgttattaatgccact

SEQ ID NO: 86860 - DNA, 2201 bp, Cannabis sativa
aataaaaatacctacagagtttattattttgtaataactgactcttaggtgataatttttttaattttaatgaaaaaatcctacagattcggttaattcgtaataaccaactccgcatgtattttttaatttaaatgaaaaaacacatatggcgtcggttattttgtaataaccgacgccatatgtctttatataaccctctccagctatcatcttcctcaaaccctaaaataatcaacagcccttcttcctctcaaacccacaaaaccctcgcctaaccacccttttcttttccccatttctttatttttcatctgtttcatctgtttttgtttttacccatttttttttttttttaaatcttgcatttttcatacccaaaaatatatatctttggagtttgatcttttttgtttggttttttaggataaaccgagtttaaaagtggtggttgtagctccggccactagttttggtggagaaatcgttgaatctcaatgtttattcaggtataaatctaatctctaataattttattaatgtaaattcttttattttttattttgtaattttttttaggattttcctatattgttaagattgaattcttgtggttgtgcatggtggctagatttcgataataaggtaaaaatctaaactttaatagtatatatatatgtattttatattttattgaatgtgtattgagtttcattactcttggtgtctatagttgaaattttttattaaaaaaacaaagacacttgacaagtaatgctagtgaaacaattattaatatatgggttaattgcggcaaaactccaaataatttcatttagctagcaattaaaccccgaaacctaaattttggcggcaaaacccctaaaactacaatactgttagcaaattacaattttcatccaaatttagatgttaactgccatatcggattgtccacgtggacacagtgtacacgtggcacaattttattggcccacgtatataattatattaaaataaatttaaataaataaatcattaaaaaaaacttttttgctctttttcttttttttttcttttcttttgttttctttttcatttttttcaaatatcctcttctctttctctctctcaattatgtaggtaccatgaccaccactcaactatcgtcgtcgagaaccaccgagccaggcgtcgtcgttgccgaggaccatcgacccatgtaatcttgatcccgtctctctcccaaccctcttctctttctctcttgatgatccaggtaccatattttcatgacttagatgtcgtcgccgtcgtcaaggaccaccgagctaggcgccgtcgtcgaggacagccgagctaggtaaatcacgatcccctatctgtctctctatttgtcccaatctactctctctctctctctttctctctctttatatctagggtttaatttccataatttttttttttgcaatcttcttgatatatctgtgtatagattttcctatttgggtattattgtattttttgtttacagatatgagaaaagataatggttgtgggggaaataaatttagggttttccagatttgagtttcgggactgagattttatgtatatatttgtgtgtgtttatgtgtttgttggatttggatttgtttaaatttagtttgagttttgtttaattttttttgtgtgatatggatttgaaaagtaggttgcggtggtagtttcggtagtggtgggtggtggtgtttacggtggctacggatgattatggtttcagtagtggtactggtggtgatgtttacggtgactatggtggtgacagtgtatagaatgaagaagaagaataaaagaaaaatattagagaaaaatatattttttttttagaaaaatagttatggttgaaaaaaaatatatacttttttattttaattttttatataattatttacgtagaccaataaaattttaacacgtggacaatctgacctagcaggtaacagctaaatttggatggaagttgtaatttgctaactgtattatagttttaggggttttgccaccaaaattttagttttgagaattaattacaaataaagtaaaattattggagatttgactgcaattaatccctaatatacagtagaacttctattcaagaatacacttgggaccaagcaaattatattataatt

SEQ ID NO: 86861 - DNA, 671 bp, Cannabis sativa
gagatgaccaatttgtcattattcctttgtggaatcaaaccatggggtgattaagatgacgcatcccgtagtgtgggtcctaccaccacctgactctctcctgaaccaccacatcttttggaagaaattctaagcaacatcatcaatcaaaaatgcatcaacaaggtcattcttttatttaattattatcatctcatttaaaaaaaaaataattgttttattatcatttaatttattaattatttttattatcatcaacaatttttatggcaatattatcatcaacaattaatatttttaatttctaaaaaattaattatgttttaatttaaatatttaaatattttttaactatatataatgtaatataataaaattattagtatcctctaattaaaaaatttgcaaaatacattcacatataaacagacaaacagtttaaatattttagtatttagatctatatataatatactgttatttaaatgcataaatctaaatcttaaaaaaataattaaaaaaattaaatgcactgtcactcatatttatcacataaaataaataaaactaggatacaaaagaaataaaataactaggaaaggtaaactgtaattggaatcagaattatcaatgggagaaatgtatcagtttaaaatagaaaataatcagaa

SEQ ID NO: 86862 - DNA, 992 bp, Cannabis sativa
gtcaaatccttttaccatcagttttgaagctaggaaggttagtttcaattttaaactgacacaaaaataacttttttttagaaaattctctattagcgtcgggtatattattagcgacgatttagtaactgacgctaattaataattttttgcttcagtttgaaaactacgccccaacattcccctatactattcacgtcggtcaacgcaatgaacagaagcgttgaccgacgtgaataatgttttttgtagtaatgtttattacaatgaaagaaaatcaagatgcattatacctctatattgtgaaataatacaaggactaaaataagaaattaattaaatatatattacaatacatatatatacactatatgtattgcatatatatatatgaaaagtagaagaagaagaatacaacacatgtaatataatacatatatatagcaagagaagaatatatgtatgtacactcactcacaagcttgagtgtagattagtggggatcactatgacttttttttgctgaacggagatcactataacttgaacaatgtattacacttttgtccaaaagtttatttccccctatctctaagtattaagggacctctcatggaaatagctttggaaattattaagtcttatgattttctaacaatgtgcttttttgatagaaaacttctcttctcaatatgagcaccttagacctctttatatagtgtttaggatccatttgaaattcaaactcataaccccatgaatgttataaattcaaatgtaactcatgcacacatcataactcctataatattaaaaaaatttaaattaggatgtgtaatacctttttacactcttaagattgatgataatagtgaaagttactcgtagtaataagtaaatcctctaaatattacaaaatcatgatacctaatatataatgtcatatatattgcatattagtttgttacacatatttaatttatatattatat

SEQ ID NO: 86863 - DNA, 658 bp, Cannabis sativa
ccacaaagaagcgaccccaaaaattgcaacaaaggctccagcaatcgcaaaataaagatccgtttatataagtgaaatgacgttggcaagaataaaatggatattcatctggtattcggtgagcgcggggaaagatagacactatggcgtcgaaatcgaaacccgcctggttgtctctcttgtcatcgattagagaatttcaagcgatgactctgttttgaattggaacgccaatactagagattccaaccgctcaaccattaaaaacaaatcaatttcatattaacggcagtagaagaggaaatccaaagcgctgttgtcattttttgtttctttcctacgaggaaaatatttatggagattttttaatcgtatatataactgtcggcgcttgaagatattgcccatttgataagataatcacaaccctatacaatttgattgggtatgaatataacaacaagcccaattctatttgttggaagcccattcgttatattgtgtatttggttattcaaagcataattaatggagaacagaccaacttttgtccattcaaattggaggccttaattctcgaagtccaaatgttcggcgtgaccaaaagcaagcacgaaatgatgtttggaattcaactcccaaatgcttccagaaaact

SEQ ID NO: 86864 - DNA, 622 bp, Cannabis sativa
  modified_base (206)..(207): a, c, t, g, unknown or other
taaatatttaaattatttttaatatttaattaaataggaaaattatatttttgttgaaaatttatttttaattaattttggaccaacataaataagaataatttttcagaatttgttttattttagtttataggatttttgaaaattgtattcttatatactttaatttttcgaaatgcatgatatatttatagaaaattaaattnnagttgtaaattaatttaaattatttttttttgaacaaaattagttcattaaacagcaatatccgctaacacaatagactgaagaacatgtggaacattgctctcagtaaaaagacgatcagaccaaaaacaagcaccgcgagcaacacaatgtgcggctttgttagcagatcgtttaacatgacaaatagaaacattatgcagagaagaaagaatcaattgacactcctgaacaaacaaaccaaaaactgatggaagagcaaccgaactattaagagcttgaacaactacaatacaatctgtctcaactagcacattggacaaattcttcgacttcaaccaactcagggcctccttgacactcaatacttcagccacagctggctaacaagccccagaatgcaaagaggaactag

SEQ ID NO: 86865 - DNA, 1360 bp, Cannabis sativa
tttttaataaaatgtgatttttaaaccgtcaggaaactcacattagtgacggttttgaactgtcgcctattctttccgttttatgacggtctgcgacggttatagaaactgacggaaatactttaaacaactgtttaaaaatgtcagaaaaacttatttttgtagtagtgtttatgtattattctcactgatttaacatattattgggatgagcttttgatgagttgggaactactcgtatggctaagatggcttttggttttggttcaatagttcatagcctatttttgaccaatttccacaaataaataatttaaaataatattattcttaatttattttgttgtaatcataaattaataatacaagttatacaattctattattttattagtatttgtcttagttactgtaacatttgatcagttatttgtctttggtctaattattaaatacaagatctatatagccaatacaatgtttatattttggtaaatatatattaactttcagttttacatatacttaaaactcacatatcaaattcttgccatcgattaactatataaatattaactattatttattattgagttgacacagtattacaattacaaatatacttcaaattataaaataacaaataattattttaattttaaaattttaggcaatatttaaaattctgtctgaagttattgtactcaacttccatccgcttcccctcactcttcattttagtaaagtctactctttgtttctctccctatttttttttctgatgcggtggtgctggtgaaggttcttccagttttctatgaggttcttctaactcagatggtgcatcatgataatcactaatggattggccctaatcatgataatcctcatttcgcgctggctccataatgaatagtcttacacaaatatgaaaaacatatattaaaatatacaaaaatataaaaattgataattaagtaaatatgtcaaaaaaaaaaaaaaaataccaatacgtatcgataactcatggattatgagttgatagttttattcccccataatccttccccatcatcttgagatgatatgatatcattccaaacagtgacatcaatagatgctggaataatttaatgaattttttcactgagcatgagatcatcatcactagactctttaaggatatcattctaaacgatgatttcctccgagcttggcttgatagagataaatggttgagtactcatttaagagattacattagttcattgaaatattttttatacgtagctaagtagtttaaggataaaatacattgaagggtctaatggtaaatttgtccctactcagtgtagatcat

SEQ ID NO: 86866 - DNA, 526 bp, Cannabis sativa
aatttactccacttttctctccatttcaaggtagcaatctaagtttgtgtttcatcttcttctccatcccatttctaaacctaaagctcaagttggttttccggccataagttagttgacgagttctcaccatcaacaattatttgaatgctaactttatctatttaataattataattaattattaaataaaatcacaatttaactatatttattaattagaccctttaacatatcttaattaataaacaaacccttaattttttttttcttctcaaatatgtccttcctaagtaaaatttacaaataagacatagtcttacttagaacactattgattatataaataaattaattgagactacaaaacaatattatctcagttagtgtggggtccatgggcttatgtaagcaaactcctaataagtagatcaaaaatttaccaagtaaatatactagcttattaattcctcttaactccactatagattcggaattgcactcttgattacataaaacgctctat

SEQ ID NO: 86867 - DNA, 573 bp, Cannabis sativa
ttttgtcgcctctaaaaaggagtattagggatgaagtattaagagcgacaagttagtggcgacttgtcgtccctaatacattttaaggacgattataaaagtttttaggggcaacttttgtcacccctactactatcttttctagtgatactttcatgttaattacttcaaataaaagtttcataactctatcattatcacatattggtaatcgttggcctatttttttgtatgttgcattaaaaaattgattaagatgtttaaaattaatatataataaatagtatatttaattgaacaagagatcaaatatataacatgcttgaccatatagatagtgtcaaaccttttgaatccaaagtcatatataaacaccaccatatttggccatttgcccttaattttgcccaaaatacgtggaccaatgcgactgcaacatgtgaatttgaaaaatatggttctaagataatttaaccaagtctttttggatcaagagtatcaacaagaaaatacctctcggagaagatatgaggggtccacgtactcctagaggacagagctatggcaaagcac

SEQ ID NO: 86868 - DNA, 694 bp, Cannabis sativa
tgctgcaaacccctctactcccaaagctgttaagtccaaggagtctggaccaccgaaggttttgtctgaactggtcaggagtgatcctgaacgggtgcgggcacctactccacctttgctggtgctttcggaggccaagaaggcaaggagatgctggcccattacatgaactggctggttcctaaggtcagtgagcaactggctggtgctgataattactcttctttgaaattgctggtcggcggagtcttgaaggagttcaccagggtaagcttttcttcatactaccccttaatcttccatacttagctgaatattcaaaagtttttccttcgcgcaggctggtctgaagttggcctacatttactcctgagctaagtctgctgcttccaagaacgcggctctatccgacaccctaagggcggaggcagacttggccaggaaggatgctgaagaagccagggcggaagtcggagctgttcggtaggaactcggtgaagccaacaaggagttgtgctgactaaggatctcgaggttgctgactgttttgaggagaccaacgagaccttatctactcaggtgaacaatcttcaggacaagaggatttctctacgagcagttcttcatctgatcaaggaggaaaaggaaggcaaggagggggagcttttggtcgaggtggacaggttgaaggaga

SEQ ID NO: 86869 - DNA, 933 bp, Cannabis sativa
ttaaaatatcgagctactttttgttgatgagctatcaattttaggtttgctgcggttcatttttcttcaacttcatcaagtgattctgtaaggagtgtatgattgacttcttggttatacgtcagtcttctatgggacagtggtttgatttctacaggtagcatatcttcataaccatatgccatggcaaatggagtctgtctggttgttgttttctcagttgtgtgatatgactataatacttcagggagttcctccggccagtttcctttggcatcttctagtcgtttctttagagtatctttaagtgtcttattgactgcttcaacttgaccatttgcttggggatctgccactgcaaagaaactttttatgatcccatggtttgcacagaaatcattgaaggactgactgtcaaatttgtttgccattgtctgagactatcttgtatggtaatccgaactgacaaataatgttcttcacaatgaagtcttggacttttttggacgtaattgtggccagtggctcgacctccgtccacttggtaaaataggcaactgcaaccattgcatactgtactctgcctttgcccttgggtaactatctaatcatgtcaattccccaaatggcaaaaggtcaatgactttgcatctaagttagttcattgggcagtgcacggggtatctttgaaaacctttggcatttatcacacttcttaacataggctttggaagcttcgatcatggttggccagaaataaccttgccttagaattttcttagataaactttgcccagttgcgtggttgccgcagaatccatcatgtacttatgaaaaaagtcatacagcttcttcttgtgtagcacacctgagtagtggcatggagaatcctcttctatacataactccctctacaattatgtatcgtgcagc

SEQ ID NO: 86870 - DNA, 524 bp, Cannabis sativa
aataagcctgctgaggatcttctgtacgaatgtacatgggcatgtggtctgaattgcaagtatggagcgattgaatcacaactttagggaaaatgggtaaccactcctcatttaccactgctttattgagggccaatttaatatgtttaggcccctcgctatggttatcccatgtcaggttgttccctttaatgggcatgtcaatcaaagcatgactcttaattagctctgtgatgtaagggagaaattggtctttcccctttgacctgacacgctcagaactacttaaaacaaaatttacatctcccaagatcatccagggcccgccaaacttcttatagatttcaataatgcttgactagaatttcttcttctcatggaagtagggggtcgtaagcacaagacaataaccaggggtaatgctcaaggtcacaataaacaatgccaaaaatatgttcttagagatacaaatactttcaaaaataaaacctgctttctaagctcaaatgatacccccccccccc

SEQ ID NO: 86871 - DNA, 738 bp, Cannabis sativa
ttagagaatttctatcaaatatttagtaaaaattctcatattcattcaagtgtgctttatgctaatttcttgttattgattggccaccaataacttgatgttgagttatatttaattctggaaaggttaaatgtaatggacttaacttggataacacaagttcttaatcttgttagattagattagagataacataggaatatgttatgtccttatgtaacatttgagaactatgcttggaaattgtattcttgagcttgattggcataggaatatgtttgattaggttcaaagattgatagcataaaatttggaaaagttttgtgcactttaatggagttcttgttaacctgggatttttgctaaggttttgctaacgttttgctgcagcaaaacgcacagtttctgctaaacataaggggattcagtagttcaggcctttcacattttaatagtttacagttcatttttattttcattgtgcaaccattttttagttaatttactttctttctagtttatttagttaaagcattaatcagtccaatttggtttttgggcattttgcttggtaattagcttttgcaatagaaattttatttctacagaccttatggagaagatactcgttacttatcattgtattacttatttgtgactacgggcatttgcgtatataaatttagcacaataagttttggcaccgctgccggggactgtaaatatattttgttgtaa

SEQ ID NO: 86872 - DNA, 1177 bp, Cannabis sativa
taaagattcttctccactttcttcccactctgtttgctatgctgcttcttttaatgatatcaacacttggcattgtaaattgggtcatccctccacatcaaccttgtcccaaatattatccaatatacctcatactggctctctcaaaacacttcagttttgcaatgcctgtcaacaaggcaagagccatagacttccttttccccaatccacatatcgtgccagtaagcctttagagttgatccacacagatctgtggggcccttctcacattcagtccaaagatgggttcaaatactacatccattttcttgatgactttagtagattcacttggatctaccctttgtctttaaagtctcaagctcttgacatgtttcttaaattcaaaagtatggctgaaaagcagtttggtttacccatcaaggctgttcaagctgatggtggtggggaatacaaaccttttaaaaggtttctgagtgaccaaggcattttgttttctcacccttgccctcacactcatgagcaacatggaagggcagagaggaagcatagacatattgtcgaaacagggcttacccttcttgctcaaagcaagttagacttcacatactggtggcatgcatttcagtatgcaacattcaccatcaacaggctgcctacacctgtgcttggcaatattagcccctttgagtgtctgtttgggatgcaacctgactacagcattttgaagccttttggttgtgtgtgttttccacacctcaggccttacaattcccacaaaatggattatcggtctgcactttgtctgtttcttggttactcatcctaccataagggctacttgtgtgagaatgctcaaggtcgaatctttatagcacgcaatgttgtcttcaatgagacatgctatccagggaatttccaacttccaacatcagatcaggtactatctcaacctatttctcatccttctgcaagtttcaatacatctaacttgttgataaatactaatacaagtgtctctactggtgtgcaaccatctgctgctgagtccgattgccctcaacacaatctccctgaaccaacactcagaaatatctcacctgatcccaccataaatatatcacatgagctccctcctataccagtttctaccaatactatgacagcccataca

SEQ ID NO: 86873 - DNA, 779 bp, Cannabis sativa
aaaaaaaaaatctctttggttaactaaatacaaaaggaactaaaaggatgtttttattattttttttttcaatgataaaatgatatatacagtagcttctctatttaagaataacttgttataaaaaaaatcaagtcttaatttggaccagttataaataaaaataacctctaaattgtaattagttatacattttttaagttccgtattaacaaagtatacctctatataagaataattacatcgtaataaaatatatacatatattttgtaaatttatctatgtaaaattaataattttgtttcaaattataatacatttataaacattatatttattctaaaataattctattgtgatagtattaaagattgtttattgttagtattgttacattgatatcttttggtattttaattttttttttaatgtaactgtattaattataacctctgagtagtcacatatcctaaatgtattcttgaataaaggttgatcattataaaaagtaagttgtgatgatatattttttgagctaaaatagctattgaaattagaattttttttttcaaaaaaatggtattaagacggagagtgaataaaagaaagaagaaagttaaaaaaaaaaaagccaaagtataaagagtgtataattacacgtgtaagattaatataatatgtatggaggataaaggataattgaatatgtatacacgtaattaataggaataattagataaggcaccattttttctataaaatatttatatttttacgt

SEQ ID NO: 86874 - DNA, 3346 bp, Cannabis sativa
taaatagtactaaattcttatttagaataagtatatttagaaaacctaatcgtagatgtataacagtaaaaaccaatctttttttttttttttttgatgtaatgagatttattttattatatataaataaaaagtgaatgtctcataaatcattttatttttaataataaattattttatttttaatagaaataaaaagtgacccatgaatttctcataaaccaataattatgttatatagtcactttatatagaatagatagatatgtacctgtttggcaatggatttggagaaaagtgcacaaacggatagcataaatacaagataaaacaatgaatgaaaaggattggctgtcatatcttccatgctgcacaataaatgaatcaaaatcttcagttcagtaatattaatatttaaaataattaagagagaaaatctttaattagttactttgaaggtgcagtaatataataaattataccccgaacaacattgacattctcagacttaatccattttctcaaaagatttataacaaagtttgcactgtacctcctgtagatcagtaattataaataataaaaagaggttaatcaataaaatctatctgtctatttaaaatcaaaattattatgtttcaatctgcgatataaaattgtgtaacaatatatgaaacagtatgatacaaatcaattgacttaataggtaactaattaacccaacttctgatataaaattatgatgttaaacgcaatcaattaatctaaattataaatattgaaggactgagccgagaaaagagataaagggtcgagcgagagagatatttgaggatatgcgttattctgagcagaggtttatatatgattaatagtaacgctcagaaaaaaagtattctaatatcgacgtgggacaatattctctaattcctctcaagatggtggctatttttgctaggtgtagatcgaaagcccgttagggatatgactctgataccatgttgagaatcatgggattccatctcaaaaccaattgactatgactggagtagcccatgttcttatatatgattcaatattttcacatttaatccacatattctccaataggacccatccacctcactggtggccccagcttgtttgttgatgcagctgtaagaggattgctcagttttggggctgccattctttgcaatggtggtgattcttcgtatgacctttttacctcaaagattattatattggcccaaaatgaattgcaataatgaaactagtagagattagttacaagaggaactttcttattaaaataacatttccaaaagtcaagctgcccactgaggctcagagatcatattcgattgagtcaactcaaagaggagacagactttaaatctgaatttaacgaataaccaatttcaattcaaggaagaagaagatatagagtatccaacaatgaaggtatttgatatcctcaaagaaactctcacaatttttcacaaaaacaccaactttattttcttcaccattctaacatcactgcctctgttttgtttcttgatttattatgaaaccttcctccaaaaattcttgtctaaaagtactgaaaatctcccattaccaaaaaagacaggtctttttattccttcacttggtaacccatggcttttaccaattgatatgtttagaaatataaacaagtaccattttaatgagctttttcaaatgtgttttctctatttggtaccccttcatctcctagagttcattaacttaattttcactgttgatttgtcttcaaaaatttacagagaagaaaaagctttgacattttttgatatgtttcatctaaggatcgaaaaagtcagattaagagccacttttgttacatttctctatgttgtgttcttatccacatgtactcttctcgggtttatttggttactagtaacctattctgctgtttttaggctcttcttcacacctgaaagaagtggaattgttttgaataattttgaaagggtatcttcattgggatttaatcttttccatcatctaatttatgggtcaaatctattattcttggtgataatctacttgccttggtgtgctatatggaacttgggtcttgtgatttcaatcctggaagggatttgtgggatcaaagctttaggctcagcagcttatcttagcctaaggaatactcagaatggagttggtttggtgcttattttcactatttgggaattgggtttgagggcactatgcctctactttggctgctataaaacatggtttgggattattggtttgatcagtttgttatgcttgggaaatgcagttaaatgggcctcttttgttgtgtattttcaagattgcatatggcgagtttctaagaagaaaactggtgaggaacaaggttaaagcattgtttgtctaaagtggcaattgaattgtaacaatagattaagaattatttttgttttgatgagaactaaagatttatttaacgtagagtggaatatgtatatagaattttttttcattttttttaatatttttacggaaattcatgtaacaactcatataacaattgaattaatgtagcaatataaatcgcaatttaaattcatatagtaacttatataataattattattattttttttttaagaaaacttatataacaattattagagcaacccaaactgtaaaaataaataaaaaaaaaataagtgcatatactatacataatgcaacttgttttgataaagtttgaattttgttttgatgagaattaaagatttgtatggtaaaatgtatataatccagtccaattctattttttagtgcataattgatgcacttggttggggggtttgctgtcttatttatcttttatgtaaagttgattaaaatttaaaagaaaaagagaaaaaatatttcacatttcatttaatttagtcttcatttacgttttactaagttattattcttttttctttttagtatggtaagagataagaatatttaatttgcatttaggaggaattttactagaaaaacattgctattagctctagtataataggatagaaaaatatcaatgtcattgatgaatatatttttagaatcacctttatttttacctaaaattagtgtatctcatttttcaatttaggtttaaaaaaggaatagttaaaattcatttagtaggaattgtatagaaatataggtatttgtaaaataggataggctagatatattactgtttatttatgaatatttttttgaatcaccattatgtcttataatttttttttttttgaaaggaaaccgatac

SEQ ID NO: 86875 - DNA, 1825 bp, Cannabis sativa
  modified_base (363)..(368): a, c, t, g, unknown or other
  modified_base (1662)..(1673): a, c, t, g, unknown or other
ctcactttggttcaatagaagactccaagagattctgatagatcttctactgttggaactttgtatgaaattatgtaaaaaaaaaaaagtgaagtgtgtgatattgcaaagagtctcacgtgagatataaatagtacttatttataagtgtatataagatggaacaatgagattttggttccactactacaatttggcattttaatgacactatataatcacccatatttttgggcagcttactaaaaagttaggagtgatttttagtaagagcattgctattaagcactagtggtgcttaacaccttctcgacatgtcgcgttacgattggctagcgatacttcctaaaagctattatattnnnnnntatgggacccgatacttaattggaccaatagcgatattgacacataggagggtggtaggcaccactggtgctctttagcatttctcttttagtaacctacattttgtgtgggttactaaaaagttaggagtaattttaagtgacccacataattagactctaaactttcggagctagtttcatgtaatgtgggtcactaaaaatatgaaggacatgagaaatacctagttttcttatttttttttatatatatttaaaatgctaacccatagttaaagtcaggccgagactgagtgggaaaggatgtcccaacctgccttatgcgtcactatatcataatcatatatctaattattttaattataagatttatggtatagtgacacgccaggtatatcaggacatgtatacccagtcatgactggcgtgtaagtatatgttaaaaaaaaaaagcaaattagtttcttaatttttttttttaattttattcatttctgtaaataaaacacgtgggtataaattaaagcaaaaaattaaaaccctaaggccccaaaattatttttcatcttcttgccatcctatgtccttcgacactctctctactccctctgtaccctcctcgacaataacctccaccagttgttctttggccgtccttgcccaaggcaaaccctgaccatgcgttccctttctcgtccctctacacatatttgtctttccctctctctctctcgctcctcctgactccatgccaaagagccaccaacgaagacgtttggtcgtgcggcgacaccattctctccaagcatccaccttcgttctcctcatgcggcaggctattgcccaagaacaaccttcaactttggcaatctttaatgagatctccacttccattaacctcgcatatcctcctctcctctctctcgtatatgtattatttttggaaactaaataatgtatatatctgtataaaggagagatatgagacggtgacatgacgctctaattctctccttaattttctcatttttttaattttttattagcttcataaatattaattgatataaaatacatacctctatttattttctccttaattttattattttttttatttttcattaaagttattacttaattttcttatttttttttaatttttcattagagttataataaatattgattgattaatttattaattaatttaaaaagaatctaaccatacttttgaaaatctaaaattatatatgttttacgtattatataactaaggtgtcgtttggtaacnnnnnnnnnnnntaattttttaatcacaaaatgaaaaataaaattttttaaagataaaaattttatttttgaaaaacaaaaattgattctgtaattacttttgttttttaattttaaaaataaaaaacaaaagtgtattttgtaaacttcattttcattttcat

SEQ ID NO: 86876 - DNA, 658 bp, Cannabis sativa
taccaatctctgatgtcaaacgtaggagaacatctatagaaggttctattgatttggatccattagatgaagacatggatcacaatgacttaatgggccacaatgctgactcggcccaaactgttccacaacagcttatcaaaaatgacactgagcttccaaaaaatgtgatattggcgggtctcgacgaggctcgccacgcattatgagtattctaagctggaattgccgggggcttgggaaccaacggacttctcagttcattattgtgcttaatgctcaaaagagacccaacatcatttttttgtgtgaaactctttgtaaaaaggccaaagttgatgaaattaaaagaacaattagttttgaaggggcttttactgtggaggcccaaggccatagtggaggccttgctcttctttggaaagataatgatgagattaaattaaatggttattctaataaccatattgattgttttgttaccagtagcacttttcctacctacagactcacgggcatctatggagaacccaacagggctcttcgtaagaacacttggcaactccttcgcactctccatgtttcgaactcctctccttggtgtcttattggcgacttcaataatgtcaccagtcaagctgataaaaaagggggtaac

SEQ ID NO: 86877 - DNA, 583 bp, Cannabis sativa
  modified_base (403)..(409): a, c, t, g, unknown or other
aatctgtactgatgaaattataggaaaattacagttttacaaacattgaatacttatactgctaaaaataaacattaaatttatgtcgcttgcaatcttaaaattttaagtatttttacttctatttaccattatatatattctagaaagaaaaaaaaaacctaattagttactcattaattttctttatcaattactaacgtccaataattttgtatatatatgttctttgcaagttgtcccatataatttctttatttatatatgtacatgttgtaaaagttaatatccaaaaaaaaaaataaacaaataaatatagtatatattagtaggtgagactcgaaatttaacttaattaaccctctctttatttttctccgactgctctctctctctctctctnnnnnnntctctctctctctctcatcaaaacgcccataaccaccacatgtggagcactgatgaccgaactccagtcaccatccattcacacacgtcaaaattgcacgaccaccgaccggtggtgatctcacaccttaagtttggtgacaattagagctgagacacactcatatggatggtg

SEQ ID NO: 86878 - DNA, 762 bp, Cannabis sativa
agagctatcgacatattaaagtttttgaaaggcgtagattgtttttctaatataattattgcatatagaattttgttggttattcttgtgacagttgcttctgcagaaaaaagtttttcaaagttaaagttgttaaagtcctacttacggtctactatgttacaagaaaggcttaatggattagcatcgatagcgattgaaaatgaggttttggagacgatagaatatgaagagttggttgatgaatttgcttcaaaaagcgttcgaaggaggaccctttttataatagaatgttgatattggcttgcagttgtattggaattaatagcaatattaataaaattgtttgagtttttgggtgcttaattatgtaaaatatactttcgtaatgtgataatatttaaaaatattatttataatttatattttttttattgttaaaggcctactttttaaaattagaacagggcccccaaaatatttgagacgatcctggtagtggtccccaagaaattctgggatttttgtattctctccttccccataagagaaaatactttagaaagatagtgtgttcttggagatcaaaaccttctctgcaatctccaacaatagtttcaggttatcttttatcatcatctttttctttagtttaacaaaggttctataaatttatgatttaggattttctatattaaaacacttttaggaatatgtttagatttatgatatattgttataaatattaataattatgtggat

SEQ ID NO: 86879 - DNA, 2562 bp, Cannabis sativa
tttcaattgattattaaaatatagaattgtaggatctcaagtaaataggagcttttattggtttctttaatagatcacaaggatatacagggacaagcatttttcctggacatttattttggttgatgtttctttttgactttttgcaattgtgtacgttatttcttttatatttctgggtgatcttttacttgcatagaattttatcaagatgttaccttgttatacttattatattttagtcaatttacacgtcttactcaaatttcacaagcagaaactagctttgcaaatctcacttattatcttttaagaggttaagacacatactttgattagaaaatagggttagggatactgtacaagagaatggaatgtgtttaatcattttaacttcacaaaagatactaattctgaatcatgcattttatgccagccaacatttcaattcttccaaaatgggaagaaggcagccgaagtaataggagctgacgcccaactcttgaaaagtacaatggaaaaactatacgagtaacttccaccagcccctgtcttccttttctgtactttgctctttttttcattttgggtaaggaagttaacaatttgatattttaaaacatcaaataaaatgcagttcaacttcatgactaccgtatgttttacaaattgatggttcttacttaacatatgttttcaatttttattaattaaaagttaaattaaaataaaataaatcatgaaatagaatgtcattccttgtaaaatattggcgaattattttatttcacttttttctttaatctatatgtacccacaaaattctcctgggaatgaataccatacaataaattttcattccttttaaataaaatcagtgtggagccttaattctgatcattttcatgaccaatcaaattctttacacttagcgatagtggtaacaagccacttatattacctgccaccaacgggctcttgacatatttacattgctcgaatgacaactcaatgaaaaaattaaactttcataggaaccaataaacagaagtcttatattcaatactagatccttttgtatgtatgaacccctttgacatttaccgtggatgaacaaaatttgaataatggtatttgagctcttatcgagtaatatccatttattaatctgtcattacaaaccagttggtccaaaacctgaataatttggaagtaaactcatttggttaggtatgtgatgcacaaatagattaacagttcaataagtaagataataattagaaaataataagtaagaaattacctggtggtcgcattggcattggcatcggcatcggtgcttgtcttggcaatcttgtggggattggtattggtgcccttgtgggcaatggaattggtgttcttgtagaaactggcatgggcattggcgttctccttggaaacggaagtggttctttaatgtcaactacaacagcatcggacgtcagaaaggttttggctactgaggctgcattctccaaacaacatctaactacctgctcaatagtcaatacattaaatatatgttgcaaaatgtgatttcatcccataattttttacaggaagagaatatgaaatttgcaaattggaattcaaatatatatccgaatgttttgctgtcattagtgttatcactgaactaaatattaaacaacataggtgtctagatctaaacttcttattaacacactttctggttacgttcttcaatgtggaaagtataccatacttgcatattctttcacatttcattttgagttttctttaaagaataatgagtatttttacccttttaatttatgatactataagattgtgccccttaaatacaaataattatattaaatctaagatcaattaaatccaaaattaaaatgtttactgatatttttgaaaaacgaattattcaatattaggactaaagaaaatacgattaaaagaatcaaatatgagaacactcaagattttacgtggttggggtagtaatgagccttaatccacgagtcatcattattatcagataggctacaaaagcctaaaggattacaatgaatatgaaccctctattctcttctcaagcttgtgaggtaagaaattctaatcctttgcatgaaggattcaatgcgtatttatgagtatggaggttgtacttagttactcttttcctctaatggggtgtttatagataatacatttctttggacttatcaagtgaagcctagctcatgaggcagtgactgtatgctgacttggtatgttgatcacggttacaactatttatactgtgtcttctgattgtggataattaatgcaatatcaattacttaatcttcaattatatagtttcctattctagcttgatatttattctctgttagagatcttaggaaagtgattttctaattctgcacgaacaataaataggaaactacagatggcttccaggtacacactggagggttcttctagttacacagagctaggatcttcccagacacgaacaagccttggcggagactcgtt

SEQ ID NO: 86880 - DNA, 1220 bp, Cannabis sativa
tcaaaagagattaaaatattatctgttataagacactctagaagaaaagcgctctgtgtctcagagataacatctgccaacaccatcttcaatctgtttgccacaaccttcgaaataattttataaattacattgcataaagctatgggccaaagatcactcatatgttcaggtcttgacttcttcggaattaacatgatatgcgtatcttttaggaagtcaggaaattcactaaaagtaaagaaatgttaaactaacctcaccacatcaagcccatccacatcccaaaatttttggtaaaacccaagattaagcccatctggccccgttgacttgtcggggtccatttggaacaccactttgctaacttcatcctcagccacaggagccaacaaccctaaattttgatcctccaaatagcacttcgaacacatgaagtaactctttcccagtctgagtttgaagctataaacagctccttgaaaaagtcttccataacctcattaagaccattctcccagccaacccaatccccttccccattcttcaaacacacgatttgattgattcttttatgagaggtagcacaaccatgaaaatactttgtgctttgatctcctacttaaagccatagctgcttagagcattgtctccaaagcatttatttttgagtaagaacttcaaacaattgagcttgggtctccttatatttcttcattgactcatcatttcttctgctctttaagcacttcaatatcttattacactttttcagacgctccttaaaatttttattatatcttttccccattctgctagagccgtgctacaacacttaatctttagttgcaaggaatgactctcataagctgctcaattatctttgacaatttgacgacacattggctctcaggcccaagcattttcaaaataaaatcttcgaggtgcgaactcaggtgtagccaaaacaagacaaaacttgatgggactatgattagagacgaaacctccacgatctccaatctagctgatggaaaaagtgcattccaagaatgagatatcaaagctctatcaagcctcacctcaacccaaatatttgtaccctttcctctttcccatgtatacgaatgaccaaccaaattcatgtcaatgaggttacattttgacaccacctcttaaaggtcggccaacaaccaactcgggtacgacctccctttcat

SEQ ID NO: 86881 - DNA, 2703 bp, Cannabis sativa
gtatttttgtaaatatttgtatgtggactgtataaatgtttaatgggccggcccaaagtatttttgtaattttttttctttttttgtatttttttgtttttttccctaatataaatgtaaaaattagattgtgagggtataaatgtaaattttcggaaaagaagaaagttagtataggttacaagtgacagtacacaggttgtcacgatgtcacgaggccattgcataatgcatacaattacttgatttctataaatatatgcttccgtaattgtttgggcacagcccataactgtgtgtctcactcccaagttcccaaattaaaactctgtcaactcaaccatgtccatggctcgatctgaaaccgcaaacaacctacatgttgctgtccttcctagcccaggtatgggccacatcatccccttattcaaccttgcaaatcgcctagccaccgaccatggctgccatgtcagttacctcaacattactgccgaagcctccgctgcacagacacagctcctaacttcacccaacctcccacccaaccttcacatcgtccacattcctccggctaaacaaccaacccacttacctcaagaagaacagagtactctggctttcaccagactctgccacatagtcgatgacaacctccgagagctaaaatccatactcctccatctcggaaaaccaaaagctctcatcattgatatcttttgtacccaagctttcgaggtttgtaaacagctttctattcccgtttacactttttatacagcttccgctgctctttttgctttctcgctttatctccctgttatggatcgtgagataattgattgcgagttcgttgatcttcccgagccgattcgggtcccgggttgttccccgattcgaacggaagatctcatcactcaagtaacgaacagaaaaatcgaagagtacaaatggtttttgtttcactctagccggcttcccatggcagctggaacattgttgaacacatggaatgaatttgaacccataacactcaaagccataaaagagaaccctttttatcaccaaatcccagcaccacccatttacccgatcgggccattgatcaaagagactgaaccaattacgatatccggtgctgagtgcctagcatggcttgacagccaaccaccagagtcggtcgtcttcgtggcgctaggcagcggtgggagcctaacggaattgcagctgaccgaagtggcatggggactggagctaagtgggcaacggttcatttgggtgattcgagccccgagcgacgtggatcctacagcagcgtttttcaaggcgggtgatactgatagtgacgacccaagaacatttttaccagctgggttcgtggagaggactaagggagttggtcatttggtgtcatcttgggctccccaggctaaggtgcttggccaccggtcgactggtgcgttttggtcacattgcggttggaactcaacgctggagagtatgacttatggggttccgatgattgcgtggccactttacgcggagcagaggatgaatgcgtcggttctagtggaggacataggtgtggctgttaagccagctgtggatcctggaatgggagaggtggttacgagagaagagattaagagggttgtgagtaagataattgaaagtgaagaagggaaagccatgaggcgtaaagctagagagctgagtcaaagtgctgccaaagcattgaacagcagcggaaatggatcttcttatgagtcacttgtccgtctagtccacaaatggaaagcaaatcaggtttaattatgttacaaaaaaagttaattattacgtactgttgttttttaagttgtctaccgttataagtagattattaaaggtccctatataggatagctccattacatgcaatcaaataataaaatcgagctatttcttaattcaggatgttagatttaggctaattaacattttttttttgtttttaactttaatatgtaataaattttactttatgaaattttaacatcgttaaaaatctcttataaatcattgagattgttggatttaaagacttttgtttaattttagtaaggaaattttaacatgaattcaagggacataatttgatatatgttaaagttcaataaacataatttggtagatattaaagtctagagagcatgatttagtacattgacaatctccgaattagtaaaattcaataagattggacaaaaattcttaaatctaacaatttaatagttcatgaagaaattttaacggccaaaaaattcagaaagcataatttggtatataatgaagttcaggaagcaaaaatcataattagcctaaattttataattgagttttagtgtcttttttatcaaaataataataataataataataatatagtaattgcaatttatatgctttctcggtcgaatctcagtcttcaacgcaatttgtctcctatataggaatattattttgaggtggcgctttataaataattattgatttttttataatttttattaaaataaattaaatgaaattcgatattaaattgcaccaataattatattacaccttataatagtactagtcctcatgggtatcctttaatcagggctggccctaggcataggcgggctaggcccgtgcttagcccatactttctgagggcccaaa

SEQ ID NO: 86882 - DNA, 612 bp, Cannabis sativa
ttttttttcctatagcccatttcaattcaaggccggccctgactatagtttagtttggttgagatatagtagtttgggaatgcctaaacgtagatagctaggctgtatggtagctatattttttttttcggttaaataactcttttgagtttgactctacctttttaaatttgttagaatttcatttcaaaattaattaactataaaaagagtagttcaccgatcggatctcatggttccgtttaattttgcttctataagttctttttaactttttaaattaaaaaagtctttctatgtgtgtttagctaaaaaaataaaaataattttttaattaaagttcttttagaaaaaattaggatttatagcttcttctttaagcataataatgtgggacttacatcttctagctaggatatgtggtgtgttcaattcgggtgaaaaatcacataacatctttttttcacgttcaagtttattaaagaatgctttaaggaagattgtgagttggagaaggatgaaaacaaacaaaacttaatttggagagctgctagagtggaaggaaagaaaatattcttttgtttggtagcatattaaagtgttggaatgtca

SEQ ID NO: 86883 - DNA, 646 bp, Cannabis sativa
gtttctctcctcagtgggcatcaattttgataatcttaagcaattgtttttgttcttcaagtattcccaatagaattaggactttgaattcccttgctcttgtctggggggttattttcaaaaattagttagcaaagaaaaaaaggaaaaacttatcatttttttacttatctcttatctttttctttgagaacttgaaattttcttgtattttttttttttttttgcattaggataaattgtacttgaatcctaatcctactgttgacagtgaaaactcatcagctaacttgaggtcaaaaattctaaatttggatgtgagacttaggaccaagataaatatttagagatataaaaacctaagaagaaatgtagaaactatggagaaagatagaagtgtatatttctttaggtcatgtgttacaataattttccaaccccctctctcatctgagaatatggtatttgtaggctttgatggcttgagatacacttgtgatcctcaagggacaagctggccttatgtggttgcaagttgcaggtgtaggaggtggtcctaagttacaggagtagtggtttcagagtacctattgtcaggatgccaggggttgcaaacaacacgtctccactacttgtaccatctcac

SEQ ID NO: 86884 - DNA, 847 bp, Cannabis sativa
atcattctatttatatagtatactacaactacttcaattaaatatgttaatcatattaattattctaccatgacatttttgagtttcgatctctttttcctcaactatatattaattaatacatagatatttgttaattgattaatgatggaagattttatcttcaagaaagatgagccctcattaatagccttatcttatctcttattgtattatataccatgaattcttcttcttagcaacaacatatctttatatatataattttaggtgattttcttctgattataatttaggcttattattaataatagagggaagagtatatagctttttggaacaaaaaaagtgtatacaattcaattaaatagcattaaaatagagattattagttaagtatgcagcgcaaggacgcgcccaaattatatgtaaacttaaatattaaaaaaaaattaagtacacttaattactacaaacataacaatttatatacttataatttagatacttaacttttacaaatataataatttatatatttttgccgctaaagaaataacttcagtaatttaataaattaaataagatatatatgatatgtcatatatttatatgagcattgctatagggtattagtggtgcccaacactttttataggtggtgtctcatgattgattagtgatatttcttaaaaactatttttttaagttatatgagacctgatacttaattacaccaataatagtatgacaccgaggaagatccaaggcaccaataatgctatttagcaattctctatttatttactaattcattgagaattaggtatggtcccctaccaagtac

SEQ ID NO: 86885 - DNA, 752 bp, Cannabis sativa
atggaggtatatgttgacgatatgctcgtaaaatctctacacgaaaaagaccatgtccctcacctacattctatgttcagaatcctgcaacactacaaaatgagacttagtcctctaaagtgcattttcgaagtaagttcaagaaaatttcttggttttatggtaaaccaacgaggaatcgaggcaaacccagcaaaaataaaggcactggtagagatgtgatctcccaccaaactgaaagaggtccagagcctaacaggtaaagtcgctgcgctgaattattgttttgtatctcgttcctttaacaaatgtaaagaattctttcagattctaaaaggttacaaaagttttagtggactgataaatgcgaagaggctttttaggcactaaaatcgcacctggggcaacccacgatactatccaagccgatgcatagagaagtgttatcaatctacctggcagtgtccgaatacacaattagctcggtgttaatttgtaaagacaaaggtagacaacatctggtttactatgtaagtaaacgcttactagatactgaaactcgctatctggaaatggagcgattagcatttgcactagtagttgcttctcaaaagctgtgaccatatttttaagtacatagtattgaagtactgacaaactatcgcttacgataagtatcggcaaaacctgaaacgtcagggcgattgcttaaattgtaatatcccgaaaaatatattgatattttaattgga

SEQ ID NO: 86886 - DNA, 980 bp, Cannabis sativa
ccatatttataagattattaaattaaaaataattacatataatatattatatatatataattttaataaactaacaaattaaaaaagattaaaagcttacctgagaccaacaacaatgcaatgcacataaaacttatgatagtaatggtgttagaagaagtcatcttaattttttacttaaagataaataattatattgatatgatatattatattgtatgtgctcttttatatatatatatatatatatttatttatacacgtctttgtcaaagtgggaaaaaaactataaatttatttgaatttattttatatattattaaatatgtatttatgtgtttagatttagtttctatttttaattataaattttatatatatatttagatttgctttctatttttacttatgctttataaagtatgatgtatatatattttagtttgctttctattttttttaaaaaaaagatacatgtatgtctatgtgtaattgtatttagtttctatatctttttaattatatattttcttctcaagtataagtgtatatacttggatttgtattttattttttaaggatatgtttctattttctgttttttttttcctcttcaataagaagaatttagttattttaaaaaaaaaaaacaataatatatttgtatatttatgttttttttttttagtttcttttttagttatgatttttaaagtatatatttataattagatctgatttttatttttaattacattttaaaagaatatttatatataagtgtggaatttgtttatgtatatgatatgtatagtatttgaatttagtttgtagggattttttatatatataaatttattacaatttttctattcaataatacgattttttatttcttcaaaaaaaaagtatgatttcttattttctcatacaattttatataaccttaagttattcatttaattttatgatttttccat

SEQ ID NO: 86887 - DNA, 1107 bp, Cannabis sativa
tttcacacttgctcacttagtcatctttgacaaaattacatcttaccaattatatttctatttaattttttgtttaacatggacacttctttgagtttggtttgacctataagactttgacaaaactaaataaaaatcaattatcaatattaatgtgtattaaattaaaaaatttacctaaacagaaaactttatattttatttatcagtccaatggtgttattgtaaatattttggtcaatacattatcattataatcatgaccctaatcaatgtatataatataaacacaattacaaatacaaacatggaccaagtttcaagtttcaagcttcaattaattaccataacaaagctctctaatttatgcaacttttaattttgtgtttacaaaatgtctcatgttttaaatgctcttcaattttcctgccacccaaacactactattaaagactcatatatctacctctcaacaaattatttattttatttattttcttagcaacacccaattggtagttattaaaaattagatctacatctttctcgattgcaaaaattaaataaagtaaataaataaataaaaatcagaactttttcttcaaaaaaaaaagcataatttaagtaaatattaagtttaactctaagtcacataaaataaatatataaatttaattttgacctgtaattatatataatttatatttctaagacttttatacgtgtcattctttttacttgtataattaattcaatgacctagactaattaaaaattgttatatggtcattaatttgatacttaataacaaggtatgaaaatataatttaagtattattattatcaaaaataaaatttatatttttgtaatggggtgttaaatataattatttatgccacaaattatttttaaaaaataaataaagaaatattttttatgagcaaagaaagatctaataaaaacttggcacgtgttgggtagaaacgacaacaagagcagacaaaaattctgtttcacaaattaatcgaacggccaattctcgtcctcaagatctctgacacgcagaatcaacggtggagatgaaatcttggaattttgtgagttaa

SEQ ID NO: 86888 - DNA, 927 bp, Cannabis sativa
tacaggaaggttgagaagccttagcaaacaaaagtgtgtcatttgcaaagagtaaatgtgagatgataggagcagaacgggcaattaaaatacccttgagatggccaagtctttcctgaatgcaaagagcagcagaatgcccttcagattaaagaagaaataagtagggagacaaaggatccccttgccttagccctcgagaaggaaagatttccttagaaatatgaccattaatattgaaccgaatagatactgatgataagcagttatgaataaggttaatgattttctcaggaaagttgaattgtttgagaatggccaagagaaaattccattcaacttggtcaaaagctttttccatatccaacttgagacccacccacccaattttaccaagctttctatgactaatggcatggatcatttcctgagcaatgaaaatattgtcaaaaatgagacgatcagacagaaagttgtgcaaagactaaaaggactaatattgtcaaaaatgagtaggagaaataatatcctccataacagacttaatcctattagcgatagtcttagcaacaatcttatacaaagttgtgcaaagactaataggtctaaaatctttaagagaggaggcattagttcttttcgggatgaggacaataagagtgttgttaatggattccatggtggcattgttattgagaatatcaagaattgccatacacagatcctcccccaaggtatttcagtttttctgataaaagtaggcattaagcccatcagagacaggggctttgtctcctgaaagctgaaacaaagccgatttgacttcctcagcagcaaaaggaccatccaacaagttgaattgttgagcagttaactgagtgctagtaactgacaagagtaaattagtagcttccctgtcactaccct

SEQ ID NO: 86889 - DNA, 1000 bp, Cannabis sativa
tttttatagcttttaaaattattacgattatttgaataaaaaataaaaaaaaaatattttttaatttaatttttttttagaagaagctatactttgtaatttttcccaaaagaatttttcaaaaactatttttaaaattaaaataatttatataattattaatttactcataattttttttttttcttaatgatgtctaaccacttttcgttaaaaaaaaaattcacataatagttatccaataaaaataagtcaaagcttagagaatctcaaacagagtgctataaatgtggtgtatatatatttttttagttcgtgtttataaaattgaactccaatattagagtataatatgatttttattggcacatgctaaaaattgtacaaaattctacacaaaatataacatgagctaaattttaaactacaataaatatcattttttttattattcattaatataatttatatatttttatttatatatttaatataattttatatactttcaatataaatttaatatttttcttgagctttttatattttttaagtttattttagtgtcagtgcattggagcacaattgtaaaatttgagtataatattgactaatttttgagccaaatttaacccaaaatttacatcatctagttaaattagttttatacttatcttatatttctaactataaacaaaaagtacatcatgtcatcactcaatgcaatcttttttgtatacacaacattcaatttgaatctagctttaaaaacttcattgataagataaataactctttagagttaaacatgtctttgagtttagttcttattaatattaaaacttcttgtaatttttataatgttgtgagttttaattattgtcccacaactgttaatactgttgttgatacccttgctaaatttgttttattagcaactaataatgtagtctaacgatctggatatcctcattgtattagaaatattattatggttgat

SEQ ID NO: 86890 - DNA, 769 bp, Cannabis sativa
  modified_base (719)..(744): a, c, t, g, unknown or other
tacagtttttaagaaaataaattgatatatgcaaaaacaaattttttcaaagaatactcttgcaattagtaaatatatgaatattctagaaactctaataacaataagaaaattctaaaaattaaccatattaaattaagtttaatatttcaatattttcaaactggagtgttggctttgttaatgggattggattgggcttgttatattagggtgcatgttaaagttattttttttattgtttatcgctaggtgttgaataactctaatgtatacaataatgagctatgagttgttttttctaacattaaggtgttattgttagtgatggacccaaaatttcgctatgtgagagtttaattgtcataaaaaaatatttaaatttatttaattttgtgggagcctttttaactttttaagtataatggggctgcaaccccacaccatcaatagtgagtttgtcacaagttgttgtttaaattttaggggcatgtctttcttatgttagtcataattttaatgttacatctcataaattagctaaatataccttatggctagaccattaactttattagttgaaagaaactcctccttttatttataatacaatttcaaaacatgtatgcaatatggtattcttgaaaaaaaaaataaagtgctttaaaaaaaaaaagaaaaaaaaataaagatggttagtgttataaaataatataaannnnnnnnnnnnnnnnnnnnnnnnnnaagaagaagatgaagagagaaagag

SEQ ID NO: 86891 - DNA, 589 bp, Cannabis sativa
acagggtttaactttttcaaattgtaacaacttggtggtgagagatttacatgtaaaagactgccaacaaatgcaagtcatgtttgtgaattgcaacacagtcatggctttcaatctcacagtcactgcaccaggcgatagtcccaacactgatggaatccatgtaacacgttgtgtgaacatggacatctctaactctgtcattggaacaggtatacatacatacatacataacactacatataatgaaaagttaaattcatatatttatttctaatgcatgtgtgcaatgttgtaggtgatgattgcatatctatcgtaagcggatcccgaaatgttacagccacagacataacctgtggacctggtcacggaatcaggtaaataatatagttgttatgtactcataatttgttttgtttcatagtatggtaaatgtgattaatttactgtgataattgcagtattggaagtttgggagctggacatgcagaagctcatgtttctgatatattcgtccgcagagctaaattttacgaaaccactaatggagttcgaattaagacttggcaggtgcgtatacatataa

SEQ ID NO: 86892 - DNA, 1014 bp, Cannabis sativa
aattttaactgcaaaaccatgtaaaaaaaccctgtgtttatatttttatttctataacgtttatttttttctgtgtgaaatcactactgtgaggctcaaatttagttaacaaaaatctccgttagcagtttggtgctttcattgagagcctctgtgaaaaagctccgaaaaaccctcccttcttttgaagaaaaaccatctccttcatggttgaaaatccaaaagttgttaacaccctacatgaggaaactaatcatcgtcctgggaaagatcccatagactccaggaggtctaccaacccgcgatccagacggaccacccgttccaggaggactcaaccttagggtggccccagtgcatggaccacacgttcctggtgaacccaacccgacgttggtcctagtacgcagacaacacgctcgagaaaaactaagcgtaggagtggttagaaccccaggacgagggatgaagaactcaatcgtggaggtgcccagtctacgggggaaggtacttatgaaacagaaaaccgctgcctgagacgccgtctggaagaggcgtagcgtcgaaacactgagttagaacgtgatgcagcctcgccaagggctgcacaggagacaaatgctcaaactcaacctgaacctcgagtgagaagaccacgaggcagacctcctggctcacgaaccaggagacaagaaaattcctgggaggaacaacctagggaaaatgagacaccccctgaaaaatgagaacgaacagccagatgggagacaaccaaaaacttgttaacgagaaaccctcatgacaatgaggaggatctgaggactcaatcgggagaacagaggtcacctgcaagaaatcaccaacgttcttcccaaacccatagagcgaggactcgtacagatgttattgggggaaatacggcaaattgctctcaaggggaaagaacagagcgtgaagaagcaagtgtgacctcgaggcggtcaagaacttacagtcgatcagctcgaagaggag

SEQ ID NO: 86893 - DNA, 714 bp, Cannabis sativa
ggttctattgcttggattatgttggttgatgttattataggtgttctggaagttttggtgaggtttggaaacgttttaggcaggttttggagtgcgtggggaaatttagtgcaaactgattaatcagtttgccaggtcctgtaaaatcggttaaccggttctgggataggtttcccgtgcaatccatttagtcaatttgtgctattttcaaagccttggttgggtgattccttgttacttagggtgttgtagttttagttgtcaatagcagaacctttagttgaaggtttgggtttcctagattagggttttggcttgtcatttacctgattatgttctatgattagggcatccatccagcacgaggttttctgttcaggttggccaactcacttgaattcggaaacaaggtaagaatagcgtagaacatatgatatatatatgcaaatgtatgtatgtttcatatgtatatatgcatgcttgttatggttagtacactaccaacacttgtacagaagtggtacagagtgcattggtatagcctacaatgttaaaagagtacaatacggtgttaccagcacaggtacggaaaagtacaggctgtgtgtggtacaacacttagtggtactcagggtacgaaacaaatcctaccaatactcgtacagtgtcggtacgtagtgtatgtggtatagtgtttgtaccttagtaaagaac

SEQ ID NO: 86894 - DNA, 520 bp, Cannabis sativa
tgggagtcaggtgccttcacagctgcgagcctcaagcttcgccgcattaagaggcacgaaaataagaaagttcttatagggagatctcaccgcagccaggccttgtgctcgctgcagcaagcctaggtcaaaattttgaaacagagggtctcgtcgtggcgagccttccccatcaccacagcgagaccctgtctccctagatatttttagcttttccttttcttttttctctactctaaccaccttcaaaacctctcatctcttctcttctctacatttttctctcaaaattcaaatttcacaacacccatacctatcccaccattccatcaaaactccatttcattcatatcccaccatcaattcttcccctttcctccttcaatttcctttcttttctctcttccctaaagaatgaccaaaatcctatagcccaatccatcatatccaatatgaaaattaaagagatgattgtgtaatttagaggtgaaaatcggtcagttatggtcagtttttacaa

SEQ ID NO: 86895 - DNA, 543 bp, Cannabis sativa
ttttttttatcatatttagctaaaaaatttagagaatctctattataaagagactattgtgagtactcttacttattaggtgagctataatgttattttcttcaaaataaagaagagaaagatgaaaaaatgtcaaaaaaatgactccatctaatgacatattagaatcaaaattagagcagtgcacattttttctcataagacccacaagagggctccattggatttatgaaaatgtaactttttatatttagaatcatagactaaaaaacaaaacaaaatgaacttaatttcttttagaagtagaagtagaaggataataaattcatataattaatgaaataatttacatgtattgcataattatatatgataaattatgtgatagagttatatcctaatagaatcttttataagactaaaaaagctcattgagcacaaactaaaaaactaagaagaaaattttaaaattgagatgttgaattggcatggtgctaataatccaagaaattaaactctaagaaacaagaaggttgtcattcc

SEQ ID NO: 86896 - DNA, 666 bp, Cannabis sativa
atctttcaagattggacagtcatttttcaggtgtgatggtttgttgcagatgaaaaaccttctctaaaacttggatttcgatttgtctttcgcagtgttgttctgactcttgttctccttcttggacccttttccttgaattagtaacccatctccagcaccttcatcttgcttctctgtttttctcttcaattcctttgacattaatgcattttggacttcctctaatgtcaatgaatccttaccatacatcatggtgttcataactctctgtgggaagaaaatttagcacaatgatggcctgatcctcatcccccactctaattccaatgttttctaagtcgaggatcaccttattgaaatcattaaggtgatcttcaatttcctttcctggcatcatcttaaaagaatacagtttttgcttaagaaacaatttgtttgccaatgattttgtcatataaagactttccaatttcaaccatattcctgcattttgagtcttccttcgacacttcccttaagactttgtcaccaagactcggaattatggcactatgtgccttctcgagaatttctgtcttttctttctcggtgagaccttcaggcatacccttctctccctacaaagctgattgcaaaccctgttgaactagcaaggctctcatt

SEQ ID NO: 86897 - DNA, 1457 bp, Cannabis sativa
gatggcactactagtgcttgcctgtacatatggtaggtgttggtgctgcaaagtgcccagagattgcctattgttgactttccctgtctggacttatcagacggctttctccagcttgataaagtcgtcaactctgtcaaggaactcgttcatgttattggatgagatcttttggatatctttctagaagttactcaatgaaaggatgccccctagtatggtcgtatactggccttcttctgttgggcctttaaccttggtggcctcagccatgaacctttggatataatccttcaaaggtttgccttgtcattatttaacctcaacaaggtctttctagctgggatggtatcaatctcgaggatgaaaactgggtgtagaattctcgagaatattcattccaaggattgattcttcctagagccatcatgaagtacctatgatgggtagggcatggccgcccgctctttcttgattagctggtgcagcctctctgttgacagaggtagatcacatcaattgttggatttacgtggatctaagtatctaaagtgattgtgtactcacttctcaagttgttattttatcttgggtgttttcacccattcccagacctagtcgttaaagattagcctttaggtgacttgctctcgaatgttttgggaaggaagttcaccttgtttgctggccagaggtcactaaggggttgccttgccaaaggttggccaattggggatcttgtcgtgctaaagatccttagtcggccccccaagctgctagttaccagtgtctggctattctcaccccaaaatcttcatggcaaggcttgtccgcgttcaggtaggagaaggtttatcctagaagaacctggttggatcacttatctatagaccctgtctcatttgtcaactagtcacccttggagaggatctttgatgagattctgacctcttttggaagttctttcattcaaccaccttattaggacactagtttctctattacggcgatctagttctatctggtaagatcagaggatgtactcatggtcatccatcaatcttagaaatttgcatatctgttgtgtgaatgcatcgcaactaacaatgcatggttcttcagtttggccaactttgtagacggcctctctaagtctggccaactcgaggtcttctcccaagtatacatgaggctcactaatggttgagtcgccaaatcctagccccgtctttttaacataataccaggactagatccaattgtggtgcctagaggaaactccatgttggccattcctttagtatgagacgccagtggagggtcctcccagggcggtaaaggttggacattgagactaacagggttgttcgtgtcaacctgactagttgtggtagccaagtttgcggtgtccgctaggttagcagggttggccacattcgtttgattcatggagattc

SEQ ID NO: 86898 - DNA, 515 bp, Cannabis sativa
cgtgatcaaacacatagtcaggcttagttttggcaatgttgacactgatcttaggttcttgatcaattttctcaattcttgattctgatgcgagtaataaagcctcaatctcagcaactgtgtaaccttcaattcttgtgttgcttgagattatgaatgtgtcatactcgctgggaagtcctctgaagatagctgagatatgatcatgattattgagtgtttctccaacactagctaaaagatctacagtctgtttgaccttcaacaaatattcatttagagacatagatccttttggaagattttggagtttggtgcgaaactctagaatcttggacgacactcgaagagtgaagtacttttccagggaattctagatctgcctggctgtgttgcatcctaccattcttgtcagcaagctttctgtcattgacgatagaagccatgaaacaagtaactgatcttgaacatcccattcgacaaaggcaggattgaacacgccattgatttgatct

SEQ ID NO: 86899 - DNA, 520 bp, Cannabis sativa
agtttaagaagcgaatgagtgaagactctttgtattgtctgcaaaccacaaatgagtacaggccccttttaaataactataaaattttatttttagttacaacttcagtggagagactagaagaagaaatagttaatatttcgatcaataagttttaattcataactctaatatttagaagcataagtatccaaaatttgtaacactctaatttttagttgcataagtatccaatatttgtaaaactgtaattttataccagtttgtcagtaatgaccctgttattgtcttatacatgacacaaataagttccagaatctaattcgttaggtcgggttggcttgattttacatccaacttttcatatttttcaaaaaaaattatataaaaaattaataaagttaatatttgatacaattttattacgtactttgttatcatcaaataaaatacatcatttattttatatataatttaaaattttttaaacatctgcgaaatgcaggttgttattagttaa

SEQ ID NO: 86900 - DNA, 1160 bp, Cannabis sativa
tatttgttaatatttacagattgattacttaaacttccaccagaaaaaagaatcaggtttagaattgttgaaaaaggcagccaatgctggtcaccttggagcttcttatttcatgggtattatctatatttgcaaagaagatcatcataaaagtgatgatgaatcagaacaaagttgtactaagcttgggttacaattattgggcaatattaaaacaagtgcccaaatgctagaatgtcgaaaaaaattgaaggagatagctaattcactatggcttacacaaaatcatgactttctcataccaaagttgtttgagtgtcaatttccagaacgaaagagaaggttgtggccttgtttggatgatgatttattgctatgttgtcacacatgtcgactcaataatgaaattacttttgtttgtaatttaatggctggttgttctatattttcatatcaaacttgttatcagtaatgattttgtattttatttatttgagggcatttaatgtgaacaaactcactttagttagttattgtattttgttttaataataaattttaattttactttctttaatttaaattttaacacacctattattctcttgttgccttattagttttcttagctagttagtgtagtgatatatattagaaaagtttaaaatctaaattaagaaaaagttgatatttttgttggcattcttggcaatcataaagaaaagtggtctaaattcaagatagagtctaagttgtttttgttgaagatgatgggtagggacattctctcctttgggagagtagacatggaatggaatgatatttgataatggagaaaaatactctatttgtgacttaggttaaactttggtattttggtgctttaagggcgacatttgttgcctctaatagtactaaagaatcattcttagctgacgcaagttgcctctaaaagaatttttagggttgacaataattatagtgcctaatagttaatcattagaggtgataaaagtcactcttaatattaatattcagatttgacttttaatttttaataattttaatattaaaaatattgaaaatatcaaatttaatttttatttttacaataatcataaaactaaaatcacaacatatgacacactaatcattttgtt

SEQ ID NO: 86901 - DNA, 535 bp, Cannabis sativa
agtttgaatatcttagatattcatccatagtgaagtaggttctgcgaatatacatgtactgcggtcggatgggtggataactttagtatttttaatgttgttttgttagttttgtattattttgtgtgttgtgttaatttcaagaaattagaaactttaaaatgaaaaagtaatagttaatttaaataagttgaaaactttaaaatgttaatttttttttaattttaacaaattggtaaatttaaaataattaaaatagttaataaataagtaatagtatttttacttagtaataattagttttcaaattttaataattatatatgttattgtcatatttcgagcactaaatatggacatgacatatatcacatcaatctaataggcatcatggaaaaatcattaagaggcatcatgcactaaatatgttatgtataatagtggtatataattttattagcacgatacaaatacgttaatgtatacatataattttattgacattttacattgatttaattattatttttatata

SEQ ID NO: 86902 - DNA, 712 bp, Cannabis sativa
ccccgacttagagcttggaacccagacaggaaccctaacctggacccaaacttggacacggaccctagacccggatctcaactggacctcaaacctagaccccgacctgaacccgaaccccagacctaagtcccagacccaaattccgaacttgacccacaccttcacttggacttggacctggacccaggcccggactagactcagatcccgaaccggacccgaacctgaatctcggacctaggccccgacctagaccctagactaggacccagatcaccccagccccgaactcgaacccagacccggaccctagccccgaactcagacccaaaaccaaacccagaatgcaaaactgatctcagaccctagaccctgaccttgactcggaccccaaccccaaccctaacctcagacccttgactaaacccgggcccaaactagacccggagcgactcaaaccccagccccgacgctggacccggttcccagaccaacactcagacccctgataagacccgaaccctagacccaagaactgaaaccagaccccaactcggacccaagcctaaactccgaacgacctgaaatcggatccccataccaaacccgaacctcataccaaactcgacccctaaagacttgaccaagactggactttgacccagaacctagacccaggattctaaatcctagaccttgaaccctagac

SEQ ID NO: 86903 - DNA, 550 bp, Cannabis sativa
aaaaaacaaatcatatgattttttttgcaagtaattaaggacatatgcaatcaaacatcttacccacacatgcattattaatccactactgattggaaataaaaattgtgccatataagagtaaatttaattagtaatcttcaaagttttcttcacaattttgtttcgagtaaatatatataatattattcttacatattaggaaaccccacacacgcacacaatgaagatgagttaattattatggcataaaaattctatcatacttacctactctagattatttttgataaacttttacatttaaatcagagttgtgcttacaaaaaatggggtcgaagacaacgtaaaattatagaactctctcaaattaattacatttattctacttcattttttgaaaacttaattttttaatgtttagaatagtataaataaatatacaattattatagtttattatatatttttttatataaataaataaataagaaaaattagagcactaggcacgatttacctgtctactcctaaaatgggtcttgattta

SEQ ID NO: 86904 - DNA, 668 bp, Cannabis sativa
gggttccaaaaattcccccaaccgacagaccggttcccaaccggaagtccagttctgggtcaccaactggtcgaccagttgctgcaggtcccccagaaccggaattccagttatgtgctgggaacccaaaaaatctcccccttgaactcaaaacccaaccaaacttaaccaaactctctagaacacctgcagaatgcatttacaacattttccaaccaacaaaaccaagaaataaccactaagtcaaattatgccattaaagaccaaaactcaagtttacttaatcccctcactacaactcaaaactgaaatccaaggatttaaatcaactcaaattaaacatacaattcaaaccctaagcattcttaaaactaacagcccctaaattacaaaaccaaaacctcaaaccaagcaaaagctccaaaactaaaggagggttccattagagcttaccttagcttgaatctcccaaagttctttgctgaaaacactaaaaaatcagcagctcttccccttgaataagccccagccgaaagagaaaatagaaagagagagaagaagttctatttgatttctctttgaattttctaaatttgttttcaaatgaaaagggaattactaaactaatcccttgctgaaattaatgagggtgctaggtgtcaactaat

SEQ ID NO: 86905 - DNA, 831 bp, Cannabis sativa
  modified_base (196)..(198): a, c, t, g, unknown or other
tatttgtattactattattattaacaatttttttttttgttttcacttttcagatatatatactaaactcaaatgaagaaataatgaggatgatactgtatgtttgaaagccattttcatgtaagcattcctttttatttttttatattagcacctatatattgagtggcttttgttctaatggatactatttttnnnttctttgattctttatttgtattattactattaataataacaggtcttcttttgttctgatgtatattatttatattaaagttaaatagagaattgttgattctttaaggccgcctcaaatttgtaaaagttgctaagataaaatatctatctctatcttcattttttttttggtagttaaatgaacgatatgaaacttcaaaaattacagtatttttaaacttatgaagttattgtttctaaatattatttatatacatatataagttaaattgattgtctacaaaattttaatatgtgatctttaaattgaaagggatgcttttttattattttcaaaactcacatatttttgacataaagagagatatgagagtataaaactgtgtcgtattttacattggataaaggtaagaaaaagtacaataattaatatgtctatatatatataacgaaaataaataaatctcgatcattttagatgtagtttctaatattaatttagcaaatatagattatttaatattaattttttttactttctttttatttcaatcattgtatttattattattattattattattattattaatgtgtttattgatctccctttcttctctaattttttta

SEQ ID NO: 86906 - DNA, 852 bp, Cannabis sativa
gattttcatattttagccataactgttcactcgggtgtccgttttagacattctatatactgttttgaagcttatgaagagctctacagtatgagacatagattagagcctaaatatgtatttttattctagggtgttttcaccataagattttgtagaaaaccctaagttattttatgcgggttttagacagtgttttggaatagaccgttatagatttacttttgtcatgacataagacccgagatcgtcgagcatcattccacttaggttgactgacatgcttgactttggaattgaggtaagaaaagtattaagcaccgtatatggtaatgttatgattgttacagtctcggttatgatcaagatctcggtatgtatttattgtgacttgatcttaattgaggttaacgatatgtatttgttgtgacttgatagtactcgaggtaatgatgagaaacaattattgttgtttttgaattgtttatgattaagggaaaaacacggttatcaacgttgttatgaatgaattaagatacggtcattaccgttatgagcaatcatttttgaaactgcggataggtttcttacttatcgtttgctttaccaggcaacaatagtgacatatgcagctcgtggataacgagtggtaaggttagaaacagtcattactgttatgagtaattactcgttgaaaccgcggttagctttcttacctatcatttgttttaccaggcaacgatagtgacatatgcagcccgtggataatgagttgtgaggattggaaacggtcattaccgttatgagtaattattcctaaaactgcagataggtttcttacgtatcgtttgc

SEQ ID NO: 86907 - DNA, 820 bp, Cannabis sativa
tctttcttggcctgaggacaatctttgataaagtggcccaccatgccacactggaaacaagccttggcccgacattcaccctgatggtgtttcttgcactttggcactcaggataagattggaatgaagatccgcggccttaacagccacctctatttccctaaaaaaatttattaccccctgatgtttcggaagcatcagccttccgtttatgatcagggttaccactgtcggtccccttattgatattaccactagcaggaggactcgatgccatggcgacatcctttgttgtctgctctttggttacatgtttctcagcctcctcgaaagttaaggctatctctaccaatgtcttgtacaaagtgtcatgagtagtggtaattttcaagtcccaactgattgtggcattcaatactctcacatatttttgttttttggttaaatctgtaagcattagatcaccagcaaatttagacagtcgatcaaactctagagtgtatttggccacagacattttcccctgagtcagttttacaaagtcctccatatgtgaggttctcacaacgatgtcataaaattgttcctcaaacagactcttgaactcttcccaagtcatcacactgacatcacgagtctaccccactatatcccaccagacgcgggcatgatcttgtgacatgaaagcaacatagtttactctctctattcccatcaccgctatattatcaaggatacgggtgattgtactcatcccctaattaactttaattatatcaatacctcccaaaaaagttggaggttacagcttcacaaaccg

SEQ ID NO: 86908 - DNA, 1380 bp, Cannabis sativa
ttgtatcttgggattattaattttatttaacatgtggtatcagattgccaattgtatatgattttggacttataatttctgtaacaattaatatgtatatgttaattttcaccaattcatgttagtttcattattattttatgttgacttttttatttttttaatcttaaaagtttaggagttttataattatgattttttttattggtatattaaatgcttaattttattcagtattgagagagaattttatgtttaaaaatttaaggtttgatataattatattgttgaaattaattttggattttttgattctattaattattgactaaaattgattgtgcatatctcattaacaattgtttcacaacgttactacacatttaattttagaatggacaagatataattatcacaattggattatttctcgttcttaaatttttgaatgggttttaattcgatttacaattgtttagttgtttacacccgaaattgatcctttagattgattagaaatttaatcttgaacaaaagccctcattttcctgttgatttagcgctttttttggcttatttttcatctcgacctgactagagagaatcaggtcatgaaacccactttcagacttagttcaaggttgaagataaaccctccaataaagttgattctcggccttcgcgcgtgggggcgtgcgacacctcccagagtctttttttgacgttttttttccaacgtgcttagagtttaatttttaattttctatgatttttaattattttttttgattctgtttaataattattattaatttaatgataattatgtagttaaaaaattattaaaaataatttttgataatttttcaaaatcaataaattatagaaaaaaatttgggcttcttctcgttctatttgacatagtgactcacttaatttgatttatcttgactatgtagtctctctaactctataaatacatataatattgtcacaattgtatacttttgataatcagataaataaaactgcttctgatttagagatctagagagaaagacttagttgatagtattacaccattaaattatggtaattgttatacataaatcatgtacgcatatctaattattatatatattatagtgttttatattatatacaaattttgtctattgggatcattaatttttttaacatcacttattaaaaataacttgtcacattaatttgtatcaagtttgtatgtgatttacgtttgcacatattattacttatacaccaatactttacaatttatgtagagaaatgctaaatgacatccattaatgatgcttaacaccaactgaagtatcacatcattattgatagaattaatca

SEQ ID NO: 86909 - DNA, 1251 bp, Cannabis sativa
gtaatgggttttatttagggcacaaaacccaacaaagggctccgcttcggcccatttggtgaagtaatccaccaccactattgcatattgaactctgactttccgcttaggtagcaaacctatgaggccaatttcctagacaacaaatggctagggagattacatacacttttgtcaatttggggtagctttaggtatttttgacaatcttcgacacttgtcacactttttgacatagtccattgagtcttcagtcattgttggtcaaaaatacccttacctcaatatcttctttgacaggctataccccttaccatggtttccacaaatgcccatacgcacctcaactatgaggagcttggattcttctttcatgacacacctcaaaagtggcatagaatatcacttctatacattactccatctatgatgatgaagcatgctatttttctcatctactttttagcttctttcaagtgagttggaagaataccttattctaagtattatgcgatcaaggtcatctgtgaaggattgttgttgatcatgtggatgggatctacatttgcgtttagttcatgtggtacttgttggatagagtagtgtttgagctaggctaattgatctctagctttgctaagtgtgctacaatgtttgatcctcgagcttgatacttgttgagaactgattaaaaactagttgtcagtcactatagaatttgagcgactcagctttgattgctagtgctaaccatagtcttgctaggagtgcctcatactctgcttcatcgtttgttgcagtgaaatcaaaccgcaacgcactgtgattattcaataatcatacggtaatagcctcaataattattaatacatcaagatgatattaaatatgaaatttttaataagtgagaaactctaaccatattaaaaattatattgattatggtaatgaatacatgtatatgagatagttgagaaacatatccattaagagaaggatgacttggttattgaattcattagatggacatttgaattattatatttggatttgaatttcaatatgattaattcaaaaaatataatatgttcttgatgaagtagtaattattagatatcaaatattctttagagaataaagtgattgaaacaaaattttagaattagacaatgtcttattcattccaaatttcaatagaaacttgatttctgtttcatgtctacaattgcgacaatacaaattagatttttc

SEQ ID NO: 86910 - DNA, 672 bp, Cannabis sativa
aattattcttaaaaaatatctttctattattattttctttttaaacataaaataaaaaaaaaaatatttatgttttttaaagaattattatttggaattattacatagagaatatatagtaacattttatttacaaaaaaaccttaaattattttgatgttgtaattacctattgcagttactaaaataatatctttctattattattttcttaaagagatagaaaaaatgaatgatattttttttttaaaaaaaaatgaaaagtattacgttcaataaaaattataattaacaataaattttgaatattattatattctttttatatatatagcacttaaattaatttttttaataaaaaagatattatttattgaataacatctgaaaaaataaaactaaaaataaaaataaaaaattaagaatataactattatattcttaatatataaatatatatgtcattttatttatttatttattttacattatcgtttagtcagcaaattgatcttactgaagtttatgtttgaaatgtctagttactaacaaaaagaaaaacaaattcccatattcctcccactaacttagtctaaatttatcctcaaatattcaattcaaaagattcttctttcattttttattttccttcaaagttatattgatgaatat

SEQ ID NO: 86911 - DNA, 1187 bp, Cannabis sativa
gagtaaattatgtgttggtgattggcttaaaagtgatatttctttaaaatcattttcattttatgttattttgagataagtgcatgttttggcatagtttgtttgtctttgcttctgcccctgttcatattgattcactattaaaaatgtggaaagagattatgaaataggcttaccttttccttttccatgttgataatttctaacttctctgcctcatatttctattaattgcctaatccaattccatattgagtcaatccaaaagtatttgtacagcttacataggcttgataatgatattttttagtaaataataagatacaagacctgatcattcctctgagataattctttcaaatgtcttgataattccagctgtttactttctaacataacatcatattgctttatagcttctgctagtctactttcagcagtagccaacaacacctgattcagcattaaccgacgaaatcttttcagtaatgaaatattataggactcacaaaataatatgccaaagctgtttatagaacctttgtaaattgttcttccagtttagtctctcttttatattgcaaaatgagctttttctttttctctatgatgtaacgaagttgttctacttgtttttccagtaagcttattaattggtgtgtggattgtcatgtttgtcaggcaatgacttttgagttgggcattttcagaaaaatattatcttttttactctaactgtacaatattgcaatggtttagatcatttgtcaaatggaactttttgtttggattgcccaaatcaacttaaattaaatgagtggtcttaaatatgtactcatatttttgcttcctatgcttgaattcttatttctttcactgcagaatgaaaatgttaggctaattgtttgcaatattcttttgggattttcttcggttatagttatcgacatcatttctagtgacttaaatacagaagtacattgtgattgcctgttgtggaattcacaattttataaggacaaatgcaaaaaaagatatatattttgatggagatgaagacatttctgaagtaaaaaatgctactatataaagcacccaccaaattttgaatgatagtgttgagtttagcatttcaagagatcaaattcgtgaaatggctgatgttcgtgatgaaattgctgatcata

SEQ ID NO: 86912 - DNA, 2425 bp, Cannabis sativa
  modified_base (2388)..(2390): a, c, t, g, unknown or other
aaacatatatatttcagtttatacatataaatgtctaacataatacacctaaaatttaaatatatctccataattacgaaaataacagtttaaaacctatttctgacaataaatcctaattatcggctaattctcataataaagttaagcggctattataacatgtgttagttattgattgcttagactaaatttattactacaaatatggtattttttcgtcggtttgcagcttacatttattcttttagcgtctgttgctaaaattgatgtataaaccttagacacaaaaattacattattttgtgtcagttttcaacagtcggcaccaaaatttagtgacggttaaaagcagatgctaattgtaaaagttaaatttcatagcattctcattggttttgcaccgacataataaaaaaaccaaaagaaaaaaaaaaaaaaaacagatccagatattcatcctgagttaaaatctaaaacaaatacccagattttaatgttaattttaattttatagatcttaaataaaactatacaaatactcagatacacacaaataaacacacaaagaaaatctaaaacatatccaaatacaaaaatacaacagccactgtcatgaggtcaaaacctagaaagggatggtggtcatcctctttgtctttgtccccaactcagatatctgaaaaaaaaaaaaaaatatttcacccacgagagagaaagaaagagagagaagagaaagataacaaagaaaacttatggtggtgtcgacatggggtcgagactagggagaaggggagaggccattcatggcctccttggcttgtcagcgagtgggtggcaaagctagtgtcaagacgcgatagagaaagaggcacacgactagacgatgggaggaggcagtgcatgactaggatgattggaggaggcagtgcacggttggggttgtcgattgtcaagagagagagagagggtgcaactgattatgttttaggtttaagtttatattagtttatacatgtggaattttcaagtgtaaattgggccttaattaaagtggatttttttttacttttatttaatgcgtcagtttctaactgatgctaggttgcgtctgtcataaaccgatgcatatgttgaatatgttatttttaaaccaacataaatgttgtcatttctaaattgacgtaaaattttattatggtttttttacatcagtttttcgggattgaccgacatgttatccgaggcaaagacacacatttgtagcaatatttgagaaataatatttgatagatgatttgagttctttttttatttctatataacaaataactttttgtcacgtaaactcacttgataaaataatatttaattactaagagtatatctattaaagtgctacatattttagcatttttatgaaatagaaaatataatttttcaataaaataactaaaaagtgataagtagaagaatcaaaccactacctcatgataataagcttatacttaccacttgttatgtaagttcattgttaaatgaactgaatcaaatattaatatattatacaaacttttatatgtgtatatattaattttaattttttaaagcttttgaaattatggggctgggtggcttaggcccgaccgccccaccctctagccaatcttgtataatagtagcaaataaatttcatatgaatttttatttttaagaatataggtccatcacaatttgtattaatttttacaatttatttttttcttccaataataatcaatttaattaagttggtttttgtttgtttttatttattaatttttgtgtcaattgaaattttaagtgttttttaagataatcacttgacgtataattaagatggatagacatagaactaataacttaaatttaatggatattattgatgtttataaagtcaataataggcattatatttcaaaaaatcatgatatatacaaattcaatagtttattatttacgtcatgaggaatctcaagtgacatgcatattatttccttgtattatttatgaagagtgtacatactcattgaattttttagagatgagattgagaataattttcctttctagagtgacaaaatataatagatggtacctaattttgctactacctttatctacacttgattatattaatgtcaaaatttatttaacattaataacattaatgttaaattaataaagtttaaaactaattgataacactattgcatacatcatcacatttttttttctttctttaagtggacacattttgcttaagctcatgagaacacattaacaatacaattatgggcttttttcataaatgtacaacaaaaacaaaataattacaaaaaatgtgcnnnaaaaaattattttaaaaatttatacattttgaaaa

SEQ ID NO: 86913 - DNA, 823 bp, Cannabis sativa
agctcagaactgcttttactaattatgccacttacaaactttaaacgttaagaacttatgctgctgcatttttcttaataataaaatgtagatacacatagaaaaaaagacaaggagattcgaaacatgaaagtatcttaacaaatttgttctgtttaactactatatatatatatgaaagtaacatttgtatattaatatattaggtaaattgtgatataaatatttaaagttttaagtttgtaagcggtataaagtcaatatttatttttagcggcatattaacacagagactgtactaacaaaattagagaaaaaataaagtcttataagctaaaaataaacattagatttatactttttgtaaagcttaaattttaaatacttatgatactatttatcttaatatatttttaaatcttaaggtgaactttaaccttacctgaacatccctagatccacatcaatgtttataattaaaagaacaaatgatacttttgttcatgacttgctcaattattagattacagctgtgcttaatgatgtggttattgtttggtgattaaaataatgagcaataataagttcaaaaggttaaatccgtaagtttagtgtagtagtggatggatgtaatgtaaagtaagagaactttgtgcttaatttcgtgactgccatcaacatctaaagtttcgtgattcatgagtttgtggcataaatccaacaaaaaaaacctgccacctcttctttttttcaattttaaaataaatcttttggctttttgtgtttttaattttaggttgagatattttgtgaataattttaa

SEQ ID NO: 86914 - DNA, 1327 bp, Cannabis sativa
  modified_base (741)..(749): a, c, t, g, unknown or other
  modified_base (1154)..(1158): a, c, t, g, unknown or other
ggttcttctgggccaactagagcaggaggatctgttgtttgaacatgaggtgcatcagcggcctgaccggaggttgaagcacccgccttggttctgccataagccacttgggacgcccagtactcaaggtacatgtctttaacatcgcccgagtagtcgaaattggcccgaggattagccttccaaaaatcaaagaagaacccgagaccggctatctcaaagacattgaccttctccttcaacctgtccacctcggtcgaaagctccccctccttggcttccttttcctccttcattggatgaagaactgctcgaggagaagtcctctcatcctgaagactgttcacctcaacagataaggtctcgatggtctcctcaaaacggtcagcagcttcgagatccttagtcagcacagtgattttcttccgagcagcaaacactccttattggcttcacctagttccaaccgaatagctccgacttctaccctggcttcttcaacatccttcctggccaagtccgcctacgcccttagggcgtcggacagagccgcattctaggaagtagcagacttagctcgggagtaagtgtaagccaacttcataccagcctgcacaaaggaaaaaccttagcatattgagctaagtatggaaaattagagggaagtatccaaaaagactcaccctggtgaactccttcaagactacgcacaccagcaattccaaagaagagtcattgtcnnnnnnnnncagttgctcactgaccttaggaaccagctggttcatgtaatgggccagcatctccttacccgttttggtatctggaagcactgacaaaggttgagtaggcgcccgcacccgttcaggattactcctgacaatttcagacccaaccattggtcgtccaatttccttggacttgacaattttaagggtagaggggtttgcagcagtcagctcctctgaaagatcaatgaccttagaggacccctcaccgcccttagacttcttggccggaggagaggtgaaagagcttccgcccattctcttcttcagagcctcaaacatttgcagagacatgtctgtacagagcagaaacacaacatggtcagaaaacaagcatcagaaacataaggcatgaaagtcaagaagctnnnnnacaagacaaagtaatatgcaaggttactgcctaaacaagatttgagagaacatcatcacatgacctcgatcttacttcagacataacatctttcccttttccaaacacgggaggggatggccgaacaggtgaaatgggctcccttatgcgaatcgcatgttcaacaagc

SEQ ID NO: 86915 - DNA, 862 bp, Cannabis sativa
  modified_base (308)..(308): a, c, t, g, unknown or other
  modified_base (828)..(836): a, c, t, g, unknown or other
aaaaactttgaaaacaaaaaaaaatcactttcaaaatttttttatacattatttttttcttaatcaatattttagactccgacctcaagttggaccttgggacccggacgccgtcatcgaccccagtcacggacacagaccacgacccccgctccagatccaaacctaaacctaacttaaataaaatcaaaaaataaaaataaaaatggaacttatggaacactttttattttctgtttttaaaattaaaaaataaaagtgtttattgaacacgtttttattttttaaaaactaaattttaaaaaatnttttgtgattagaaaattaaaaaataaaactgttaccaaacgcccctttagttcttacaaaaattgaattgtcaatatttttatgtctaaatggatttttaaaaaaaataaaaaaataaaattttaaatcgtttaactaattttaaaattttaatttctttcttaatttttttaatcattcaaaataatttttttaaggcctaaaataattttttaagatttattaaaaaaaatgttgaatttctctcatttttattttgaggaggtacgatttaatagttgtcaaaatttagtggtaaaattactaatttacaaagacacgtcagcttttaaacggaagaaagggacagaacctaacagaaggactaaaattctgtaaatgtaaaagttcaagtgagatgcttaacatgcaatatattttaagggcataattgtagggattattttactagaatatactgtttaacaacctaaatagaattctctacaacaatagaactaaacacatataaagttaagnnnnnnnnnattgattgcagcagaataatatgtct

SEQ ID NO: 86916 - DNA, 555 bp, Cannabis sativa
catgaaccaaatgacacacaaataggtgatgaaaatacttctgtttctttattgatatttaaaagataaagattacattgaaatgaagttttatttaggacataaaacccaacagatgcagcattttttatgagttttataaaaaaataataatattaaaattttataaaagacttaattattattaagtaaaatatataatttattttatataaataatttatatattttcaaacatgccaacggaagttattattcttttttttttttgagataaatgctattatgttaaaataagagttataatacaatagacataagtagaggtgaaagttcctccaactataaacaatcagcatctaccgaaagagtatacttagctagcctatggacaacagtattcgcagatctattgacatgagatatctgcactccaggaaaattggacactaacagtgaaatgtttgataacaaacaataaaaatcagagacagagttttaatgtgattgcagtcctttaacaactacaagaggagcatgtttggtattgttttc

SEQ ID NO: 86917 - DNA, 619 bp, Cannabis sativa
acaaatgccaaaaatggaattaacaagactaataaggtgcacaccaaccgacttgttcgaacaatagcggtgtgtgtggtgttcaagcaattctttgtgtaacttaggggcggagccaagaattcattgcaagggggccaaattttaaactttaatattcaataaaaaaaatctatagcacataattattaaatttatattcaatattaaaatttaaaataatttcttttctatgtcaaaatcttttaaaaaatattaaaatagaacaaaaattaccttatattatttaaattaagaatattaatacacttgtaatcaaagtacaccttttttatatttaacaaaatccaacacttaattagagaagacaaatctcagtttctactttaaaaataaaagttaaaaactagtaaatgattttgagccaaatgtgtattaataataataataataataataataataataatagttgttgctaacttattgataaaagaaaagaaagaaagtagtagaagaaaaaaaattaataagtaattgatttgttagaatttttaccttctaaattttgacatatactaaattatgtctcctgaatttttgttgccgttaaaaattc

SEQ ID NO: 86918 - DNA, 936 bp, Cannabis sativa
gtggtgacaccccatgcgcgcgcggacaccacgtgacacatgggtgtcacacgtgttcggacaatgcttgtccgaaggaacacgcacatgagcgtgtctaaaggctttgtgcgcgcgcggaaatgctgcaagcaacattcgtgtgcggtaaaactcgactgtgcacccatcctgcgcgcgctgatggtatgcactgcataccatccgagccaaatgcaattttttttttttcattttttcatgctttttcatggaattaatttcgaatttttttgtgtagttttgtatttagattttattttttataattcaaatctaattattagaattaaattaattaatatttttttaaaattatttaagatattagtgatatttgaaccttgaaaataagtaaaaatctatcattttgcttactttgttatcttatttattaaatttgattattttatcttatttttaaatttaagatcagatattttattgggtaaatactcatttggtgccttatgttgtgttaaaatacacatttggtatcttttattttgaataatgattaattagtaccctatgtttgcaaaaactatctatttggtaccttaattgcatttaatattttaatattcccaaactaaccctattataatatttaatgcttattatacatcaaattatatttatttaatcatataaaaaaattacaaaaaataagaaaaaaaaattctcagtacccctttttgagatcccatttaactacccactggcgggaggactgagaatgtatgaagtgagggaatttatgattttgggggcaaattataaataactatatatataatttattttttggctaattagtaattttttcccctgaactttgacatgtagtaaatcgtgcccctgaacttttttggccgttaaaaattctccccgaac

SEQ ID NO: 86919 - DNA, 724 bp, Cannabis sativa
aaaaaaacttaaaattaaaaatatacaataatattataaaatagagcaaccccatcataaaatccttaaaacctgtgaaaccaatttcgaacttgtgaaccctataaaactaattttgacactatgaaaagtaataacaaaataaaaatgttaaacaataaagttaactgaaaccggtttcatcaagcaaccaaataaaaaaagaaaaatccacacacacatacaaaaaaaattaatcacaaatataatcaaaacaacacacgatgtacaactaatcatctaaaaataaaatataagtgtgaaaactagtttcgaacctagaaataaaataataaaaagaaaacttaaaatcaaaattatacaataacatcataaaatagagctaccccattacatatccctcaaaacatgtgaaatcagtttcgaacctatgaacttggtgaaattagtttcgaaccattgaaccttgtgaaaccaacttcgaacctatgaaatcagtttgaaacttgttaaccctataaggggtgtttattggattacatctaatggatcctggacccaaccgatccaatctaattatttattggatattgaattttgtcatccgatctaatctaatcgaattgagtcatttgaaccgatccattggatgcattgagtggttttctattggattgaattggatccatccaatctattttagctaccatttaagttgatttca

SEQ ID NO: 86920 - DNA, 681 bp, Cannabis sativa
aattaaagtgtaaaaataaaaaaaagtttcctaaatatttccacatacatttgtaaataaaaattataataaaaaatcaacagtaatattcacttttttaataataataaaaaaacatgcatatcattaaaaattaataaaaatatattcgtctttaagaaaatgctcacctaactttttcttaataataatataaaaaaaaaaaaaaaaaacatgcatatttgcaatagtaggtcgttatctcatatgacaaatgtgtcgaaagtgataaaataattaagtcaatagtcaggtcttttattttctttttttttttccctaaatcattaatttttctattaagggcagtaagaagtgaactatttacggtcttaactaattactttgactttgaacatagaagagagggaaaccgacacaacagaaatggagttttttttttttttttttgaggggagaaatagagttcatgacagcttataaatatagcgacttattcaatgattatagatattctatacaaaaaaattattatattaaattattgaaaaatgctaaatgtagtgtcaatgcaaactataggatcacggctgatacacttacctgtaaccaataattaataatgtgatattatatatatattgcaaagtatatgatatgatatattagatctgtagctgt

SEQ ID NO: 86921 - DNA, 626 bp, Cannabis sativa
ataagtttcctccactggccaccgataaaagagacacaaaatttgggcctgagggtgtgagagatcgatgttgtccaggaggagcaaaggaatggattggacccaagttggaggggcctgctccatgatccggaagcaaagtgtttcccaagttttggttcgagcctagaaatagccccgcagcatcagagtaattggttgggttgttgtggaatgagaaatcttgttgcaagacttgtccccgagggtgattgactggtatcaagttggtggtggatgggttaagtgtaggggcattggggagggacactatggatgttaagttaagaagaaagggattggggaggagtccaaaagggccatggttttgacgggttgttcctcgcaggacattttcataggggaggggtgggggttgggtagactcatctgaggctgtcatgtactcggtgcaggagggataagagtgtcctaggcggccacagtagtagcagtggtcaggtatgtcctcatatttcaattctaaccaggttggggaagctaggccaggaaacatgattggtatgccacggggtaagggtttggtaacatcaaacatgatacgaactcgaaggtaagagccccaa

SEQ ID NO: 86922 - DNA, 718 bp, Cannabis sativa
  modified_base (42)..(58): a, c, t, g, unknown or other
tttaaatagctataaattattttcataattaatcataattannnnnnnnnnnnnnnnntaactaagcgggctttacacagcaagtaaaggctgagcatcaaagaccttcaggattacttcaacctttgcctataccagaatggaagtggaacaaaattacaatggagtttgttactggattgccattgacacctttgaagcatgatgctgtttgggtgattgttgatcgtttgactaagtttgctcatttccttccagtcagaaaggattacaagcttaccaggctagctcgactttatgtagacaatatagtttgactacatggagtgccttcaagcattgttcttgatagagatccttgagttacatcaaggttttggaaggccttgtaacaagtcttaggaactgaacttcacttgagtactgcccatcatccacagacagatggatagtctgagaggaccatacagactttggaagacatgcttcgctcttgtgttttggattttggaggtagttggggagaacacttgtcactagtggaattcacatacaataatagctaccaagttaatataggcatggctccttaagaggccttatatgggagaccatgaagattgctattgtgttgggaagaaccagatgagcatgtcactattggaccccagattatcactagtaccactgataaaattaagggaatccaagaaagact

SEQ ID NO: 86923 - DNA, 618 bp, Cannabis sativa
aatataataaactatttttgtaaaactattattcttagattccctctctactttctatctactcggcttatgcaaatgcgacatttattatatatttttaaatgcacatttatttgcgagtcatgggaataaaatataaactaaagtgacttgtatttgcatgggtgatgaatgtggctatgttaatttttttaatgaaataaatccaaaattcaagtttacctaattaaaaaaatataaatattaaaaattcagatggagtagttaataccacttttggttgacagaaagaggaaatgagactagtcttctttgatctccaatataatataatgaattaattgctatagagaatttgtgaatgttgaatttgaatacacaacacactaatataaaatagtgaagttgatcataatcttgagttaaattgcaatataaacttcacaattttatattggtttctctttttaaattataacgtccccgcttcaaacttccattggccccttacacctacgggctaatggctcttatacacaagtacgtcattctggctgcttcctggattgacgactgaccctacagaccaacacgagtgttttcagcatgttttgtcct

SEQ ID NO: 86924 - DNA, 654 bp, Cannabis sativa
atttctggctattgtgtattcctcagtcgttccctcatctcctaaaagtcaaagaaacagcccactgtttctcgctcctcagctgaagcagagtaccgggcaatggcaaatgctgtgtgaactaacttggatcctctccatcctgaaagacttcaacatcaacatcaagctgccttcaacctttttttgtgacaataatgcagccatacatatttcagagaatcccgtctaacatgagagaaccaaacttgtagaaatcgattgtcacatcgtccgagaaaagatcaacaatggttcccaaaaaatgaaccatgtccgttccaaagccaaccttgcaaatatactaacgaaaccactctttcctgcttcatttagagacattttgtccaagatgggtgttcgagatctctacactccatcttgaaggggcctcttagatcagttaggaatagttagttgttagttattctgttttttctgttattactgtagcttggctttttacactataaatacctgtaacatttcttcattcagtttaatatatcaataacacaattcatttcctctgttctactcctaataaagtcagtaaatatttttttttctcttacaaattaaattttacaccaatttagtagtttttaggcaccc

SEQ ID NO: 86925 - DNA, 577 bp, Cannabis sativa
atatttgttcttaaaaatatatcataccaaaatattcacatgagtttagtacacttgttacatctacttcacactgccccactacaacatgtctactgcgatatacatgaggttctcaaaaaacgtccagattgcttgcttcaaggaatgcaatccattccttaagaacctaaggtagtggcaataatacaccattaaacaaatttctttttaatagacgccacttcagattcaaccaatttcaagcaaaagaaggttctaatataataaatatatatacttcatcagataaaggtgctcctccataggaatatagctctgtctgcaaatattccaactgctgtctcattgcatttcattggattctagacctatattaacctatacacacaaaagggtaaatttattcgatgttattttgataaatctaaaatttaaaaaatatcatgtttaagacagtaaagtgagtttttttttttgataaataatagcaacagaggagattaggaaaggcttaaggattacaagatatagtgtatatcatgtggaaagaatattgaggctattgttatttcaa

SEQ ID NO: 86926 - DNA, 742 bp, Cannabis sativa
aatctcaggagctacaaggaaataatcacagcaagtcatccatggcgtaatccctcaacactcattgactcaatagttatgagccaacataatcaacaatgttgctcaatacaatttcctaatcccagctctctctctctctttctcagatatctctctccatatctcactaacttctctctactatattgtgtctttctactttcttcttcttgtgtttgacttatttttcacttatgaaatgggagtagttcactttatataggccaatggacccaataatgcttgctgtcatattgacagttaagttagctaaagactaactaactaaccgaatcttggttgggagtttaaggaataataccacatttacttttgtgggtgcaactatatggattattaaaaaaatagaacctaaagataataaacgctattcatcacagtaatttatgttatatttggtaaaaagtagttttataatatttttccattaatttttacttttgtacttcaatataattataaatttttatacaaaattttatatattatctaatgcttacttaataatttattaaaaaaatgtaaaataataataataataataatacaaagatcaataaaatttgataagaaataataataataatgttaggctatttttagcctatattttggatcgattttatgttcgcttttcactattttagggcggaattacgcttgttttctatgttttcag

SEQ ID NO: 86927 - DNA, 545 bp, Cannabis sativa
tttacaccaaaattaataaagtaaaataaagaagaatgaaagaaaaagataaaattttggtataataactctagctaaaatctgatgctttttacattggatttggaacttatttatagtgcaaattcgttcctcaaatatggtatttttgtgtgctctttagtgggataaatggcacaaaaaactgagaaaaatgggggacaaaatatcccttttgcgtcaggcggagtgggggggacaatgggtttgacgtggtacttgctgtagaagaagtacactcacccatgtgtggagccagtaatactaacatatatatatgtttggactttggatagttgggccacgtgaagcatgttatgggccttaggccatgttggtgatattgatgattaaaagatgatgagattgcattgtctttatgggccttttgaaattgggtttttgtattttctttttatcacttttcctaaaaaataacataaaattaaagtaaattaaattttttcaataaaaataaatttattaaaattatgaaatattttatt

SEQ ID NO: 86928 - DNA, 576 bp, Cannabis sativa
taccatttaagaatcaaatgcactcaataaacatataacacaaatttgaataagcattctaaacaagtttcattttacaataaataaatataaatacttatacaaaagagaccagatacatatagactacattaagagttcgtttggtacgccgtattacatcgtattgtattgtatattattatattaaattatattttattcaatatttgtatgtactatacatgttattagtttttttttttgaaggaaacatgttattagtttttataaacacataaatgtataaattataaattaaagtttagcatagtattatataaaaatataatatataatccaatttaatgtaatacaatacaatacaaccgacgttccaaacgagcccaaatacaaaaccaaattgaaaaataaaataaaataaaggatcggatacttttactatagtagaaatgtataacacaattaatcttttttatttatttatttttttttttttgaataaatcttttttattctttttatttggtcggaaagaatctatataatttaatgcaaaatctacagactcaagtt

SEQ ID NO: 86929 - DNA, 664 bp, Cannabis sativa
atatatgtatactaatttttaaatccataaacaatcatataatcatgattaataaaatacatacatgaataaattctaaattaatacgaattcaaatgttgatcgaatttaataatcacaattaatatgattaaccataataatctaacataaataaagctcatgataccacttattagaaattacatttagaaatatacatgaatcttaactcatgtcagattattaagattactttatgaaataataagatagaagacaaacctattttcatgatgttggatataagataaaattgtgggtatatgattttccacagactaatcttctctctctatgagttcttactcaattgatgggaatagagaaaaagagtggttgagattatccttgggaagcaaaccattatattctttatatatcaaactaataagagtcccataaactctaattaggttttttttttttttgaagaaaagcgtacatatattagattaaaaggagttacacctcacggtcattacaaaatataatatcggccatagaggaaagtggcacggagccgaacatctgatgggaaaaagcccacttagccacattatgggccacaaaattacattgtctactaacatattgaaacatacaactaataaaaaagggggag

SEQ ID NO: 86930 - DNA, 706 bp, Cannabis sativa
ttttaattaaaagattataataaatttatttgtactaaaactatatttacttatttattatatattagaaaaataaaaatatataaaataaataataattaaacttcttagttttcttaaaaaaatatttgatattttattttaatattaacaaccacatcaacctataatttttcttatatacttgagtttttgattttttttatatttgataaaatataatataaagatagtactataaatctattttatcaatggcatataaatttaaatttttaaaaaattaaaaatatatataaaaaaaataaaaatattatataaaataagtttttatatatttatgattataaaaaactagattataacattattattatcattacaatagatcttaacaactcacagtacgtactttgaaacttataatttaccaaatactcaactcagttttttttcgtagttctgatacagctgatttttctcacagcacaactacaactgctttttcccacaacacaattgtgccaaactgagccttattgattataaagagttaatgtttaactcgaaaaatatttaatagtcgttgttatgcactgatcatattatatagggtaaatagcagcataagtacccaaagttttgagtttgtaagcggcataaacccaatgattttttttagtggcataagtacccaatgtttgta

SEQ ID NO: 86931 - DNA, 2229 bp, Cannabis sativa
ttggtcagtccaaaatcaaaaatttttgttgtgtatgagtcatctaagaggatgtaccaacaagaggaactaattagattctatgtatcgatcttcttcataacattatttattggaaaaaaattaaaagatttatttgcatatttgaaagatagtcaaaaaagtcgaggcatgcttggataattgatttattgaagtttttgaggctttatatcaatgtataaatttgtttgtgcactcttcatgtactcataaacaaaaagcctatgttgttcctcatcggcagaacccaattagttttaccaaattcttatggtttgtttgtacaaccaatagatattacttctgcattgaattcttggtcaccatctttcaccatgttgttgttatccaattttctgacagcaattactaaaggtaatatcacaacccctttattttggagcatcaataatatagtcaaaagatatatctttcaccaagtcaggtctgggtctcgggttcgagtctggatctgagtcttgagtcaggtttcggggtcctgactctagtcctagtcccaggtctggtcctggttgggtcgggtgcaggtctgagtcgggattggatccgagtttgggtttagttagggttcaggtccagatctgggtccaagtccggggtttggtctgggtttagggtacgatccttggtctgggtcgggtctgggtctggagtcatacaacttacattgtattaaaattttttgtcgtaataaaatttttggtcataataattaatacaatacactgtttaatccaaacatagtattatttattatttaatacaatatgcatacaatgatcctctatgactttgtcataataagatttatatgaaaaataatggtggattaaatttcatgtgttagaagaagatgaataagaagagtaagcaggagaagttgatggacttgaaactacaactatcccttcaagcatcaacaaaaccatcttcatggaaggtcttttagagggatcttcattaaggcaccaaagaccaactttcacaaacctctcaaccatctcaatctcatccatggcttctatgtcattctcaacaagatcctcaagtctctcattgttgtaacattcataaaccaagtctaccaaatcgatttcattccttctacaactaactatctcaagcaacattactccatagctgtacacatcaaccttggttgtgattgttgttgatgatgatgatctaaaccattctggtgcaatgtacccttttgttcctcttatgctggttttattagaagaagaactattatgtgtttggcttagtccaagaatctttgccataccgaaatctgatattctagcattgtgacaatcatcaagaagcacattttgtggctttatatcacaatgaatgatttgggttgtgctacaatcttcatgcaagtaaaatagtcctctagctatcccaatggctattcgagtcctttggttccaactcggtttaggaccccgaaatagaaaactggctaaggttccattgctcatgtactcatacaccagaagcctgtgctttctctcattacagtatccaactaacttgactaaattcttctgctgtgtttggccaatgatgttcaattcggcttggaattctttctcattctcactaaatagtctttttagtaatttaacagctatgtcagtaccaaactctgtttgccctttatagactataccataagatcctcttcccaactcttctttgaacccttttgtggcttctgtgagttctttgtatgtaaaccgacgcaaactcattacaaccgaatttccattgcttctaatgagcttattgctgcagttgagtagagaagaagacaaaacaacagcattgataagtaaagaaccacccaagagtatgaacataagtgtcattataatcttatatgttttattagaagaaggtatgtgaagagtgttaattagtgaagcattcatgtatttgatagaagccattgagtgtttgagtgtctcactctctctcccattggatagtgggagtctattcttgaagcatcgattgttgtcaaagttgaaaatagctacaaaacaattgcaatccaacaaacaattgtttttgcattcttcataatcagaaggctcaattagctcataatcagattgaggccaatcggttttcggaagatctttcatactcatc

SEQ ID NO: 86932 - DNA, 722 bp, Cannabis sativa
attaattttattttgtatttttacactataaaatatgtaatattttggcatttaacagtagacccaacccttgtggtctagcttggcctgaacatatacaatacatcgcaaaaccctcaatctcatgcctgatcaacaacagatttactctttcctgcatagtaaagcacctatgagccaaggcccaacaagatagtaaaaataacaatatgcataataatcagaatcacataattattgatatcactgcatctatcatttatttgacatagacctatgtgttacgctcacatgtctatttataataaggccttagaatagtttatctcggttctgattaccgagtccaacctaattatgccttatgcaaataattctttatatcatcatatacaatgcaacattgcattcatatccatttaaattctagagtaataaccctagatcacataatcgtcaacttttagggtaataatcctattttcggtttcttgcatagcatatacaaaattacatacacgttcgccactgcactaatcttctatgtgctagtttaccgtcttacctggtagtccaagtatgtggagattctaaattctcgggtgctcctaagcaagcgccagtaatcctgctcacacattcttgagatttcacaaatagggttaatctccaaatttaatttcacatatacacataatttgaattctatttatagattaaca

SEQ ID NO: 86933 - DNA, 655 bp, Cannabis sativa
atttaaaacgatgtatgtgtggtttggatgtgattcatgttgatctatgtgtttattagattgattgatgtttgcgaaatttggtacttaaaataatttgaattttgttatggaattaattttcatggatattatggaaaaaattaggcaattacatctttttacagaacttgatttcaatttatttgaatcagttatgattttttaaaaaattgaaaaaatcagggtgggagtcacccacgtacgctcacaaaaacccggtttcctcgggtgcacggggttcggacaggtcttatgttcgagttttctcggtcagggggtagattttgtctgaaaaccccccatccacgcacgggaatggtgcttccagtctcccctatgcatgaaatctcggccagcttccctgttgcatgcgcgcggatggtatggaatgcataccattcgagccaaatgcagtttttttcaatttttttaattttttcatgctttttcatggaattaatttcaatttttttgtgtaattttgtatttagaattttattttgaaaatatcaaatctaattatcagactgaaattaattaattttagatattagtagattttgaacctaaaaagagataaaatcttatcttttgcttaattagttaccttatt

SEQ ID NO: 86934 - DNA, 1320 bp, Cannabis sativa
tagataaaacaaaaggttggtagatcttcatacataaaaccaacagtacatgaagcaccactcttcatctccaacttcatatttctttcaagtggtaaatcgacccgtattgaaacacgaattctgagataattcctccacactccttggaagttatttggatcccatttaacgaaggtaccaatataattcccaacatctctaataaccctttcagacatgaatttagacgtcatatcatgaagttggtcccaaagattaagcgtttccagtgttaacaatcgtggattttcaccatgtttaaccctctcaatgactagaggtgcacgatcaaacgtccacgggcttccttcgattactcgttcaatgtccacctcgtgataaaactgaaagatgtaatggttatggctaagctctttgacataaaaacctcttcctggctgccaaagggaagccattttgttttgcatcgcctaaaaatctatgttacgtttcgtgagaaaacgtccaaccaaacaccatctatcatcaaactcggacagttcaagatcttcatcgtcatataccaacctccccatgggagcctcttccatccgaacatcatcgtaatcttcctccataacaaaagattaaaaaaaaaacacaacaacaaacaagcaaaataaccttcacagacaaaccacccactcttcacaccatgtcatatgacaagactctactatctttcacatcttaaaaatttataatgcttatttttcaaaaatacagaaaaaagtgaaaatcaattaataaaataacataaaatgaaatataattttaaaagacatattctaatttcttatttttgtaaaaatagtaagtataaaataccacatagtgtaagaacaaacctcatggatctcccaagaactatttatgaaaaatatatgtagtaaaataatgatatatttatatatatatatatatatatcttttttatcaacatttaatatatatatatatatatatatcagagtcatgatcatctaatctgacacattaggtaattgggaacttcatttttgagaaatcgaagggttaggtaattggggattcatggagaatagaggagaggttagttaggtgattgaagaatgaaaatgaaaacgaaaataaaatcaataagtaaaaaaaatagaattttagtatatcttagaaatatctgtaaaaaataagtaaaataaatatttagaaacctttaatgcgcctgtattgttttgaaaaatttttaagaacggacaaattttcagcaactaccgcctgtattattatattattcta

SEQ ID NO: 86935 - DNA, 525 bp, Cannabis sativa
taggtttgattatggaaaagggtacacggtgtctaatagggatgtacgtcggtcagtttggtcggttttgactacatattttccaacccaatgtaacaaatgggttgcaaaagtataaggcaacccagccaaataagcaaaaaaaattgtgtaacccgaccgacggtttggtcggtttgttctggttaacccgacaaaaactagtcaaacactatatcattactaataattctgcttagtaaccaaaattaacgcaatctcaactctttaaaattcaaatagatagatcatattcatacttcctcaacaaattaaacaaaataattaacgaaagaacttatcaatacaaaggctgcattttgatacaatgtatccaaagtttattgtctaatctttgttatcattactcataaattactttctaaataggtaggatctaccacaaccgctaataatatatgcaaaaattgatttatttcttaacttaaatcatttgtaaatgaaataattgacttcaactatttc

SEQ ID NO: 86936 - DNA, 2502 bp, Cannabis sativa
ttaattccgcattatacttaaacatacatatttatttctttcaatttatacatataaatgtctaacatttacatgctctaatttggatattgtatatatatttcatcttttggggttaggaaataggcattatataacaaaatactgtgtatattatatataaagatataaatatatattaaaattaatttggtgtctatctgtgtataaatattattatatagtaaagattcgaaatatatcattatatgtcgacacaaaacatataatgaattgagatataatattatctcttccttatcctttctgtcattttatgggtgaacattaagtatcaaaaaagaaagaaattttgtcaaataaccaactatatatatacatatcacaaaaacttgaataatggaactacagtgtttcaaagaaaaaaaaaaatctagtatggttacttttcagtcagaataaaaaagtgtaatatttaatcatcaatacactttttgtatcatcacaaaaatattgttatataatatagttttatttccacatcttgaatttataatgtaccaataatttttggaggggaaagaagagaaaacattaatgggaaaaaaaattctaaaattttgtaagagatttaattttttttttttttttactattgttatatgatgattgtcacaattttgtaaaattatactaggtttaaatattgaaaaataaaatctcaactttttatttgaataatctagacataaaaataccattcaaattcaaataaagggtaacattgtatggagttacataaattttaatcataatttactgtggtgagagataaatgcagctatagttccaccttaattttttgttcacaaataaaaagttttggctttgtttggatcttagatttttaataaatttttctaataaaatagaaagaaaaattagaaaagaaaaataaagaaaacgcatcaaaatcgattattggatttagatttgtaatttgattatagggcaacattcaaattattaagcattgctataaaatattacagtgtctaatgtcactttacaacataatatattattatcgatacaatttactacgtagtgaatcctacatgagtaacaatatgtatatatatgtaaattacgtaccaacttatgtgataaaaaaaattcaacttagtgtattaattaatgatatttaaactaaccaaattcaagtttattttttaaaaaaaagaattaaattaaccaaccaaaataagtcaaaaataaagtatatgtggaagtagccaaaccattaaatctatatagccaaaattaaattacatttttgctaatttttaattaatgaaaaatggtaaaaagatatggtgcttagtatttttttcgatgtcattatatctaagtattaaatctcatataacttaatataatgacttttagagaatattgctaataaattatagaatgtcacttttaggtggagctatacaccactagtgtctaacaatataatgtttttttttttaatataatataatataaacacttataaaaaaattatataatataaactggccaactcctaactaattacgataaacttaatattaaagtttgagtaatttactctataaatattcaagtttaaatctagttgcaaataaatatttaaatttaatttttaacggtaaaaatacttaaatttatatttctagaacttctataggtacctaatcattaaatgttaagtttatggccacgtgacaatccctaattgattcaggccattaaatttttattttttaacttaaaaattcattcaaatatgcgtaaatgacacgtgaataataacttgacacttaacaaacaattacttaaaaagttctagaaatataacttaagtgcatgaaaaattaaacttaagtattaatctgcaaccgaaagttaaacttaagtatttataacgtaaattactcttaaattttttattatttattggcctttttggcgccaatctatatatactaaagttaaatatatatctattttcagaagtaaattttttccttaatacgttatataattaatagatacaatcaagctttggaatatgttaatggtttatgctattatttagattcctcaacttgatatggtcctcaaaatatattcattggcaaacctagaaatttttgctccaaaaaaaaaaaaaaaacctaaaatttttttgttagcaaagtaaaattttaaatacaattatttaacttgtgcttcttaacgtataaaatctttagcacagtacagaatttctctacatctatttttaaggacaatgtttaaatttttgacagtacaaatttttttcttaaaaaaaattaaaatacaaatgtaaacggtaatagtcgaaattttattcacattttaaaaaatgattaaggtggcgtttggtaacactttttttaattagttttctgtttttaaaagtagaaaagt

SEQ ID NO: 86937 - DNA, 987 bp, Cannabis sativa
acatacttcttctcaatttcattgcaaaacatgtcattatgcaaagcaaaaaaaattaccttttatttcacataataacattgcatctactatttttgatctcatacatatggacatttggggtccctatcatatagaatccattgaaggatataaatattttttgaccatcgttgatgatcactcacgttatacatggacttatctattacacaccaaatctgatgctcctgccatcatcaaaacttttttttcccttgtcaatactcaatataaaactcaaatcaaatctgttagaacagacaatgccaaggaactaactctctcaagtttttttgctagcaaaggggtcatcaattacaattcttgtgttggtcgtccacaacagaattctgttgtcgaacgaaaacaccaacacattctcaatgttgctcgggccctcgcaattcaatctaatgtccctctatcctactggagctatatggtacgtactgcaagttatttgataaatagaacaccctcaactttgctacatgacaaaacctcttatgaaattcgtcacaaaaaaccccctgcctatgaccatttgagaaactttggttgtttggcctatgcctccaacatagttcatccccacaagttttctcccaggtcaaaagcatgtgtgttcattggatatcctgaaaatatgaaggcctatactttacttgacatgagtactaataacattttccattgcagagatgtttttttctatgaaaccatctatcctatgcttaacagatcacataaagatgatttcgacaagtttttttcatcaacttctccccagtttatttctgaacagcttgataataaaactgctgaaaccagcaacaatgctgacaccagcaacactgctgaaaccagcaacaatataccaacagatgttttttttcgatctgatcacagcacctctgctgagcatgatcacgaacaacaactcaa

SEQ ID NO: 86938 - DNA, 542 bp, Cannabis sativa
cctgagttattatttttatgattttgtaaactcttgaggtcacttgcgattatcacgatcgggtatataaatttaaagttctagtgcaagtgattctccatggagtacacagatcaaaaagaaaagaaacacataaatcatagaaaactctctagaagcacgacgctgcatcaaatagagattttatccctgattgtaggaaaccttttaggagtgggacattgtccaagttgttgtattcctttggttgttaaactcctcctaagtatgagacgatgtacttagcataggcttactccaatctttcttttttctttttcctgccatggagttttttcttgtaagcatctatcgagcttttatgagttgaaatcatcaaaaaaaggtccttcaataacctttgatttaacccttatactaaatctcgtcaatattcccacactactatttagtagtgattcatcatgcttatgctgatggatgggattagtgttgtaaatatgggtcaagctttctaacacgacacataactagcacgagca

SEQ ID NO: 86939 - DNA, 2440 bp, Cannabis sativa
aagccaaattgtttttaaaaacaaaaaacaattttttagttatgatgtcaaacatgtacgtagcaaccactccaattgacattctttattggaaatgctctaagaaaataaaacttattggtcccctaaacaaaacttgtcttgaaaattgaaggtatatgtgtgaagagcagtcgaaccagcattagagatgctcctctaactttctaaacatatagcttgacccaggcccggcccttggcataggcatgctaggcctgtgcctagggcccacccagcccaggggtccaaaaattcttttttcctctttttttaaaattatactttttttttaccaattttaaaaaatatcacattttttctaacataagggcccaaaaaaattttttgttcctatggcccactttgtttgaggaccggccctggcttgacctataataatacaaagacaaccgtcgttcaaattgaaagagggaatgggtgatttgcgtacttagtttccgtatctaccaagtaccaaatctcatccatacatcgcacctactactactctctctcctcttctcttttctcacatatttaatatctttcattccacacactacactctcaatctcttccaatggcacaattcagcaacctcactccagacctaaccgaactcatcctctcctaccttccaatcccaactctccttagagcttcaactgtctgcaaactctggtaccacatcgtttcatccccaaatttctcttcttctaccaaccaaatcccatggttcttcctttacggactccacaacacttcttcaaggaacaaccagtccttcgctttcgacccattatctaatctctggttctgcctccccaccgcagcttcccctgcacctcacctacccaattcatcttgcttcctcggactcgataaattcgttctcaccactgctcctaatttcacctactccaggattcttaaacggacttggcgatccacttctccgcttcgattctcgcggattaatcctcttgtcggtgtttttgatcatgaatctcgacgagttccgagattcgttgtcgttggtggtgtcagattcattgggaacttagttgatattgaggatcgattggcggttgagatttacgatcctgattctgattcttggcagatttgtccacctctgccgtctgatttcagatccggtaattcatcgcaatctctctcgtcggctttgtttaagggaaggttttatgtctttggtatatactcttgtttcgtttcgtcttttgatctgatccaacatcagtggagcgatgttcttatccttaggccacctggtgttgttttctcgtttttgatcgcgtgccaggaccggctaatcttggccggaatgtgtaacacgccggttgggttgtcgtttaatttgtggaaaatcgatgagaagactatggagttcagctcaattggagctatgcctagggatttgctgtacagtttgtttgatagtgatgatgatgataaatttgcgagcttgaaatgtgttggacttggtaatcttatctatgttttcaatgaagattaccataagaaataccctgcttgtgtttgtgagattgtagatgagtctggtggtgatgacaagtgtagctggagaagagtccctccattgccttcccctgttaataaattccacaaagtcattagcttttgttcaacgatttctgtacacaacattcttagaggagaagaagattttgatcagatgcagatgagggcagattgatattgtttcttctctacttggtgagtttatgcaacccttttcaatgttataatttcgggcatctttatataaggaaaacttttgttttgccataagctttaggaatgcaaattttgttttgtcttgtttttggctcatgtttctcagatcataagcctatcaaaagggtcaattttacatttgaaaaacaatgactagaatcaaatctcaagcactttttggttactaatggaatttcaccttttaacaactatgccaagacaagtaggtgttgtactcagtactcactctttttcttatggaattaggttctttattatgaatatcagtttgtttctacctaccttagcatatatattattaaataaacttccctagtctagcttttattagtacaagtttactctataatattttatttacttgtatgctttgaagaacagtaaaataatgtaaattgtggatgttttaatgctgctgccgccagttgatcttgaaacctttttctttttttcctctttttgaggcaattcatattattttggttagttttgtacaggtgcatgatctggatttgggtttgaaccaacagtagaataaaaggctcttattgtcttcatgtgaagtaatctctatacaaacttaattcttcaaaatttg

SEQ ID NO: 86940 - DNA, 599 bp, Cannabis sativa
ccccattacgttctgaaatcatgggatcagtttccatgattttagcatcagcaccaccatgcgtaacagcccctgccctccgatcaccgccaccaacatcagactggaggtcgtcattaccagttttcagccattgtgcacctattagataattccttttccgagtctgcgccttcatagcaataccgtaaggcttaacaacctgactaagatcttgttcaaaacgttttggacagaagcgttcggaatgcccaatgataccacacacaaaacagaatgtaggcaaatgttcgtacttgaaattagcccaaatccactctccattctccttacacaacttcatccttcttttcaatggtttctcaatatctacggtcgcccgaacacgtaaataatcccgccaaatgccattaaaattcttcgggtcagtttttacaaaagtccccacgtaagtcgcagcacttctcaccactttttccatcataaatcccgaaacaagatcatggatttgaatccacatatctagtttgtgaagatgaaccatccttggattttcccctctcttcagtctatggaaaatcagcggagccttgttaaac

SEQ ID NO: 86941 - DNA, 1052 bp, Cannabis sativa
ttctgtttaagggattagattttgtcttttaatttatcaatctccttctgttgcggcacaacatcagaaacttcccttttcttcctattgaacagtttagatgtactagtcaagaacctgcaaatcatgaaataaaattagctatgattttttttttttttgtataactaaggaaacaaaatttcaagtactagcatacccaacagccctgacacgtccaggatgctctggtgtcccgagctcctgcgtttggatatcgttttggccatggacctaaatttttccctgagtaagttgctcctgtaattgaaccaaatgtacatattcaagcaattagtatatgaattatatatactaactcattagtagtactcaattaaggattaatatatacttactatcttttggcaattttcttgtcgtaatcagtgacaagttttgttctcttggtctgagatttgatccaaacatggtggcgtgggggatcttgaacgtcgaggtcctttttttacattattttataacaattaaatgagtgtaattatattttaaagcacattattagaaatcattaattacttaccacatcttcccttacgtttaccattccactccgaccacttcgatgtttggattggatttttgttgaacgttccctttgcaccttactcaattcctacaatgcaaaaaaaaatataattagatacatgtacttgtatttaagagtttatcttagtacaaatataattagcgtacctaaaattcaagacttagtcgactttcaacaaatttcaaccaatcagtaaggtcgatttctagatgctttctagggaattgtgccaataattgtacatcattctcttctaatgcgggcattataacgtcttttgtcattccattcttgaagtatttcattaacttcccagcaaggatcagacaatcaagtttgaactcatctggcactataaaatccgtctagtttgaaggaaaacaaacacgattagagttaacatctgaattaatcaaaaacaaatcaaaattctcacaaataa

SEQ ID NO: 86942 - DNA, 1096 bp, Cannabis sativa
gaggaaaaaaaaaattttgggcccaggactgggtgggccctaggcacaggcctagcccgcctatgcccagggctgggcctgcctttagaccatctttggaaatcggtttcttcaaataatcagattttcttttcaagtggactagcttctctggttttcgacggagcaagtactcttcgggagtccccattggaatgtcggaatagaaaaaaatggattggacccaatttgtttcaatacagtcagactttctcaaatgatgtggcattattttaaatgatgtggcatgccatctggtgtccagtgtgcaagataacatcaaggtacttacagaatgtctgaaagtgtaacggaaggtatttatgccgccaaaattacaatttaagtattaaattacaactgaaagataaacttaagtacttatgccgcaaattactcttattattattttaaaaataatgaatacatcattgaataaaaatagaatgtttgacaacttaaaacctaataaactaagcatctaaagagaaagtgtttaatcacctaggttgtttattcattcgaagatcatgcactgctaatttttatgcagttacattagctgcccgaaggtttagtgcatgtttggcaatgttttctgtttttgtttttaaaattttgttctgaaaacagaaaataaaaacagttttttgtagtttttaaaaagtggagttgtttggctaatgtttttaaaaacagttttccaaaaacaaaaaacaaaaaacatgtttggatgatgtaaaataatttgttttttgaaaacaattttttaattttaattttattaggttttttttttctatttttttttataatagcatcctaaaatatttttttattattcaattttatataattaaaaaaataaacatctccttacaaaaaaaataacatctatatagttttaattttttttttttaagaaaaacaataattaatctagaattgtcattaagtacaatatgtctaaaacgataatttaatactaaaattattctcccatattgaaatatagtaaactaattcctgtttctataagcactccgcatagcttgag

SEQ ID NO: 86943 - DNA, 881 bp, Cannabis sativa
tagtgtacatgactcttaaaaatataatatgagtattatctttaatcaaaataaattatatattatataaaaaaaaattaatggcatttttaaaaaaatgtcactatttttttttttttgacattttaaaaatgtcactaaatcattttgaaaatattaaacaaaaaaataataaatattatagtgacattttgaggtgtcacaatttatatttagatgttattttaaaatgtcaataaaaattagtttagtgacacttcaatctttagtgacattagaatagcttacatttttaagaaatgccactaaaatataaagtgtcactaaatattaataatagtgacatttagaaatgtcactaattaggaattttggttataaccatggtatatgactgagaaattttgttatcaggctgcccattgtggatggaattgaaagaccacttaagttattttgtgacaataaattgactgtattgtatttcaacaacaacaggagctcgatgaagtcaaaatatagtcacatcaagttccttgttgtaaaagaaagggtacaaagtggacagatttatatagcagttaggccaaagtgaacttaattgcgaattcagacgaccttaaaggtagaattggacttggagctcaacatgaaagttttatcttgttcttagctttccagaacatcttgaatcgtccaattctgagtaatatcgagagagttatggccaaaatacaattagtcatcgcagtaggaaatttctgaaaaaaaaaaaaagatagcgaagaaaagatagattttcaagaagagttgcgatttttttatcttttgtttaaaagatgagttatcttttcttttagagagatatttcctaatactat

SEQ ID NO: 86944 - DNA, 678 bp, Cannabis sativa
ttggattcaatcttgccactgttacttaagaaacagtgtgaattaggggtgagtttgattcatcacaataattgtgaatatatatgttcatgatttaatatagctcatatataaaacttataatcatgtaataaatatgtgaacaaagcatatgacaaagtcaatatataattcttttgatctttattaatataaataagattatattgaatgaagttttatttaaagcataaaatctcaacatttttatgcttaatttaataaaataataaagcaaaagaaataaccattaaaaaaatgagttgaccgggtcaattcattgacccacgaactcgttattgacaaacacgttcgatgttcagccttacaacatacctcttttatttatttattttatctttatctctcctctactgttaaaaaaagaagaattttagctacgccgataactatttggaattaaaagttgcaccatcgcgttctattattaaatatgattattttaagatatgagaagcttatattttcttgtcattttttaaattaaagaaactgttgatttactaatgataccaattatatttgtcatttctacaacaaattaaagttaccaaaaatatcttaaataatattaagataccataataaaattctaaaataactaattgataacttaaa

SEQ ID NO: 86945 - DNA, 1189 bp, Cannabis sativa
aaggcactgttacatccattggctaaagagagattcgagatcaaagtttctctaatttctaaaaatatgggttctagtttgagtttgaaaatagaggaatttggaaagctaaaaaatggtaaagaagaagaacaagggggatttcacaactatttatagtgaggaagccatgtcatgaaatttaaaattaaaggcttaacaagttagcccaaaagcacaaaatgatccaacgattggagagtttaaagcactacatttaatgcttcttggcagaatcaagagatttaatcatcattattttcctcgagccttatgcgcattaaagatttgtcacgtcataactctacttccagttgagtttccctacaacaaatacattttctacaggcacgtatgacccaggggttcacaggatacgcgacacacgtgcactattaattgttttacagaaagggttttacacctctctactgccaggtaccaaagagatgcttccacattctcagagtttgcccatgtgtcgcaaagtatgccttaacaatccagagggagactgtaagcttccaccactcaagagtctcagaagcttggggggtaaatgttgtccgtatttttagatgaaggacacgtgccaaaaaatagaaggcaacaatccaaataattactaattaagtctccttaatcacggaaggtcatcgaaagactatgatggcccgggaagggtctaatccaggagaagcacaaagatttgccacaaggcaaataaccatccatgacccagaagccttaccacaagagaagactgacaagcttaagcatgtagaccatggtagtgtgcacatcccctatgaatactcttctttgtccgatagctcatcttggtgtcttgtccatcaagtgcagaacctttgcccgacacgtgccctgcaccaacaatccccactgtacggatcattcatcccacgagaaagaataatcttagggacccaatagtcagataattatgtattctaccccaatattttgtgggctttttgctgaaaccctagacggtcatggtataccactgtattttcacataagggggtgaaaaaaaaaagagatagttgaagctctgccaaaatctcattaagattttttcttcttcaagagaaactaagagaagagaattaagttttactgtaaacac

SEQ ID NO: 86946 - DNA, 679 bp, Cannabis sativa
tgataaagaaaaagtattaggaatcggagcagtaattaaaaactacaaagaagaagttgtggctgcattatccaaaccagtctaagactgttttagaagcgatgaaatggaagcaaaagcactatttcatagtcttaattggacaaatcaacaacaaatttagataacgcatgttgaaaccgatgctttaagagtgttttctgttttgatctcttcacacaaagacttatcttgtttttcagatctaattgatgatgtacgttgtctcttgacctttttccctgaaattactgtcgctcatgttcgtaggaatgctaatcaagctgcctacggtttagcaaagtatgctctagggttggatgaagatgtctgttggatgggagaaattccacatcctattttctctattattgtaaatgacctttaatttataataatagtaaaaatttctccaaaaaaaaaaatatgaaagaatcaaaattatcattatatatatttcttaaaaaaataatcatttatattatataagcttttttattttaaatttttcatcaccctcatactacctcattggggagaagtattcccatcattttcctcccgcatcccatcaagttcttccatttatcatttcagtaaaaatgttgatgcaaatcattaccacacaaataatttctat

SEQ ID NO: 86947 - DNA, 634 bp, Cannabis sativa
gcttgaaagatcaagagatagcaattgtgacaactttgaaatatcttctgcaactaaaccactgatatgattgttggacaaattcaagaccactaaacccaacaaatttgtcaaatttgaaggaagttctccactcaaatcattggccgaaaggtctaagctgacaacaagagaaagtgtcttggtgtacttttgatcttggttttttaaattcacaaccaagctatcttcaaaataaatgcccctataaaagccaaagaacaaataatggtttatcctttggttttcaatcatggctttgaaatatccaaagctagcaggaatgctaccattgaatccattatcagccaaatccaacacttgcaatgagcttaaatttgatagtaaggatggaagttcaccgaaaaatgcattggatctcaacttaagaattcttaaattctccaaacctttcccaagccaatgtggtatgtttcctgctaatctgttgttaccaagatcaagtgtctccaaactcgacaagttctgaaaagatgatgggatgtttcctgaaaacttgttgtcattcaagtgcaatgtttgaagcaaacttagtttacccaaagagttgggaattgtaccagacaaattattc

SEQ ID NO: 86948 - DNA, 582 bp, Cannabis sativa
atccccaaggctcgtgctgttccattgacattatttctcagagtgaaaatggcaaaacgaatgggtctgtgcaacattcagcaacagctgaagagaaaccagttggtgaattctcttggagcaatttaagaattcaggaagagcgtatttccttagttcttggatcaaacgagacttcagatagtcaagatgagattagtgatgctgatgatgagatagagaagcaactgataaagcagattgttgagaggaccaaaaaagggtctcctgtggttttgaatgcgcaaaggcttctgttttcgttggacgaaaatgagaatcaagtggtggagaagttctaagttttgcagtctgtatatatagatgaggatatgttcatttatctcaaaagctaacagccctttgctttgttgtactttatttgtcttcatttggagcctctcttcaaagttttcagaccctaatcagattttactttaataggaaatacagtttgagcattttctcattttcattgatttgatttttattagaagatgatcattccaatttcaagttgaattcaatataaatttcatcaac

SEQ ID NO: 86949 - DNA, 665 bp, Cannabis sativa
caaatttacaagtctcaacaagaaaattcagagaaatgagataagaaacatcactgctgaacaattacaaggcaatgcaaagttgctgtgctgtcaagtttgtagattattagtaagaattgtaacaatatgtataaaaataatttgaacaatatcaactgagtcacaaagaagaaaaaaaaaatctaaaggaaaaagtatcattcttaagcaaatagtcattgctactcacaattattataatgcaaactaaaatatctcctttccgttaatagataatgtttctaaaagaggtgacatccacatcaataaatacaaaggtattgaaattatgcacttatggtatgactgagcttttattaaacatataagtataaccattgccttatagaaaaaagcataatataatactaatttgagcatatccatttctttcaatattcaaaagaaacggttagaatttggtgttaagatgaatgaggttctatctcaaaattaattggcaatgaaaggagtagttcattcctcttatatattctattatctttacacacattagcaatttaagactctctaatatctctccttaagatggtgactattttatatgctcaccatcttggacaactcgatcataagtaactcttttatgactcactatccct

SEQ ID NO: 86950 - DNA, 560 bp, Cannabis sativa
cattttccctttttagtaaactttgattgatatatcaaccaaccctcattacatcattaattaattttttgtatttagttatatataaacatatagaaaaccatttaattagggaattttatgctaaaatgtatgtttttctctgttttatctttacagctaacttttattttatttttttgaagaaagtaatcagcaactttattaagcttcaaattcagcaatcaaaaaaggaagcagatcagttgggacatctcccatactgaaaacacgatcagggtaagaaatagcagctctagcaatcgtatgagctactaaatttgctgaccgttttacaaaagaaatagaaacaccacacaaattaacaagcaaattttgacattcttttattacatcaccaaacaaagaagtcatatgaatcgggttacgaatcgcttgtaccaccaccaaacaatcagtctctaaggtcacgtgaggccatttttttatcttttatccagcttaaagcctctcgaacactaattgcctcagctagttcaggtcgaacacacccatgacaa

SEQ ID NO: 86951 - DNA, 567 bp, Cannabis sativa
gtggggacttctaaggaaaagacacctgccggggagttcatcgatcttttggaggagctaacggttgcaaactcctctactctaaaagttgtcaagtctaaggagtctcgaggagggagttcggacaggtctgaccaactgagaggtgggtctgagctggtacggacctctactccacttttccgagtgcttctagaggccaagaaagggaaggagatgctcgcccactatatgaaccggttagttcctgaggttcgtgagcagctggccgatgctggcaatgactcttttctggagctgctgatgggtggagtcttgaaggaattcacaagggtaagtccttcttgatgatttcctttaatcctctttacttggctcaaatactaaagttttcctctgtggaggccggtctgaagttggcctacacctactcccgggctaagtctgcttcttccaagaacacagctttgtccaacagcatgagggcggaggtggacttggccaggaaggatgttgaagatgccaggatggaactcgaagctgttcggatggagttgggtgaagcca

SEQ ID NO: 86952 - DNA, 710 bp, Cannabis sativa
aaaaaaatatataaaaatataatgtgatttatattgaactaaggttaaaaaagtaatgtaatatgtaaagcctaaaaattattgacatttttatatagttatggttcgtttggtacgccgaataagggttgtattgtattaaataataaattacactatgtttggattaaacaatgtattacaatatttacaaaggatttggggtcaacaccaatctctgatctggactcggactccggacccgaacccggactcggacctgaacccgtagtttgtgttggaatcgagtgtattaaaaatatattataactttacataatcaattaatacaagtcaataccaaatattgtcttatattaaatagtactaatataatacaatacattacaatacagcgtactaaacgaatccttatagatttatttagcaaaaaaaagacgtatttaaaatgaatagagaatagttttttttttaatagaaattggttaattagtggctaagggcatttgtatatatagatattgtttttatgttttatttataactagtaatgtgaccgtgctttcattatattattgatttaaaaataaaataatttaaataattaaattaataatttttaatgcgacccatactcgacataaaaattaacaataatgcaataaaaagaaaacaaattaactaggacatcaactttttttttttttttt

SEQ ID NO: 86953 - DNA, 1554 bp, Cannabis sativa
attaaaatacataagaatttaatactctaaaattaattaaatctcaaaataccatttttataccttccctctttctctcggccctctctccctctctctctaactcacaccaaacccatggatacccacaaccacaaggcaaaacccactctgaagacaaaatgtaggacaaaaccgaggaggatattacgaaactacaagagaaattgtgaaatccaaagctccaaaatctatgagcttaaccaccctgaaacccctaaaatccctacccatcgttagagttctcaactcgcttgttttctgcattttttttttgtttttgacgatatcacgaaacatcgctaaatatcgtgaaatcatgaaacatcgctaaacacatcgctaaatgtcgcgaaatcatactcaagttttcacgatgattagcgatgtttattgatatgttgtgtattttttagtctcatatcacaaatacatctttaatatcatcgctaaattcgcaaaatatcgccaaatatcgcaaatcatcgctaaactttatcctaacctcatatttgttctatcattttaaatatatcgcaaaatattgtaaaaaactggtaaaccagaagaaagaaacgcaaaaaacaagagaggtcatgagagaagacgacaacgaggccttgtgaccgggattctgggtctgtgtgttcgacggtaggagttttgggtcggggttaacgccggagagtgagagagagaagttcttttgaaatgtaagggtattttttagaggaaaagatattaaaagtatgtatatactatttttaattgggtggtatattaaaactaaatattttatatttaagcatacttaactaaattttcctataataatatatcgttacacgatttttgcaattttttataaatttagcttaaaaaaatgaattaacattatgtttggtttaaattttataattttgctttaatacaaaaaaaaaaaaaaatgtattttatacttagattaataggtgataaaaaaataaataaaaaagtgatttattgtgatataaaatttcatccatgtaatattttattttaaatttaaattatattatacactatatttataactctcaatgttcaaatcttggatatatcaaagaatttatttgaatcgttatttacaaaaaaaaaaaaaaagtaattaaagagttaaaaaataattgtagatataataaatgcagcatcaccaatttcaaaaaatatagtttggatactaataatatattaaaagagtattacaataattggaaaaaggatactagagttaggttagtctttttttttttttctttttcaagtggaattggttagtttaatgtttgtgtaaggggaatgtgaattaattataccatatttcttatttatttgtttactaaatattgtaatatattataatgaaagaaactagtgggcccacttaaattaaggagaaaataaaagaaataattctcttcctatttttacaaagaataatttttcttttccttacttatttatttttatttttat

SEQ ID NO: 86954 - DNA, 840 bp, Cannabis sativa
  modified_base (381)..(391): a, c, t, g, unknown or other
actcgccattactgatgtaaaatttaaacttcagttatgaataaagagaatcatttatattaagaaattacaaaaatttattctttaaaaattacttaaggggcatttatgtatgattaaccggaattcatctggaaatacatggtacaatgcaaatccgccattttaatttatttttttttttgaaatctaaaggttctcgactaaacctctttggcaaaagaggagtcgaacagttataactccctgaccaaacctttttgacgagagaggggtcgaatttttataacatcttgatcaaacctttttgacgaagaagggatcaaataactataatttttgatttaaaacctatttgacgggaaaggaaaatcaaaagtnnnnnnnnnnntataaaactgaatactaacggttctcgcgagctaggaaagtactaaacgaggcatcgcgatgccttgataaaagtacttgaatctagaaaatggatagataatataactattcatacgagtaaattaaaaatatacaaagtgataaaatcattaaagtatatttaagtttgcttaaggcatattaaaactgctatagcaaggcaaaattgacaactggtcgaaaatcaaaaagtttggtagatcactaactacttaaataggaagattacgagcaatggaaaaacccaaaagtactgtacatttcatcaaaatatagttgtttacattgtgaaaaaaaacgcaagcaaacacaattgtattaagttcgagtgaaaatagtataaggcacttaagataagaaaaaacccaatttgggttacaaacttgtctttacaaaaattccactagg

SEQ ID NO: 86955 - DNA, 1460 bp, Cannabis sativa
  modified_base (33)..(37): a, c, t, g, unknown or other
  modified_base (1332)..(1333): a, c, t, g, unknown or other
tattacaactagtgctgcaaccactttagaaannnnnaccgtaaatttaaaaaataaaaataatatgtgagattattccccattattttaggttaatacgcagtctttgaagatacttataaaaaactctaacctattaataagctcaagataattaacaaaattaagaatatacataatattatttattataattgtgttgttatttatcttatgtgttaatgatataaaataaaagatgaaaaaaattgtgatattctcatatttttcatatattaataagaaaagataaaaaaaataaaagaaattaaattttaatatctcatattttttcatatattaataagaaaaattattggacaatctaaaatctaataagtttaggagactcattcaatagaaataaatgtagtaatcgtgcccaaatttttgaaattcaaaggtttttgaaattgtaaataggagtgtgtagaaagtcatccaatccaattacaatcgaccgatataatcctaactgatccaatagaattggatatccaattataattgaattggattggatgtaaattttgaaaattcaatcggattggacatccgatccaatggataaccgagcaaactgatccaattatcattcaatcaggggcagagctaggattaaattcttgaaggggcaactattaaaattttatagttcaaacaaaatatgttttattataatattgcacatcataagggcgtatttgaatgtaagtgtttaattactagttatattacatagtctagtaattacactattatatttaaaaatacaccgtgcgcgataattatatatgaatttttatagttttatttagcaaaataattagcatttacatataaaactaatagggtgactattcaatttttattgtaaccatatggttacattttttttaacctataatagtatgttacaaataggtaaaaattctatttttagaattaattaattataattaactatttttaaagaaattaaatacatatttaacaagactttttttagcaattaaaatttataaatatttttttatttatatataaatccatactataattattttaacaattaaagatatttataacttataatatttataatttttttaattaaaattaaacttatttttatataaattaaaattctgtccttataataaatatttaaataattaattgtttttttacaatgaggcctcaagctagtgctgggcctcaagcttataataaatttttgaataattatttttttatacaataaaatggctcttgagctattttctaaaaagnnatttagacatgagtttaatggttgttgccctgaagagttagtgaaattatattatgagattctaaaaaaatgtcgaggcttaccacttgtaatagggaccatagctggtttactatctagaaaaaag

SEQ ID NO: 86956 - DNA, 586 bp, Cannabis sativa
taaaattatatatgtacaatacctattagttttgtaggttgcatcaaaacatagacaatctccaaataattcataatccactttcattgatccatcagcccaaaataagttagttaacctattttcttcatcaacatcatggttgtaaaagaagtctgcatccggacctttctttgattgaagataacccatggcagtggttgtatcacaatcatcccaatttctaaagttgtttctcaaacctctatataaatcagcttttatacatcccaccttctcccaacctccatatatctctactagatattgccaaatgtgagaagtttttattccagcccttttcatcaacaatgctacttccctcacaggttcggttagttttctatttgatctaacaaatggtttttcgtgagacttagctagagcatgagtatgatgaaccctaaaacatttaacaaaccaagtattggtttttttgttcaaaagtatttttaaggtagccctacaacccactcttgtcacatcacgttcttccttttttcgattttcaatatgcttatacttttcatctctaaagccttcactt

SEQ ID NO: 86957 - DNA, 526 bp, Cannabis sativa
ctaactttctatttttaggctttagtttgtaatttctcaatagaaaatcaataatgcaaactatttctctctctaaagtttttacagggaggccaccacattgacctaatcttggacttattggtcttttcagtaaggaatggtaacctctgtccatcttccccttctctgtctatcgtatctcaacatcccaatttagtttgttgatctcttcatcaacgaatcatagagaagaacgaagaattacattaaatggggatcgaaaatcatagagaatgatctttgatttcatgcatgcagggattgaaaatcacaatataagtttaagagaaaagaaaaaggaatcttttctttttgggtttcaatagcaatattggattttgaatcacaatatattatttttaggtttggaaaaagagaagaacaagtcaatcacaatttagtttttaatgataataataataagttaatgacgttaatgataatgttaaaaaaatcgttaaaccaaagattgttgttacatagt

SEQ ID NO: 86958 - DNA, 504 bp, Cannabis sativa
gagagagagagagagagactagggcgtgtagaagagaggagaacagagaattagggcttcagacttagagttcagagcttagcgagctagagacttagagcttagaggcttaggacttagggtttgagacttaggatttttgggtttgactaattccctttatgtagtagagtttacatccctaatatcccttaaaaataagtaaataaaggtttatttacattattaattaataaataataaataggataattatctctcaaaaatagggaagttgctaatattttcatcctaatttcgtgggttgtaaatcgccacttagcttgttgtccacagatgaaggatgtgcaccaaaggcttgccagaaaaaggttggtcagccatgttcctgaaagggtctagccgactatgtgtttgccatggtctggccagccacgtgcctgctagggtctagctggccatgtgtcagctagggtctataggttacacatcaagtgcttgcca

SEQ ID NO: 86959 - DNA, 652 bp, Cannabis sativa
  modified_base (601)..(609): a, c, t, g, unknown or other
attattttagaaattcatatttagaatgttaaataacatacatgatcccggtaaaataattcccaacaaatacaactaaagaaacagaaaaaaaaattgctgaaattaccttataataataagcccctaaaatactccttaaaatcatctacaccaacgccttcaaggaaataaaaaagtaaaaattcttgttaaatattttttagaatctccaacactaaggctttgaaggaaacaaaaatgcagaacttttcaatcatatactctttacaagccccaacaccaaagccttgatagaaataaaattgtagaagacaattttccttatcccaaaatagataataaagagaatgagtcttatagatgtagagggagattgattggaagattagaaaaaaaaaacttagggatttaacatgacaaagagctctgttcgagtcattgcaaaagaattctatttgagttataaaacatgtagttttaaagaaaattgtagcaaaggcctccaaattataggattatgttagtaaatatcctcatttcaaaacttgtagagaaatgaccctgttaaactattttttatttagggatattggcggcnnnnnnnnntgaactttacagtttgtaacacttaaccacaaaaactgaattt

SEQ ID NO: 86960 - DNA, 969 bp, Cannabis sativa
attttcttcacagttttccaatgagcttcaaggggagtttgcataaactgtgaaaccttgttaacagcataggatatctcaggtcgagtgagagtagcatactgtagggcacctacaatactaacagagagagaggtatgcattggtgtagagaaaaatagtgaggtttgaaattttaaagtgataagtgaaatatatctctctttgtgagtttgataattttaccaaaccgaataaattttctttatttcgtttctttattatttcgttacgcttgaagtttatcatttttcccaatagtttcatatacttctatatttcaatgtaaacatttatccatatttttttttttttctgagaatgaataaacttcactaaggcatctgccaaaagagccaaaggtcaaatacgattagttccggacactaaacctttgcataattcaagttaaaattaagtatttaaaattcgtcaaatattattataatgatgatctttaaaatttatataacaaagcgaacaattacttcccattatttatttttacaataataatattatacagcaaataataaacacatgaacatgttacacttactcatttataatcaactaatctaaaaggacatgcaaacacttattatacacagaatttgtcatattttttttttaataatcaaatagaattgacataattaaacgagtagtgtatataatagcttctgaaaatctcatgaaccagagatttgaatagctttactaacatcaagcttcttcacctctgccttagggacaaccatagtgagaagaccacactccatgccagcctttacttgatccaatttagcattctccggtaacctaagccacctcaagaacattcctcttccctgctcatcataccttatttccttctcctccttgccactaacctggaacagtactctatcgttttcgtaactgacttta

SEQ ID NO: 86961 - DNA, 612 bp, Cannabis sativa
ccttgccaaggaagccatcaggttgcgagaggatggccatgaggattcgtattagtttcctctgttttgttgcgttttatgctttgtttgtttctttcagcagcttaggctccttggttgtcatgaattactgtttcattaatctcattaggcatacccccctgttgaaagaaccccaacattgcttgataagtatcctggccaatatcatcctagagacctttaaaaaaactagccccacacccatttggactcgggctattagaagtgtgaatgtcagacatagctttctttacatattccttcttgaaagggctggttaaatggagctattgcttctgactaagtttgctaccgtattccgaacaatctaactcaatcttcctaatagcagaactctttttccccataaagttgcaaaaatgaagaagaaagttctccactactttgggataatcttcaataatagtgtcatcaatatagtaggatagaatccaattctctattttccctttcttcatgattccatggaagtagctggtattctcatcaccaaaacgcagccaagaaatttttgaattctgatgaagatagtgttggaatttattttac

SEQ ID NO: 86962 - DNA, 692 bp, Cannabis sativa
tacctggagccttatggtctattctttccccttgatccaggttagtttctttgttattgcagaggagaacatgctagatgaatggttttcagttcctgtcatgtggaggtcaatgtttgctatttagatttttataaaatttaaaaatttgcagggcctggggcaactatcgggggaatgtgtgctacacgttgctccggttcattagctgtcaggtagtttgtttcttcttctcttctaaaacaaaaaaaaaaaaaatctattttttcattttacttttgcattacagtttcatgctagtaatttcaaccttttttttttttttttaaataatctttctgctttcctgctttgtttattttggtagtgatgtttattgcatctattacctttaagtttttagaccatttcatgagtatattaactttgtcatagtcctgccttttcaagatagtttgagctatatcttaaatgttggacatgcccaactttggtacatgaagtgaaaaaacttactggcatataaagattcccaagggacaccacttagatttttcatgaattgacaatcagctagccacatttatattttaatttaatatttctgtaacaaaacctatgttagttttgtttcttcgctacacatttcaatagccttttgaagtttgaattattaattatgtaatttatta

SEQ ID NO: 86963 - DNA, 851 bp, Cannabis sativa
aggtagaatcattctatacaaattaatctcattactctgttctcagtccaagtttccaactttatataagtagactattaaattgaaatcagattgtagtccaataagctcaattatctcaaaatcatactttaccaacaaaagagcaaaatagcaagtaatgtcaaacatggagcccactttatataatctacttgacgctctgcgatgtcgatggatacccaatatttcaaacttgaagaataaaagttcagtttattcattcaaagaagagcacaacctatagcaaaaatctctaactatgaaatctcagaatctattcaacaccaagaactgataacaataactcaaaaacaattcctactaactgaattgttttacaagaattagcatttctaggtactacttactaaatcaaaatacatatctctgaaattaacatgatgtttcaagatttaatctttgtgatgctccgaaaaaacatgtaagtcataatcaaatacttgaaagccaacaataaaaaccaaccctgtaagtaaagtacctacctctctcaaaggaattgagaaaattgttcatgggaaatgctctttttggtgagaaacccaactattgattcccttatcagctatcagattaaaatgcatcttcttcctcgtcgtacattgttgatggggtctctctttctgtttcaatgaagttgagcaacaccagcatccattgaaaaatcacacacaaacacgacagatctgtaaggaaattagatcagtacctgacaccgaaaacattgacgggcttctcaccgaagagaaggatcttagagtccctgaccttaagctcatgatgcttcc

SEQ ID NO: 86964 - DNA, 4418 bp, Cannabis sativa
aatactttacacttttattacaatacaagacttaagacttgtgcaaatatgaattacatgctattacaatagaaaaaataatagtaaaaattttattaacaacattatagaatagataattgatgaaatcaaatgttttatattatttctattaaattaattttttctgttcattttattttgttcttttatttatattatttaacttgattttaattagcacaataataataataagaaattggtaatcaaaagttaaattggatttgccaaattatatatttcacttatgatatgtatttgtgtctttaattttgacaatacatttttgagtcattatcgaagattgaatttgtatcacctacatgattattaaaatattttaattgtaaaatttaaattaaacctttaaactttaatgtatatttaaaatattagtgattattctaataaatatggaatgattttaataaatttactcaaaattgagtaaaattttatcacaagtactatcaacacaatagagtagttaagaaaaaaaaaaatcaatagagttagagttaaaataatgaaacaaaaatacaaaataaaattaataaagtggataatttccttatttatttttgtcatcactaattctacttccattccaactaggatttttcatcatagtagatcatggcaaaccaaactagtgaaagtgcatattggtgttaataacttagcaagtgtcctcctactaagttattatatgtttcgcgctaaacggtgtcggtttgtttaaaaacacaaagtctgagttggattgggacttattgagagccgtttttataaagaaaacggtgtcgtattagctgaaatcgcagtttccaaattccaatattgtcccaagcaaagcccggaaactgacccaacttttacagggactctgatctcttcggcgaccctaaaaacgtccaaacacaccaatcttccacgacccacttcccccgatcgctctctctttcctcctctttgtttgggatccaagaaaattacaaacccccctttttattttccctttcctcaatttcaatttcaaaggtgcgttctttcattcgcttaatttttttattttcaattaaaaaaaataataatcacgtgagattcaattgctgacctgacctattgttttgattattttctcggcaaccaaacaacctgaacttagcttattattgctaaagaacaaaaatcaaattacttgtttttatatagagcttcaacggggttgtcctagtgtaagtttttttttgtttgtttgtttatttgtttgaacattgagattagctcaaagtgttttgagttgcatatttgtgtattcaatagaaaacgatttagattgtatacgaatgtgatctcattactagttactggaatttagacattgtctcccaatgctctgattactctttagttccaatcattatcttattaaagttaatattcaataatttcttgggattgctatttgtttttttttctaatacattaattgaacttagttactttatttaatttttcaattaatgagttgagtttaatctttgtggagcaactgattaaattttaaactgtttggtactgactattttgttcattttgtgcagcttttccttttctttttttaatcaaattaagattatccatttgcatttggagggtgtagtgtacgtgatatgcgtatttaaaccaatctcctatgatatgtaaatagctttctgggaatgtgccctgtaagtcccttatatatgcttattttttcctttaattgaatatagtagaaataatatttagggaaaggtttaattggaatacaagagttgtgctttgactttatatttaattcttgtgttgcattcaactcattttctctaattattcacgttgcagttttctttttggtatgtgaatttcaatttggcacttgttatgtgattgttgtattcaacagtttccgtcgaacttatcatctactttttagatgttattttgattaataagactataaatatggatgagttttaaggtcttaagcttcatatgtacaagtgtttctctgttaaacgtatgctagttgaataatcaggtgaaagtaaagggccgcataaaatgatactttttagttaggtgctactagaaggagatttaacactgactacgattgaaaggcaataaagggctcctgctattagcttgagtgtttcaaggcttcagttttttgttgaatttagtttggtgaaaattgtcttggacaagcagattaggaagtttttttttctgatttgttaattgttattgttattattcaagtctccagttctgaagttcttacccatctcattcaagtagatcttacgtttgttttcaacatttttctttacatttcagatacactacccagtaagcgttcttaaaaacttttggccatatgtgctttagttccccaactttgtcatgcacccttgtattttctgggttattgatgcaaagtatgtgcggaaactagtgcaatggcaacatctggcaagtttgacatctctggtagcccagatagacctttatatatcggtgggcagcgtggatcccacatagcaccttcattggacaaatcgggtagctttcgtgagagcgtagataatccaattttgtcttcacttccgaacatgtcaagaagcgcctcagtagcacatgaaaatttgctggatttctttcgttgcatacggttcgatgcaaaggttgtggctgcagagcataaatctctccgtcaaggggactttaaacgacatataaatgttgcttttggagtttcaccagatgaatctccatctggttctacaaaaggaaagatgcttccatctccatcaccagaagaaatcaaacgacttaagagtagtttgcgtgaaagcaatgtcaaggccaggtagttctctgtatgtttttcatttagtttggagttgaaaatagttcatgacattatgtaataacagggatcgagtgaaaattttcaacgaagctttatcagtattcaataaatttttcccaaatgtaccatctaaaaagagatcccgatcagaaggttttcctagtgatcggtctggtgcagtgttgtcaaatgaccggtcaggtttagggacaagcatgggtaagataggaattcaaaaccattccattccaggtagttttgaacttgagcagcataagtcagaagaaaggaccaaaactgctcttccaaacaagcgcacccggacttcttttgcagatgctaaggtacgttccttttaactttttcacccgtgcttcctttgcaatttttttccttttagtactattacgaacctcatttttcccttattttttaaagcactaattttttcctatcctttttcttacacatacactttccccatagaagccttgtcctttatttattacttttaactgtcctcaattctcatccttagttattcaggtaattgtttctaaggagttcttgtcattgttgatttgggattagagataatgtttttttaccagtcagtagcaactgttaggtggtcgtcatatatatctcttgctattatctttcctttaaaataagactaacatggattgtcacaattgtagatggatgggcggagtaacactctgctcaggccgtctggtgttgtagatagggatagagaaatgttgaggcttgcaaatagtggtgcagtacagggtgaagataggaccttatctattggagttgatggctgggacaaatcaaaaatgaagaagaagcgttctgggataaaaccagatgtttctcctagtactgtatcaactaaaccgaatgatggctaccgggagaccaaacaaggaatgcaacaaagaccaattactgatgctcgatcaaggttaaatatcgaatcacatggctttaggtataacctttttttattaccattatatatccaatgaaatggatcaaaatcataataattagatagccctccattgagtagggatgctctaatgtattgcctaattgcttttcttctttctctttctatttctatttgtgtgtgttttttttggaaatcaagaagagtataatactcgatatgtttggtgcaatctaaaatgattccaaaaaggtcacattgagtgattataatagacagttttttatatatgataaatctttattagaacatttgttttgtgtatttctggatgtaagcattatccctatacaaattagttttgaggccatagctgcatgacattaaaatgcctatatactcaagacatttgtacggatgtcttgtttagtaagtttagatacgggatttatacttcttagtaagtaattaggaatatcggctagtttatct

SEQ ID NO: 86965 - DNA, 554 bp, Cannabis sativa
atttaatattatcatttagtagtggggtatttgaaatgtatatattgtttttgttcgagtgtttttacttaactcacttggttatatattcgagaattcaaaaattttcatgagataagttttaattacatttttcttttcttaaaattactttatttgagtagaatttttatatatttattaaagttttgttactagctaattcatttttatttatgtaattcctatagatattctaagatgaatactttttaaaactacaaaactttaaaattttatctctaattctcttataatatttttgcatgcttttaagatagacaataagttttattattaggaagagatctatagatattgtttcacataaaataaatagtaaagtatttagtcatatataagaatatgagttattctacttcaccaattaattttgagattctcaatatggtatcaaagtcattttttcaaaaatatttatatatatatataaatttgagagtcaagaattaattgtattcataaaatatgtatatattatagatttttataaa

SEQ ID NO: 86966 - DNA, 822 bp, Cannabis sativa
  modified_base (669)..(676): a, c, t, g, unknown or other
tttttaccaaataacaacccacatatcaaaaataatttaaattgtaattcaaattggcataaaaatatctctaatgatatatttttaaaagtgttaaatttttttatattatttaaaaatataatattttatttttcttctatattatttttggcacccttaattctaaaagtactccaataataatagtataacacctttcaaaaatattataattatgatatgacatattattattcaatatattatttattttaattgtaagtattgtcgtactatttttttttatttttttattcttttataaagagatagtatcaatctcatgtaatagcatcaacacaattttctatgatagtacctatttaacttcaatagtataatatcatagtattttaccaaataaacaatccacctaagtaagtatcttctaaaatttaactattataaatgctttaacaatccacatagcaacacaaaccgtaaaagtaatgaaaaaaaataataacaatactggtaatgggcttagaaattagaattcgtcatttaaatttcaaatttataaaatataaaaaaaaataataaatatttaataatgggtaaatagtgacatcagtacccaaagtttttttgtttgtaagcatcataaacccaatatttatttttagnnnnnnnngtactcaatgtttgtaaaactgtaatttttctctaattttgttagtacgaactctgatattgccttaaacagggcacatataaggcctaaattttttattatccagcctcaatagaaatatatagtatcagttacttccaaatgtt

SEQ ID NO: 86967 - DNA, 506 bp, Cannabis sativa
atttttgatttcgacttcagaaatcatggaggataatttctcaattgccatattaattttacattctaatatgtcatttgagacatagatggtatactttttctgatggaataaaatatgaaaatttaaaatgttgtttttgatctagtgtatctttatttgaatgtgactgcacatgatgtgaattgtctgttgttgttgctttaacgattcagtgaatatcatttatgggtggatgtcatgtatcatttttatttgaaaaatacattggagaactcatatttttcttgatcttatttattaacttttccgtaatttgatagattcaccgactcatattttctttatctttagttgaaatcaaaagtatttttcacaccaaatattaaatttataatgttagattaataagataaatatgtatgatttggaaataaatgtacattgggaatttataaacttaatcttgacaattcaagtaattcagtaaatacaatattttttgt

SEQ ID NO: 86968 - DNA, 1017 bp, Cannabis sativa
gctagagagacatgggtatgttttgaacaaatattatctttatattttttgtctaaataaattttataattaatttaaatattattgtttaataggaaaaaatgattgtcgtacgtgagaaacaaacacagtccatcccaaatactgaagtgttaggcaatgtcattaatccagaagacggagatttatcacttgtgcaatctttttttggaagacatcgtggccaccaaaaaggttatgggcgtctaattagcacaagagagatgacaggaccacctacatttacccaacatcctccacccagactggtgtatatgttggagctgatgtcatagttgatatgcaagagcgaattagacaattggaggaattggttaggacaaattgtgtcactccaagatcgcagaatccacctcaacaatcttataattctaatgatggaggactgagttagtagttgtgtatatacgtagtgtctatttctttcacgaactattttattagcatgttaggtaattaaacttataactttaaaatataaaaaagtaaatttatggtatttttattaatgaattttatttttattattatttgagcaatactaatgtgaaaataaacaaaacatatgatatatttattatgaaaattaataatgaataaaaaaatgtgttttttattaaaaaaaaaattgttctcggtaaaagactttgtaccgtagagaaagtccttggtgtagatgggttctttaggccaaaatgaaagcttttaccgataaaatatccaagcttgtaccgacaacaatgtcctcgatagactctttaaccagaacaccactgttgtcctcggtagaaagcaacttctaacaacgagcctctaacgaggactttttagcgaggacttgtcctcattatattgttttaccgaggacatttgtcctcgttatagaccctgttttttgtagtgggcttctatctggacatagaagtgaaatgatagtttccttcgagcttggcttaa

SEQ ID NO: 86969 - DNA, 803 bp, Cannabis sativa
gcaagtgcacttgcactcatattgtcacaccatgttacgggtgtgtgtgtcatgggataaccaatttcattcagcagcccttgaatccacgaaatttcggctgcaacatgagccaaggctcgatactctgattctgtgctggagcgagataccacgacttgtttctttgaagaccaggacacgaggctgtctcccaagtacacacagtagcctgctatgcttctgcgatcatcagggcagcatgcccaatccgcattcgagaagcctgtcaaactcaatttttctgagtacttgatatgaaggccgtgatacatagttcccttcagatatctcagcacacgttttgctgcattccagtgtgttgtggttggtgtttggaggaattgacttaatttattgatgccaaaagataagtcgggccgtgtgtgtgtcaaatattgcaatcctcctattaagcttcgatatgctgtgggattatttagaggttctccatcattttttgaaagtgtttttcccactgtcatgggagttgaacacggcttcagatgctgcatgttggttttgatgagaagttctttgatgtattttgcctgattcaagtaaattcctgtgttgtcacgatgcacctcaattcctagaaagaaacttagaggtccaagatctttcaaagcaaagttgtgattcaatttaacaacaaactcattgagtttagcactgttattgcccgttataataatgtcatcgacatatataaggactagaatgataacttgagatgctttgaaaaagaataaggatggatc

SEQ ID NO: 86970 - DNA, 718 bp, Cannabis sativa
gcaatgatggataggattggacactatgaattgtactatagcataaggaacaaatatcattcttatgtatagatgtaaagatcgcttagcttcaatttagaaattagtagataattatggcttaattatgaaaattatttattagtattgtatttacgatgatttatttgaatttagaatgtatttttatgtcatatatagaaatttcataaattttgcatgttttgtgcccgacaatattagaacgcggtgtttggctattagaatcacatcctagtatttttagtataccaggacaataaagttagacattgggaatgtcgggaatgtcgggaatagtcgagattttagaatttcccgaaataccctaagtgaccttttatgacttgtagtgtgggaggggcaaaatggtcattttgccccatttagccttttttccttatgtgaaaggaattaattaatacaatcattttttataaattattttgctgaaaatgattttaattaaacctatgttacttcattatttgacaaaaaatagaaaattatcaaaaaaaaaatctcattttctctcaattctctctctccttcgaaccaacctagaaccagctaaggttgggtttctctgctgcatttcaagcagattatagcaggtttttagtgaatccaagctaaggtaacctttatgcaactcctttagtttcttgatttttaagaa

SEQ ID NO: 86971 - DNA, 616 bp, Cannabis sativa
taacaaaacacaaggtccaatctgtaacttttgcaaaacacaggatccaaaatagtattttttctaataataataattggaatatttttaaatacccaaaaataataaaaaaattaatttacctgtacaattattttagtaatttttttcaattttatactctaatttagttttttttttatatatatatttacgaaaattcacaaaaaaaactcaagcaactcacgaaacaagttaaatcttaattaaaatccacatagagatcattggaataatctaaattataaatttaaaaagaaaataaaaaataatatgtagactaattccctattattttaacaattttacaaatttaatttaatttttcataaaattacgaatgttgtttcaaaagtaatattatttttgtttaaagaaaaagtaatattatttttatatagttacttcattaaagatataactaaaaaaaataaataaatatgtagatattttgtaaaaatataattttaagttacttctgttagaaatactgtaaatttgtatatagccctaattaattcatgagaatcaaacaataggattaaggaatagcggaagcgtaccggagtccatagaa

SEQ ID NO: 86972 - DNA, 888 bp, Cannabis sativa
attcagtgttagtcacctgtaatgtgtgtcactaaaaatatgaagtgtcactaaaagatcaaatctaaaattttataatttttattaatttgaaaaatattgacatatactgacacaccaagcgtgactgggttaatgtgtccccacccacttggcgcgtcactatatcataattttttttttttaaaaaaaatacaacaataattatacttttaataataaaaaaataaaaaaaaatatattatacagctggttcagctattgcatttattaaacaatattggaaaaagaaaaagattaattgctatactaaaaatcagctagtatcctcattaattaaaaaaatcctatttctttttttttttaacaacaaaaccctatttctttatctcttcaacatcacatttaggtttcattctatcccttagccaaaaaaacccagccgaacatgcctcttcttcttctccctctctttgcttttgaaatctgatgacctcctgcgcgcgaaccacctccaagatgacgaagcaacgaccaccatccctaccctcccaaggcccatcgacgccggacgacacacggactgaaaccccaagtgacattctgcctcaccggacttcatcacccactgacatcgcccaaatagtccaacaacgggcttcttttccatctcctctgacatccttcgaaagatccatattggtaacaggcgatagccgacctttgatctgctacttccattttctttgcaggtgtttgaggttctctttgtgcaatcggggacttgcgatgtcaagtttggagtttgcatcttgcttcgctgggttagatatggggttcaggcttcgctactggttggccggcttggtggggatcgcagatttgatc

SEQ ID NO: 86973 - DNA, 525 bp, Cannabis sativa
aatgtgtaagataaaattaaaaaagaaaatgtagtgatattatacaattattaaaagaacaaaaagataaagagaaaaagagaaacataatgagaattcaatactttattttaatgggatgatccattatttatacaaatatgtgagtcatagattaggaactaaggagatgaatagtaactataattagtgatcattaataaaaaaatatttaggtgaattggacatccatatatttaatatttaataacacttccccttagatgtctataataactgcctcattaaaaactttgtaaggaaacttagtaggacaaaaactcgatcaagggaaaaagagtgcagcattaattaactcccccttatttatgcattcgtagaaattttctaatcgacgaattctaatcgtgtgaaccatcttcgacttcttgaatattgatgttggtaatgactttgtgaataagtctgcaaaattgacacttgattgaatatgttggacactaatatgcattctcttgaaatgta

SEQ ID NO: 86974 - DNA, 701 bp, Cannabis sativa
ttgatgggcttaacatatgtgtgtgtaaagtctaggtgaagcagaagtgtgggtttttctagttaactgaaacctttgatgagcaggcccaatccaagtagggttatgtagataagtctcctccctaactctatatatacatattgtctcatcacaattgtatatttttgataatcagataaataaaactgtttttgatttagagacctaaggaggaagacttagttgatagtattgcactatcaaattatggtaattgttatggatcaattaagtacgcatacctaattattatatattataattgtgttctatattagttacaaattgatcttgagtttattgttaattttttttaatatttttaacattgtgttccaatgtacaattgcacaacttgatgtaaaattttatatttatattaaaattataaaaagtaataactttataataatattattatgtacaacaatataataaaaaaagaatataaatagttgatcatcaatgttctaattaagtatactaataaaataataaaagtcaataataaaattgtgcttttacagtgatgcaaattttacattatagtaaacgttgtgctaaatttggcatgataatatttgttatatgctaaatttagtacaatatttattatgtgccaaatttatataattttttgatactattatttttttaag

SEQ ID NO: 86975 - DNA, 805 bp, Cannabis sativa
gttggtaaccatcttaaaatctgtgtataaaccctaattcacctttgtcttcgacactactaataagccaaaagaccggggataggatgtgcacctaatccccttttagttataaaaataaaaaaataataaaataagaaagtatagttgcactggtttttcaatatatattttatttattatatatatatgcatggattaaagtcatgactgtatgttaattattctagctagtgtattttcttctagaatagcttgtatttcagttgaatatatctattaaaaatgaaatacatgatctttttatgtttacatctttatatgttttttttcttcttaattcgtaagtattattatttatattacaaaactttcttattattacaatgactttaaaaatcagtggccattcgtgttttggtgagtcctgtcgacctatatatttatatgaggtttgtgatatgttaatatagatgccgactctacataaattatgattatacatattcatgtatataactcttggctaaatttattaattagctgataacttttggtccaagttgttaggtgatttttgctctgtttgatggatcccgtccctttattagatttttattagtgaaatagttttgtttagggattacacgtatagtatctcatatttgacgttaggggtactgattgtgactgggatcgatgcccggtttaatggcttggtttaatgcagcccataatcacatatgctaaatgaataatagcctttcgcaagtatttgcattatatagttaatttatataatctt

SEQ ID NO: 86976 - DNA, 542 bp, Cannabis sativa
ttgaaatggagttttatttaaggcataaaacccaacattaagttgaagcgagaagccacagcagccagggctgcacagagggccactcctcaaacgcaacctgatccatctgtgaggcaaccacatggaagactctaaggtttcgtgaacaattaaatcgaaggcaaccagatcttcgtgaacacttaaattgaaatgcacctaacctgcgtaaccaaattcatcaaaatacggatcaacagcctgtagatcccattcaattgtgggtaatacaactggaggataaatttagaaaataccaacacagagagtatgaaaaattaccagggtatgattctgatgaagaaacaaaaccatttcaccctgatatcctaaattcacaatttcctcaagaatttaaaaatttgcttgtctcgcaattatatgatggtaccactgatcttgtcgccggccatttaaatgattttaacaccataatgcgagcaagtaacattttcaaacaacttgtgatcactactacaagaaggggtattttcgtcggt

SEQ ID NO: 86977 - DNA, 1437 bp, Cannabis sativa
aattgatatcataacacacatgatgtgttgcacctgtatcaataatccaataagagctaggagtagagattttcataccagaaaaatgtgaaacaactggctgatctttagagacattttgagtgttgttctcagtggccttttgagcaagaatagccaccaacttctggcattgaacacttgacaaactagagataagatctctttccattgtaggctcctcggccttgccttcatcagcaccagaaaaattaactcctgctggttttccaggatttcctttagcatcacaattaggaaactttccatggtatttatgtctaggaggatatccattcagcttgtagcatctttcgattgaatgtccattcattccacagtgagtacaattgtacttagatctgaacggttgaatagcaccagcgaactgcccattgtttcctgaaccagcaaactgtccattgtttcctggagttcctttatcctgatcagtagtattgttgtagctatttgtcaaatttctctgtctttcttcttgtataacaacaacataagccttgttaacgcttggaagaggatcacgcattaaaatctgagacctaacaagactgtaggaatcatttaatccaaccaaaaactcaagcaatctgtcctcttcttgatactcttgtatcaccttcactgtgccacaagaacaaacaggtggtgggcgaagttctcttatctgatcccaaagggatttcaaacgagtgtagtatgttgtaacagtattagatccctgaacaagactttgcatcgtcttcttggcttcaaagatccgaggtgcgttcctctcattgaatcgttcatgcagctcagcccagatttctgctgcattatcaagatacacgatgctgtctgcgatctcatcagaaatggcgtgcaagatccatgaaatcacggtgttattacatcgacaccagctatcgtagtcatcgtgatcttcatcaggttgtggtaaccttccactaacgaatttgactttgttcctagcaaccaaagcaatcagcatagatcttctccaagtgctataattctcactgcctttgagaattttaggaacaagcacgacacctggcttatcaccatttgaaaggaagtagggattcgacaaatcattagcagttgtcgatctcgaattttctccaagaactgagaacgtattcgagttcaaagaattatcttcagcttcacgattcgctcgagtatggactccattgctacgaccttgagctccacctcctcgaaccatattcacagaacaagtaatcacagatcaaagaacaaacaaaatgaagaataacaggagcacagcaacctgctctgataccataacagctcgagggagcttgaacaagaagaaaataaaaacaaagagagaacagagaggtaagatca

SEQ ID NO: 86978 - DNA, 854 bp, Cannabis sativa
caattgaatgatccctctagcctcaaagatacccttccataatgggatccaaggttgattccatatagcaattgagtctcccctccccggtatggccagacttcccaattgaatgatccctctagcctccaagatacccttccataatggggagtcacctctttttccttccacttcccaaaaggacttgtttttgcaatattttgccattagacatttaactcaagctttattcaccccgtttgccagttgccacgcaagttttgttaatagagctttgtttgtgtcttctaatcttttgaagcctaaccctccctggcatttaggcagacaaaggttgtcccaattccttatggcattgaatctttctttagcattccctcttgtccaccagaataacgcatcaatctctctacatgtcgacacagggattttacaagttgacatagtatatagtggcaggctcaaggccactgacttcaccaaggttgttctccctgcgaaagaaatttttttaactttccatccttcaagtctctttaacaccttttcttttagtcgtcagtagtcttctcttttcctacgtttgaatacaaatggatttcctagatgaagttcttgacccgtaaattcttcaacctcgaggagccttagaatatgttctctcttactccagttcaggttgttggaaaatagcacgctggactttaccttactgcactcctgacccgaccaagcctcataaatcttaaggcaatccataaatgcagtggcatttttgtcatatgctcttgcaaacaaaatggtgtcatctttatgttaactcaaacctttaggtctccttgttttgatga

SEQ ID NO: 86979 - DNA, 878 bp, Cannabis sativa
actttgaaacctctccaccccaatcaattcttgatgaatttttatctttttttttttttcaaacttatttttagcgatgattttgaattgagtgaaagcctttaaggaatctaatttttttaaaggacatatccatgtaaatcgcctataatcatcaatgaaataaacatagaatttgaaattagtgttgcaattgattggggcaagtccccacaaatttgaatgggcaagttctagcatttttgtagctctactattggacaatttaataggtaatgagattttccatattgacatgcattacaaaagtctctttttcactaacaaaaattgatacattgctagagtttaagacatgccttaagaccctggtagagggataccgccaatgttgatgccatacgtcattcttggaaagaaaattagactcctaaacaacattggtagagtaaacataagctgatttagaattagtggtaggactggattgattcaactggcatatggagttgatgggaatggacttgaattggtacaaaccatttctaagaattccttggagcagcagcttcctagtgcacttgtccttctcaaaataaatgtgggactccgattctataagtatatcattatctgttgttaatcgagatatacttataatatttttagatatatcacgcacaagtaaaacatctttttgaacaagggatttgtgtggttcattagtaggtaatatgctagatcaaatgtgagtaatggccaaaggatgacaatcaccaacaaccaacttatccttagcaccataatcatatttctggttcatgttgctcctattagatgttaaatagttgctgacaccattgtcagcatactacaca

SEQ ID NO: 86980 - DNA, 911 bp, Cannabis sativa
  modified_base (308)..(318): a, c, t, g, unknown or other
tgtcaaaggcaattgagatcctgaaacaatatattttaaataatttaataacttgaataacttaataactctacaactctaataaccaataaattataatttttctaattaaccaaaaccatccgaaaaaaaaattgtcggtggtaaaacacttgtttctcccataagccaattaatataaatatttatttttgctaaacatataagtaaatacttcttaattttgaaataactttaattaataataataaaaaaaattagaataattgctcaaaagtaaactaactatataataataataataatannnnnnnnnnnaataataataataataaacttatttttaactatcgtaatttccttttttagggattgatcgatggctgagataggttcctatggcaaagttgagtactttgggtaggagaggatcgtcttaattgcatgatagagagaatcttgtgcttgtgaagaaaaactctctcaaaaaagaaaaaaatgtttgtactgcaaaataaaaaatatgcattaataaggaaaatatagaaataaaaaataataatcataataaataattatataaaaaaattacaaaatattttcactacaaattaataaactatattgataaattgtaacaataagtttaattaaaaatataaaaaacttatcctgtcaaatgcaattgataccagctatagatcctaaaacaatatatttttaataatttaataacttgaataacttaataactttacaactctaataaccaataaattataatttttccaattaaccaaaaccatcagaaaaaataattgtcagtagtaaaacacttgtttctcttataagccaattaatataaatatttatttttgctaaacacatataagtaaatacttattaatttt

SEQ ID NO: 86981 - DNA, 755 bp, Cannabis sativa
tagttcggggagaatttttaacggtcaaaaaagttcggaggacacaatttgatacatgtcaaaattcaagaaaaaaattactaagtagcctaaaagaaaatatgatttgaatgaatctctattttctccataacatattaaattactttttgatgaaacacttgtacttttcaattcacaatcacgcatttatagtgatggtatccaaattctaaactatatttgataaataatatcccacttgtttgtccagcctcaaatcaaatcaatgtgtcttcttttcttctattataataatacaatacaataaaataaaaataaaaatggtaataaaaattgattaataatagttattttattattagaaagaatattagaatcaaaattattttatatatttttgtgaaaatgtaataaaatctgcagacaaaaatatctctttattaatttagtaaattaaatatataaaggtattaaagttattttattctcactatcaaaaaaaaaaaaaaattctttaattactgttatgtcaattatattttttttatgaaaattgttaagtgatgtactgaccattacatcacttcatactgcaatatgtaatgcattaatatatatggaaatttcttgacatagacatccatatagacatttctatatatatacatataatgtagctatcattagataattgctagtagggatatttcgttgcatcatatcaaatgttttttaggtccatttagatttga

SEQ ID NO: 86982 - DNA, 1349 bp, Cannabis sativa
cccggtatatattatttcgggtcgggcccggcccggcccggtttcaaatattaaaaaaaacctaaatccctaaaaaaaaatcccaaattctaaacctaaagaatcgcagaacctccactccagtcttcactgccgctgcactaacaagagaaaactcaattccactgctctcagctacagcagcacacacctcgacgacggcgtctctcacctcctcaagtcgacggtgccccgccaagacattctatttttcgaatcaagcttctctttaccctctttgttggttttaagaggtattttggttttcatttcttgagagttttttttttcctttcttatctttgaagatcttagatgggttcaatttctttacttaagcacatttgtttcgttcagtttatcgattagtagaacataattttattacaatttcattcgatagtagaacatagaaatactagttcgaatattaacatgtagcatatcagttagtaatggactttccttcaaatggttttctggtttgtaattaagaatatatgttgattttggattctgtaatttcgaataatgaccaatattaaataaaatactaagtgaaagtagtttgtagcattgtaactggcctatgcttaagcacattttgtactggcctatgctttatttatcgattgtattgtaactgtagtaaaataattggagaaaatacatgtcttgtatctgtttgattaatttgctgtgagaaaatatgggtttttgttttccgttagtgggatttgcataataattaaatttaatttattttgagctttgacaaagtaattgaagagtttgattgttgattgtgtgtagtaacatgtaatcagaacagctatacaaagattggcatttcaaaagggttttctgttgaattaagaattaaaattgtatctaataatcattagcatttgttcatttaaaaagaaatgagaagaactcattaacttgtttgtgtaattagagagggaaagttttagtaccatacatattttggtagtacatcacttataattgtattttttaaaggacttattattattgttgattataattactgatgcttgcttatctatgtgagaaaggaaaaaaataaacgttcataaaattttaaaggtgaaaggtccaaaggaatatgcagtagacatttttttttttcaaaagaaaaatatgtataatagaaataatagacatttgaaattaggaatgtcttaccatactctgttttatatttttttataggctttggcgttttgcaagtgtttgaaaagaatttgagtcaagtggaaatttcgatctcgattcatcagagg

SEQ ID NO: 86983 - DNA, 1054 bp, Cannabis sativa
gctccgatgatgatataaataatatcaaggctcttttaatagctccacaagatctgtcatttgcttgacaaaacaaaagactgtcatccgcaaacaacaagtgagaaattgtaggcgaatgacgagaaactgccaatccttgtagccgaccaatgttttcttcatatttgagcagcctagatagtccctctgaacaaataagaaagagatacggtgagaggggatctccctgacgaaggcctctttgaggtataactgaacctgaaacttctccattaataacaaaagagaaagagtttgtgtgaaggcatgtcataatcaaattaatccatcgtatgttgaatcccatcttgcccattactgcagccaaaaaagaccattcaactctgtcaaatgctttgctcatatccaatttgagtgctgcataacctttagatcctcgctttcggtgtttgagactatgcaccaactcaaaagccacaagtatattgtccgtgatcaatctattagaaagaaaagcactttgagtctccgagataaccgaatgaagaacttctttgaaacgcaacgccagcatctttgaaataatcttgtaaaggacattgcatagactaattgggcgaaaatctttcatctcttttggttttttaattttcggaatcaaagtgattaacgtgttgttgaaggcagctggactttctccatgatttaagacattcaggatcaccttagtcaccgaatcacccacaatatgccaataatgttgataaaacattgctgacatgccatccaaaccaggacttttatcagaacccattgtattcagagcagccaacacatccgaagcagtgaagtcatgtaacaaaaactcattttgctgaactgaaatagttgttggaattgtagacaaaacatgggatagagcccaatggtcctcttccgaagcagtaaagagtcgagtaaaataatcagcaacaatatgagaaataccctcctttgaagtggtaacattgccatcagcatccaccagttctttaattcgattattagattg

SEQ ID NO: 86984 - DNA, 567 bp, Cannabis sativa
aatataaaaagggtatagagtataattttctctatattatacaatgtcatgagttcaaattccataaaacacttttttaaaaataaaaattatatatattttggagagcccaaaatcaaatttacttttagctcataaattattctcaatatatgtattattataacatttttataatgttttattccatattgaactaaacatttatgccactcatcaaacattttttgaagtagctagtccattgtcacatgctagatgaaatatactattctttgagattttatcattaatttatgcaaacaaaagcatgtgattaaccatttttcttttaaatgaagtcattttgtgtatttcattcctagcgacactaataaaagatatacttattctatattttctaagatacagattacacatttacatctatcattatttacggattcaatatttttactttttgagggcttatttattatataaaaaaaatatttatagctacattataatcactcttactaaatttatttaattttgtggaggtttttctactattttgttctataa

SEQ ID NO: 86985 - DNA, 934 bp, Cannabis sativa
gagaaaagcactttgattggggcttatgacagagtgaagaaccgatttgagcggattagccaggactttggaaaggcatttgtacagagtattacaaagactaattggtcgaaaatcacgaacagttttagggttcttctctttgggaataaggaccaaaatagtgttgttgattggagtgatgtgcctctgattgttaaggatttatatatatttgatgtaactataaaaacttcatccatatatatatataaatatttaagttttttaattttttaaaataaatatttaagttcttttaataaaatatttaaaatataatttatatgtaaattttgttgacacattatatatagttatatatatatatttcattatgaaaaacagaatataaactcggataaaaaagaaaaaaaagagagtataaacattggtaaactctcataatacgtaaaggggacattagccccatcaatttttttttttttgtggaaaataaaaattatgtaattattttatatattagccctgatataaatttttaagcttctattaatattatttattttgatattaaaagtatttatatgttatcagttatttatgaatatttatattataatttgaataattttttaattctatagattatatttgttaattatttaaattttgcatatgtatttcttattgagcataagttaacaactaatcttaaaacataatttactttacgtaattaaaacactttatttatttatttatttaagctttttttagttcttttttaaaaaaatatgtataataaaaaaaatatatatttttaatatttgacaatgtatattgatataaaaatattgaaagtaacacaaaaaaaatcaacaaaaatactattatttaatagtaggacttaattttgtcaaaaaaaaaaaaa

SEQ ID NO: 86986 - DNA, 1258 bp, Cannabis sativa
attcctaccctaagatgtgataaagtgacttcaaacatgcgaggatcctataagaatttgggacgtgcaaaaaatgcgcgaccccaaggtaattgtaaaaatccttgaaatattgcctaaggggaaggacatcccctgccttaacatgcttgacactccaagctcctgtccttgaagagtcgttagtactgcaaccttcgtcattcaagaggtgagatggggggaaacaactaaattctccagtacgacaggatgtatacgacatccctttttattttgatgccgcaagacctcagaaatggacccacgtaaagggtgattgatttaggttcaatcaattcggcctcgaaggtaacattggagttctaaagcatcttggactttcgagctttaggaaccataatgtctaattcaagatcatctgatagaaaaacaatagtgacttgggtgaaaataatagtcttactaagggaatttttactaaactgggcaattcagaccaagtagcttctcacaaattatgatgtctaccttcaataatttcatctatatatcgcttatagcaagctaatgtttcttcttgactagctctaaaactgtgtttcctaattttttttttttgtcatttatctcaagtatggattgtggtctataggtttgaggtttaaaaacaatgacttagaattgaggattatcgaattcaacaaagtcttggcgttcataatcttgctcagaatgaggcttggtcttggttaaaaaaatatgtctcaaaattctaaaaatgcataacataaaaacctaggacatgcaaatcatgtaaccctaaatttctagcccaaagttgctaaaaaaactcatacaaagacaatgacatacaagaaattgacaatatagaaatatatggaaaacattaggaaaataatgaatagtcaagagaacaatggtaaaaatacacttattggtttgctaaaagaaagaaagtctcgaacaattccccactgagaacttttgatctcgtttggttcgtgatgatgttgagattgagaagaaaaactagcagaaactcgaaagaagtatgtgagagataaagagaacatgcaatttcaaagagaataagggccgaaatttgaattccttcgaagcttcgtaaaatagtaatggcaaaatatgaggaaaatgctaaccttatatccaaataatggaaatcgttcgattataatgatgactatcgaacagttgtaaactattgaaaaaagaa

SEQ ID NO: 86987 - DNA, 609 bp, Cannabis sativa
gtttcttcctgaattatcctttgaccacaaccccattctggtgtccatttatcgaaattggagtttgggaaagaagccattcagatactacaacatgtggaagttagccccaaagtttgatgcaaaagtgagacaatgctggcaggaagatgttaaaggttcgaagatgttcaaagtggtttctaaactcagaaggctgaaaccaatcttgaaaaagataaatcgagaaggcttttctgagataccaaaggcagacatgggggcaaagattgatctgatagcagctcaggaagcactgaccaagaatccactctccttgtagttgatggaagctgagcaagaagccagtagaaggtataatggaactcataaagctttcaccatgtttctttcacagaaagctaaaataaattgggcatcctttggagatgagaactcggccttcttccatgcttctctgaaatcaaggaagattcaaaataagatcttctcgattgaagatgagcatggaacttggtttgattctgccgatggtgttcaaaatgcgtttctgaactactatgaaaagctgctggggactaatatgcagaatagaaggagtgtcatgca

SEQ ID NO: 86988 - DNA, 596 bp, Cannabis sativa
tttgtagacttatattttataagataatttaaaattggtaagtaaaaaataatattttgagagaatattgacaacattgttcataaatgtaaaaatattaaatcaaatataataacatgaattattttacttataaccaataaataattttatgacagaccttaaaattcttctcatgcatcattctaattttaaatgaataaggtttgttgtgccccatgtagtttcttagagtcatttctaagaaggtggagtttctctgttttctaaaagaaaaaataatataataataaagaaaaaaacatagattgccatccctaattcttaaaattaactattcttccatatagtctttaagtatcgaccatctcatcacttcactcatgtaaaaaagctgcaaccaattaagggcaattacatcaaaaaaataaaaataaaaaatgaaatggaatgcaggagctcttaaacaagtggaaaatggggtaaagaaaattatacaattaaacagtacccttgattttgattgataagttaaaagcggagttatattctcccaaatatttactatcaatatattcagcaaaaaaaaaaaaaaa

SEQ ID NO: 86989 - DNA, 589 bp, Cannabis sativa
ttccaaagctaaaaagattaaaaattttggttagaaactctaagaaaaacatcaaaatttagttatagcaaatgctgaagtctcaggttaaactaataattctaggtgcaatgcctactaatcatttgaattatgttctattaatccaaggatctttattgagaacattagaaataagtaacatattttgttaaggagaaaaaaatagttatagagaattaaagcacatgatattgaaaagaaattaaattaaaacgacagtattactttaaaaggcaatagtgtgaattcagaaagagaagctcagcttattttaattttacttggtctaacttagctgtttatatattcagatcgtattagaagagcaattagtataaaaataaaagtgtaactgaaccataaaatatagtcttaatcttattatagctagtcaaaatgaccttgactcactcactatatgtcaaaagatataaatccaaatactaaaaaatagaagtttaagactgcagaataaaaccaaatacactttctgtactgcctactggtttagttgctcacaagaatttggaaagtgcataataaagct

SEQ ID NO: 86990 - DNA, 742 bp, Cannabis sativa
aaacagaaacaagcaaataagaaacaagcaaatagactcgatccaaatagactcgatcctagtagactcgatcctaggtactcgatcctaggtggcttcgcctctagtggatcaagatttaggagttagttacaaattgccctacatatgtcatatttaaaatataattttaaggcagaaacttgcattatatctaaatattaataattataattatgaaactaattgtgctctgttaaatattataacaaagtagcatttaaaattaaaatttattaagtttaattattttaaattttaaattatttataacaaaattgaaaataaatatcccaattaatattactcttctttcaaaaaaagaaatcaccatattactcgtactcttaaaaaaaatttagtaaattaatattttttatgtatggtctatatttacccagtatcatctatattatttatgtgtgatatatattgagtgactaacatgatagattacgtgaaattacacttatatccctacctagcacatataaaattaccaaaatatattattaaatgttgatgtcaatctaaccgtttagtataatcggttatattaggttagtagagtcctttatttattttttgttggtttaaaataataggtgtcagacaaataaaaaaattaaaataacatgtgtcaactttttagactttactttttttgaaaaaaagactatactatatttattagtgtaatata

SEQ ID NO: 86991 - DNA, 740 bp, Cannabis sativa
aaataaataaataaacatatatatttttttatccaaaaattactaaatattactataaaaatatttaacacacatggctaataaaagtcaaatattaattagagtaagaaaaaatataattaattataaaaataaatttagaaaataatcgatacaataagatccatagcattattgtgcacccaagcattttctagccataagatgtatgattaaaggctctaaaagcttcttcactcatagggtaataatggagtctcctaccatagtcatggggtagtttttttttggtcaattatattaaattcaaatagaagttacatggtatggtagtgtgtgtgtatataggtgattttttttgttggttaaaaaaagcaactgctttataaaagaagtttttttcaaaaaaaaaaaaagaagaaataatgtagtgtgtatgtatacatgaatagagttttttttgttgggctttaagttaatgagctttgttattttaatttttttttttgttattgaaaaaaaattatgtttaaaaaaacacatatataatttttttaaaaaaaatatatattagaatgtgtcataaaatttatattatattcataaaaatgtgttaggatgtgtaatttatggcatttggttaaaccaaaatttatgtataaataagaaaaagtgtatgaattcgagttgtatagatagtagatttaaagagagctttaaaaataaatttaatcttgtac

SEQ ID NO: 86992 - DNA, 1374 bp, Cannabis sativa
aacacaaacatgttgggggcttggggtttagagaccttagaaactacaatctttctttttttggcaaacaagggtggagattactcactaaggaagattcacttgacttgttggaaagatttacaaggctcgatattacccgaggggttcttacatcaatgcagaactaggacaaaatcctagctttatttggcgcagtatttgggaagctcaatcccttattcggcggggtgctagaagatctattggagatggctcttctgtgagtgtattaaatgatccatggctgcctcatgatagtatgccttatgtccttactgaccaaggtcttgaagataaattggtatccaatccgatgttgatggaagaaaaagggtgggatgtagagatcatagaagatatgtttgaagaacgtgatgcccaactgattttgagtattcaactgagtgactcaacaaccgtgaattcatggcattggatgatggaaaattcgggtttctataccgtcaaaagtgcttataattatcttcaagcttcaagtggtagttggcttcattttgatgatgagagctactggaaaaggctttgtaagattgatgttccttcgaaggttcttcactttttgtggagggcttgttcgggttgtctccccacgaaggttcaacttagcactaagcatgtgaatgtcgatcttatatgtcctctatgcaacgtctactatgagacgatttttcacgtgcttgttggatgtcggtttgcccaagcttgctggcacctctcggccgctgtagttgctactggtgtggacgagttcagcagctggtttttcagccttatagacagcaagcaaactgaggtggttgtcggtgccgcaatgatttcatggagcatttggaagactcggaatgaagtcttctggcagaacaaaaactatactgcgttgagagtagttcagtcggcaagaaaggccccttgatcaatggcgcgttgcaaacaagaacacaacagcttcttttgctactggtgtactttctaatagcaacatttggcgcaaaccaatgggtggaaagatcaaggtaaatgttgacggtgctatctttgaagctcaacgaatgtttagttttggttgtgtggcgcgtgatcatgcgggtcagctcttggaagcaatttcggattcaaaatttggagtggtgttgcctgaaattgccgaaattgttggtatgaaggaagcattaagctggattaaagaaaagggtgggaggatgtgttcatcgagacggattcgttaatggttgttcaagcactcactagttcagttcatatgccttcatactttggtttgttggtggaggattgtcgtttgattttatctac

SEQ ID NO: 86993 - DNA, 570 bp, Cannabis sativa
  modified_base (175)..(179): a, c, t, g, unknown or other
tgagtcaggtggtaaaccaaaaaaaacaacaaccccatccaaaccaattccactgttccttcaacaaaatctaccgagtctcactgtgtccagatcactactattcgcttgaatggagaaaactttctgagatggtaccaatcgatgaagatgtatatgaaaggtcgaggaaaannnnnatatttgactggtgaaaagaaggctccagcagaaattgattcaacctatgaaacatgggatgctgaaaaattctatggtgatggcttggcttgttaactctataaaagaagagattagctccaattatatgtgctatcccattgtaaagaagctatgggaaaacattattgaaatgtattctgatcttgaaaatcaatctcagatttttgggttaaatatcaaacttggagaaataaagcaaggggaggacaccgtgacaaagtactttaattccttgaaaagactctggcacgacttagatcttttcgatacttatgagtggaaatctgcagaagatggcaaacaccacaagaaaacgattgagaaaacccaaatctataagttcctggc

SEQ ID NO: 86994 - DNA, 681 bp, Cannabis sativa
tttattggtgcaaagaagcgtctgggatgtatactattcgaagtgcatacaagttgctgcaattgcaaaaacaaagatggcagcctgctgatagtggtagattgtggaataaactgtggaaaattaaagttccaccaaaggttcccaacttgctttggagagctctgttccgatgcttgccaactttgagtcaattacatgttaaacatgttcaggtacaaagaacatgccctgtgtttaatatggatgatgaaaccgagtttatgctctggtttcatgtccttttgctgatcagtgttggcaggtggtgctgcctggtttttctgctgcaaatatcactgattctacaacctggtttgatcgaatttgtgcttctttcagcattgaaaaatggagtgagattgccatgatttgttggtctttatggggggcgaggaacgatctggtttggcaaggtaaaagacgcacagtggcaagtgttgtgtttgcagcttctcagtattttgtgcaacggaagaatgctcaagataagtcaaacattgctcattatccctcaaatattgtaggtgatggggcagtttcttgggttaagcctattgagaatgtactcaaaatctctgttgatgcaacaacttttgaccacagttcatcatatggtttcgggttggtggcaagggatca

SEQ ID NO: 86995 - DNA, 996 bp, Cannabis sativa
caataattaaaccaaaaaaattaaacaatcttttttaaaattaaaaaaaatatcttacccacatatctctctaacaaatccttcaatttttaaacattatcatcacgtaaatatttgtgaactactccaaagatcttctaaacaaatttatattcaattttttaaatctagctccgtatagaaattgcgatatgtgcctttatagaaattgaaaaccctaatctttgctgcgttcgtgttcgggataaaatgagtagccgtgcgagcagaactctttacgtgggaatctcccaggtgatattcgcaagagggaagtggaagatttgttttacaagtatggacgcatagcccacattgcgacattgacttgaaggtccctccaaggcctcctggttatgcttttgttgagtttgaggatcagagatggctatgattttgatgggcatcgcttgcgggttgaacttgcgcatggtggacgtggacatttattattatcaactgatcgctatagtggccacagtggtgggggtggtggtggaggaggtcgagggggacgtggcgtatcaaggcgctctgagtatcgtgtgatggtatccagattaccttcttcggcttcatggcaagacctgaaggatcacatgcgtcgtgcaggggatgtttgtttctctcaagttgatcatcttcctgcagactagcaaatgttaatgaggaatggcatatttaaggtgtccctggaagcaggttatggagaaacaatttttagacatgctacaaatgtgttgttggggaaaacaatagaaggtcctcttcaattcaagactattagaaattcagatttctaggaagttactatggaaaaagttcaagttcataattgaaacctattatgtaatgttttaggttgtgattgtgtgttgttacacgggcatgttaaatgtgtatagtcaaagaaaaaggccattagagatctttgagaccattaatcagtggttttat

SEQ ID NO: 86996 - DNA, 791 bp, Cannabis sativa
gtaaaatagctaaggtttacctcacttgttggaaactcaattttgtaattttttctttataatttaaagattgagctatattagttctctattgggagtactctaaagaaacaacctacccatctttaatagtactttcaaagattcttgtcaaaagaatggggtgatgattaattaaaaatcttgtaataaaaacctaatattgttgcttttttaaattttatattgttatgattgatgaaatttatgttcttgtatgaaagataaggaataataacggaattcctaattttttttttttttggatttttttttcagaaaaaggtctcattaaaactttttgagtaaacctaatgagagattaaaaaaaaaaaggaaaaaagaagtgaaatatcattaatcaatatttttttctaaaacatttgattagtttactttgtactgcaaaagtctctattttaaatatgagaaaattacatttattataagattttgaaagttgtttacttaaatatgacacttttaaatttgaccaatttatatggtatttttttttttgtttttaagtatttttatggttttgatatgacatatatatcgaaattaggttttcaaatatcatatttaatatttttatttgtttaggcagttttatttctcactgatgccgaaaaagtcgtcggaggttgctgtcggtgccagaaaaatcattggagtagctgccggtgacagaaaagtcgtcagaattgctgtcgacactgaaaaagtcgtcgaaattggcattgtcgccg

SEQ ID NO: 86997 - DNA, 747 bp, Cannabis sativa
aagttgttttactggttttaagttctggtttatgttgctggttttatgttgaatgtgttcttgatcattgtgtgttattcttggtgttgtgttggttcttgttggggagttcaagcctccacaacatgctaagcaaaaattgagattagaggaagaattatcaattttcgtgtttgtcattaatgtcctttatcatttaagagggttgaataaacaattaggaggaacaatataatttaacttattgataatatacatcccagttaaacttaaattgtgaaagattattccataatcaatgggaccattgaaaatgctgtcatagattgcattcctcccataagagctggttgaaagccattggcactagaaggcaaccatttatacattaccaacactcctatcattttaatcattttcttacaaaaatttaataccaagtaatgttgttttattatttttaaattaactaaaaatatacataaaaaaagaataattactcatatattattttttatttttttaaaatttacggttagagttgctcaagtaatggtttctccagtgatttttatatatgttgttatgtgaattttagttgcgatttaggttgctccgttagttactataagtgtttctatgtcgattttcataaaaataccaaaaaaataaagtgcatcgagtataattgcatccaaatgatatatatctattctatataaagtgtgcctatataacaaaattctt

SEQ ID NO: 86998 - DNA, 522 bp, Cannabis sativa
catatatataattaataaaattcttccttttttaattttaataaaataagtaaataattatatataaagaaattattaccttacttttgattctcattacttattaagaagattttcttctaactattagaaattttttaaataaatgatatgaaatatatatcatcatgtatgaagtaattaatctaaatatatgtatatattgtatgaaaaaagaattaaatacttccaaccattaattctctttgactttcaatcccacacgagttttgaatatgcaaaagtaaagaaaaccaattagtatatgggtaattgggcttctaagctttttcaactctctttaaatgaatttactgtgtttagagtcggtgctgagaatatatgggcctaaagcgaattagattttgggccctcagaactatataaaaaagaaatattaaaaaaatagtgttatgagatttgaatccatgacattgtataatatgtcatacacttaaaccaactaagttatgaatatttgtt

SEQ ID NO: 86999 - DNA, 758 bp, Cannabis sativa
  modified_base (692)..(706): a, c, t, g, unknown or other
atcaataattaaaacttacagctttttgaccttgtatataatgattggggtttgcatgtgcgacgatatcagtcttgtattagctgagccagaaaaaaaaatagattagatataaaaaagaaagaaaaaaggaagactttaaaaatattaccgactcgcccaacttactaacttacttaataagtagggtggaatcaatttcaaaacataaaaatcacattcttggtttttaggttgtcttggacaatttgttagtaaaattcctcgccacggcccaagatacgcatttgatgcccctatatatttctatgctctatttagaaaagtatattaacatttcaattcattagttaattaaataatttgttacttaaatagtcattaaattattaccttcccaatatttcagtagtttgttgggaactttgtggccacgtatagggtctaaatggataattttccttggcgcaacaacctctagcatccaatgcacactaaaaaattatattgagatataagtaagatagtataaaaataatttcaagttataatatagaaatgaacgattagcattaaaaaattaaaaagtatttacccgatatttcagggaataaagaacatttggtggtttttattcatcgatgatatccaagcagccaatcattttgtcgcattgtcaaaagactgactcnnnnnnnnnnnnnnnataccattcactgtgagaagctctgggttgtaaaacttgaaaaattttctca

SEQ ID NO: 87000 - DNA, 653 bp, Cannabis sativa
  modified_base (605)..(612): a, c, t, g, unknown or other
agattttcgttaactatattaaagcctatttcgtgatggatttgcacagaaataataacagtaaaagaagaaaacataatacaaagttttttttacgtggttttgcagctaacattttgcatagtccacgagtctatcttattagatttctctggtacaaaacaagggttctttctctaaaagatttttcgtctcttttttagtgtattctgcccctatttatagttacataggagggcagttaattacaatcagtttgatatcccacaacaataatcccttgaaattatgggatttgattacgtcccatgtaaaataaatacggttattattggaaaagcacatagttgtgatttatccgcttttactgggtcaatgctaacgtggatttagattcgctataaagtgtatctcgctgggatagagctggagcttttcccatgcctttttcgaggttgataatgtaaatatcattttttctacttaagggggaagcaaggaggagcacgtagggatgagggaatccctgactgttgaacgaaagcttgaaggtgatcctcgcggatttctcatgcggctcgtgttgaaattattttaccaggatnnnnnnnnactaacaagtatgttattaacatcgtaaatatgaacttcta

SEQ ID NO: 87001 - DNA, 644 bp, Cannabis sativa
gtcactttctttggtgcttcgctattcgcatttagtgacatatcctttcttgctaatataccaagtgctagtttgtaaattgatttctcacctaagacgttatagtcagcgggttacatatatactctgactcttatgtaattaatgagttattcaattagagaaaatgcattaattcacattcccttcatcctgacacgtgtccaacgtggaagtggcagccgaattttaggtataacaatgtccctttaaaaagttcttttttagtaaaaagaacttttaataattacagatgacattttcaccaaaatcctttattagaaaaaatgtaacctttgattctggcggttgtataatttcaaggatcattatgaattgtcttttcatattctgccaatcgtccaaccgtcagatttcccaatctttggctttcttgtcactgaactttgtgtataaaagggtggctcaagcttgtcatttttcacaaacctctggctttttggtgagatccattttgaaaatggatcatctcttttctactagaatgtcccttctcagttcagaagttcatctttccaaactcatctcacccagacgcacaatgccatttcaatttgttcctaaagacttcaagccacaaccaa

SEQ ID NO: 87002 - DNA, 876 bp, Cannabis sativa
  modified_base (390)..(395): a, c, t, g, unknown or other
tttttttttttttttgcataatctttatttgttcattttaaaaatgatcgtgtatactaggatcaactatagaatttttaataatttttttttttaaaacaaagtgtaatatttaattgatttaataaatattttatttactaaattactttaagattttcaattcttactagtagccataatataattatatcataaattagttattttaagttattaatgtatataatataaaatacaagatcttttaaataaaatatagttatttgaggagattttttatttaaatcattaaagttattataccaaattctacactaaattagtgtaacagttagaaatagtctaattattctaatatgtaagagtgttcgcggtgcgggtggtgcnnnnnntgaccattttttcaaaccaatccgtacatgcgttttctaaaaccgcacccgcactgcgaaactaaaaaactgcgaaaaccgcaccgcaaaaaatgatgcggtgcgatgtaatttttgcgggttggactatcaccaataattaaactatcacaaatacaacaaagcttgagcaacacttgtcaaaaataccataagtcttgaaaataaatatggaaaaaaaataataatacaataattagtgggctttgagttggacattaacatattggacctaaataaatataaaaattagtatttttcataacgtgcggtgcggtttgaacaacatattaacaattcaaaaccgaaaactgcaccgcaccgcgcgatttaggaaaaatttaaaatgcgaccgcactgcaaaaaatttcaaaccgtattttttttgtggtgtggacgatttgatgaagacccctaaatctggtgtttagcaaaattagtg

SEQ ID NO: 87003 - DNA, 5875 bp, Cannabis sativa
taaaaaagtaaatggcaacaaaaacttccatatttatattttttttcccttaaaagaactattacttcaaaatcaactaaacagaaatgaccttaggatttgtaatttgtttgccataccattaaaatttatccatctttttactgagcatagcttattattaaaagtcccatgatttgttagaatgttcccagccacccttagaataagaaagcggaattcccattatacttcattgccacattaaaaggaaaaaacaactcgatataagcacacgtgaatcttatccaatccatgaatcagctcactagaaatgtacagtaaaatttggcaatcttttgctcctatgtacaattaataagcactctcccccggatcccaagatatagtaaatataatatcaatgttgcgcttagaaaagataaattaaatcattgtaggaacagaaaaggaaacatcacttgagctcattactaataaaagaaataaatctttcttcagaacaagaaaaaagataaaaatgaatagtaatgacagttataaacttgttaaaatacaataatatatagaaaacaaattccacccactacatggttgccatcaacatggcacggattttggctctaaactcatcagagacctccgtggattcagagggctgtgatggggcactctcttgttggtatgattttaacaaatctatagaagtttccctactcactcggtcactttcatttgcttttgattgatctgacttagcacagatctccccttcttccaactcgggttctctttcagacctatgtttcctatgtttagtggttttgctcctgtgacgacccttgttgtcaggggaaccaccatttttgtgtccatgttcagtcctctgctcatactcatcttcagatgaaccaccacacttgtgtctgtgtctagtaagtcgatgttcatcgtcagatgagatatgatgtttatgctgccttcttgaggatctatgttccccactatctgaggggctattgtgttttcgtcgataccgagaacaccgatcatcgtctatgccacacttacgactgtgttgagattctctgtctttggacgaggaatgtcttttcctgtgcctatgcttgtcttcactgtggcgtgatgatttataagaatggtgcttcttccttgaatgcttatgatctattttatcatcttcttcctcctcctcaacactctcttcttcatctccttcatgtcttttagatttcgaccggtagctcctctttgatctttgttcgttgcgttcgtcaacaataattttcttctcagatttatcaatatagcccaaggcatcaacatccattggaaccgaactaccctccctttctttccctaatgaaattggaacctcattgccagaggaggaaatcccagaaccaggtggttcaaatgatgaactatgcaatggcttcggtttcaaaggtgcagctccactttttatcatggcagcaaacgttttagcacgtttcaatctctcagccttcagcttttcttctttagtcaaggatgcttcagaggaatcagcctcactagcagctgcacgagcagccgtctctgctctaaccgttgctacaggggaagcaacgctaggctgcccaactgcattttgcttttggactgaactttgaggttgagatgtgtggagactcccaaagcttaaggactgtccagactcatcactggggtcttcaccaatactgccccatgaaagctttgggaacagctcaagatttggattcttgatgcccctggtggcagccctaagtatagctgcagtaacatctgcatctatagtgacttcaccttggggctggttcacattaggaggtggatctagtacatccttcttggattttccaattatcattcggaatttctccttatcgtagtcacaaggtatgtcattatcagcaaatcccgaagaatttgcattaccttctccacatttagcacttcttttctccattccatgcgccatggatccatgcttttcagagacacagcctttgccaggtatgccagactgttgaggaagtcaagcacattagtgacaaggaagaaaaaataaataaactcgaatatgaaaattgcattatcaactaaaaagtagcaaagaaatggagacgacaataaatttattcttatcaatagatacagtaaaatggtctcgccaaaataataaactttaaagtgatcattggaggataccagttactggacatgtgcctcgtttattagaaatgacgagaataagggtgaaataattgctactttttgctgatcaataagtgactacttttgtaaaatactacttgtaaaaaacaagtgaactactaccccgaaacacaatagtataatatgaaaaggcccaaatcaaagcattggaatggttatatgttagtcgatgcttggtatgcaacatatcggagggagatctataaagcaagcacaaagcacatatacagaacgtcaaaagaaaattcaaggtacccaactgactggcaatgagaactaattgaatggagaagttcagacatcataactagtaaaagggagcatgaaaggggttcaataatcagttttgtatcaaagaggcatacatagataactactacaccaagtctttaatattcagcaaaagaatgaaaaggaaatctctattactataaatgttgtggaaataacatgaaataatgttttgtaagatttacctcctgattcttttgaagaacctttaaatagtaaggatgatactgattagtaggcagaagaaattcgaatcttctatatggttgatcctgttcagcaagtatagcttcaaatttcttgccattttttaagataaactcaactatcttgtcaactgttctttttaaatcagatggaggctccaatataggtctttcaacttttggtatgctaggccctgcaaatgcctgtgacttactggtagcagcacaaattgaccccaagccaactccatccttttttagcaatgacgtagttcgacttttgacattattattaatgctttgatttcgttttattacatggaccttttcttttaaagaagatttattgttggaaacatcacttttcaccattacatttactgtagattcagtgtgttccgatctgtgtgaaacactagtactaacaccatcaaccatttcattagacctatttgtatttgcttcaggtgcatcctcagttgtgtcatcctcttcctctccagacccataaattgaaccaagcaaagatagtgcaccaccagtctgatcacgtcttgtatcacccttcttctcttcttctagttgctttccatcaacatcagactttagtagttcttgatgatcgacaaggaatctaaagtacgcatgaagagaatgatcaggcatcaagaacccaaatgttgggttgtctccttgttttactctcaaaacaatttctgattgcccaccatgctggctgacaaatgtagcagttcttgcaatgatttgatgtaccttttctgatggaggctgaaaaaacaggcaagcaaatttttatttcaaaactaagaaatatcacttatgcaaggaaaaagatcaataaacttttatacttaatcctaacacaaacccatagaacctcccatattctggataacaataaaaaccaagaaagagtatcctatgacgttatgtctcaaccaatatgctcacaatcaataagattcatcgaatttctaccatcctaatcccacctgcacagccccttgtggcacaagaactccatctttgctccgagcatctgaaacttaagacatggtaatccttagaataacatatgcatcttagtggattatcatcttgtcaggccacattgaagtatcaaacacacatgaacatttgtattccatgaacgacagaggtgaaaattgagactcactaggtttcgaatcaagctttctggcacaggaaatggtgggtgaaatatagattcaacttcagtgtctttctgctcagctgctccatcaaaatttccgtaactgaaggcaacagcacgatagccactgtcaactactgcttcttcatctttagatacacctgaacataaggtagtcaaattaaaataataactctaacataaacacttcttcatggaaatcctatcagatatcagttacagaagaaaaaaaaaagactaacttaaaacagggaaggaaggaactaaacgtaaacatcaatctgctaacaacaagagcattcttactcgcatctctgacagatgaattcctgtaaatttatattccttcctgcaaactgaaaagatgttgggacaaatccaagaatgatacaaacagaaaactaaacttcttaaggactccccttatacgaaaagagtaacgcctactccattgattttatgtagaaagtaagtgaaccacaattggccagaccagcattgatttaccaccagtgtgtacccattaaaccccttttactatagtgaaagacttaataatagtctaccatggagaattaaatacagcaaccggttttatctaaattaagataactaaacacaaaaatcaaatcaaacacaaatcacaactaaaaaaccattctctgcttgtcgtttcttcttcctcaatcataaacgaaaacataatgatcacatcaaatatctctatagtattataaactaaaatttaataccttgttcttgttcatcagaaagtgaaggcaaatcaaggtatcgttcgtgatcgaggtccggttcaagtacttggcggcggtggttgcgcggtggcgggggagcagagaggaagtggcggacgtcgtatcgatctataaaaagagagttccactcgacaagagcatccctagagttgacgaaagcggcgttcgcatcatcgtcgaagaacaaggcgtggcggcccacaacctccagatccatcgatttcagaacagtctggtctgggtctgagagcttgtgtgcaggaaagccacaacgagattaaatgaaaaccctacaaatttcaaccaagattattctgattttagggttaggattttcgtacagacatgtgagctttctccgaaaattctgattgggaaattatagctgataagatttttgtattttaattttaaaaacagaaaataaaaataaaataaatttgtgtttttaaaatttatttttaaaaaataaaaatatgatctataattatttttattttaatttaaaaataaaaaataaaagtgtgttttataacttttaatttcatcttttattttttaattttatttaagtcaggtccatattcggatgtgggactggggccgtggtccgagtatgggactggggcagggctgcagtccgggtcctaagatctaggttggggtcggagtctaaaatattgattaagaaaaacaatgtttaaaaaaaatttaaaagtaatttttttaaaaaaaataaaattatattcttaattaaaaaaatcaaaaagtaaaaactgttttatagaacataattttggaaaatatttcacttttttaattttaaaaacaaaaaaaattgattaaaaaaggttaccaaacgcatccttaaattacaatttgtagagaaattattattttatattatggaggagattttaatgggagaaatttgttaaaacagatttaaaaatttagactattcttttaatataccacatttaaataaatactctaaatattctctaaacacttttaatttaaaaatattacacttaattatttagtttttttatttaaatatttaagaagtgaaataagttgaatgtatttttcaaaaaaaa

SEQ ID NO: 87004 - DNA, 788 bp, Cannabis sativa
cgcgacccaaacctagacccgcaccagtgaccctaactcgaacatggacccgaacccagacctagatcgggatccaaacctggacccagacccagactcgaccaggactcagaccccgacccacaccctaacccaaacctgaacccagacacaaaatccgagtgtgggtctgtgtctgaatccaggtgctggtccgattacaattttgggtctgggtccttgtcctagtcatgttcctgggtctcgatccgcttctagtttcggttccaatttcaagtcatggtgtacgtgtccaatccaagcattgagtctcagatcccaagtcccgaggtgggtcttaggtccaggtttggatctggggtcgggtcccgaatcccgattcatgttttgaggcccaagttctggtctcaatttgggggcgcaattcccgggtctgggtcccccatctatgttcaggtcttaggtcccggtctcaatccaagtttgtgttggggttttgcttcgggtctcaggtcctgatccgagtccaggtcctagtttgtgtttgggtctaagttcgggtcccagtcccagtctgggtctaagttttgggtcccaagtctgagtttcgttcttcggtcctgggtctcaccacggtatttaggtcttggtcttgcttcggctcacggtctaagtccaggtctcggtctcagtttaggtcccaagtcacagatctcggtctgggtccaagtcccgatatggcttttggtctaagtttaggtttacgtttgggtcctgttacagtccca

SEQ ID NO: 87005 - DNA, 2091 bp, Cannabis sativa
atcctttaccatcctgggaaggccaatgtagtggctgatgcctgagcaggaagggtcctaggcaggtaactattatgattaagatttcacctcagctagctgaagacatagttagatcagacattgagtttgttgtaggaaaacttcataatttgacattgcaatttgatctgttatagtgaattaaagcttctcagtttactggtttggaattggttaagattcgagaagaggttttagatggtccagctaaggattttacgatatcagataatgggatgctgttgtataagacaaggatttgggttccaagtagtacggaacttagaagtgagatcctcgatgaagctcatactactccatattcactacttcttggcactgccaagatgtaccaagatcgtaaaccctagtattggtggtgcaggatgaagaaagatgtggtggaattttcttcctagtgcttaacttgttagcagattaaggctgagcatcaaagaccagcaggattattgcaaccactgacacttcatgtgggaggatgtcattacgaatttcatggtgggattgcctagaaccacgggaacgtacgatttgatttgggttgtggtaattcaatttacgaagtctacacattttctacaagtaaaaacaacctttacagtagatcagtatgtagatttatacatgaaagagatagtgaggttacatggtgctccaaagtccattatatcggatagagatccgaagttcacttcaaaattctagcagaatcttcatcagactatgggtaccaaactgaaattccatacaactttccatcttgagactgatggacagttcaaaaggacaattcagatacttcaagaaatgttacgagccagtgtgatggaggctcctagagcaagtatctgccactaatagagttttcttacaacaacaattaccagagtactatatggatggctccctatgagttgttgtattgcaagaagtgcagatgtcctattcattgggatgaaacgagagaaaagaaatatctaggtccggaatcagtacaacggactaatgaagccatagaaaagattaaggccagagtgcttgatatcgcccaattagttacactgcggtcgcggtagtaaacagattatatgtcgtatccacaaggaggtaaattaccactaaagattagtataaatagaaaacgatataaatgtgaatgacgtaataataaaatgatgagtgaaagggtgtgatcagataaagagtttggtaaggtagaaatgtagttatgcaaatcctattctaataccgatattaattaaaaacacagttgcaattctacaccattaattacaactggaagatgtatataataaaaccgcaaattaattaatcttgcattaattgaatctcacctctaacttgacaacatatcatattatatatcataaatcgacaaaataccactattggcaaaatgcagtaaacgacatacagtataataaatataccaaaataattaatagctcaacttacataagaaaagtatgactgaacttatataaaagatactatcaatattggaagaaaaattagaagatgaagaacaatttaataaatgagatatggagatgaagcacaaaagaatcaatatcaatactaagaataaaaaagtacaatagctacactctaacctcatcaatattacaattttaatacactcatttttgtcactacaataagtatagataaaatagtataagaaagaaaaataaaatgccaaattgattttctactctccctaaaatctgatatctttttattgtatttttaccctttttatagtgcaaatttactcctcaaatctaatattttacgtgcatgatttagtgggcataatgaccaaaaaatgcctagcagtgtactcagctattcccacatctcttgtgcttcagacatgaacaaattaatgtggccacatgtcaagctagtggagactttgtaggtgaagtatgttgttggagagttggaaaagaagcctctaacgttcagctttagacttggtctaatttgggccttatttgattc

SEQ ID NO: 87006 - DNA, 830 bp, Cannabis sativa
aacactgttttgtgtttgttgtagagacttaacacgtcgaattataagattttaactgtctattacacacacgtgtaattcttttatttggaaagatagattgtggaagtattttttaaaaaatcaatataataataaaaaatattttttagtgtaatatttagtgttataattagagtagaaataattttttgaagttaaatataataatagtgtgacactaaatttaatatatgtgacgaagatgcttttaagtatgaatcgtgaaaattcttcatacaaaataatcaagtgacctgttataaaactctaatatggggatttgaattgcaaaactgagggagttactctatttatagcatatagaggtagtgttcaaagaagaaaaaaaagttgggagggtagagaggaatgtgcaagcattgatagtggacctaattcgaaaatatgttagtgtttgtttcctttttcacggatgtatatagagagaaggttttgtatgagagatgccacacgaggaaaatggcctatatatataattcatcgccatcatcacattggaaggagtgatattttggatgaacacttattttcaattagaaatcatgtaaactcttggaatgtttgacttatggtttcggcatataattaaccaaattgttaggaattttctttaattatttattatattcattttcttattacaatttgaacagtctcataaaaatacgattgaatttttactgttgtacatttacaatattcacttattatatattgaaataatctacgaatattgttgttaatgttatatagataactgtccatga

SEQ ID NO: 87007 - DNA, 1426 bp, Cannabis sativa
tcccgtaggaccttcttcaaggcctccacctcagcatgtccctggctgtatttgtccagggcatagttgtgtttagcgatgcagagcgtttgcctttcctcgtctacgtggaccggggtgagaacgatgccatgtggcatagtgtactcctccgcttcgggagggatcccggagtcgacgctaacacccagagtgtccctcctcctaggctgcttggaaggctcggtctcaaccatttcgcccttccgcttgtgctcaagggcgccgcaacctcgccctcatcctcctcaacttccccctcctagtctatcaagacaatcgtgattgagagggcactggacgaggacctcccgggggtcactagttgggatggggccggaggcagagaagcgtcagggctatgggccccggcgagagttgctaggagatcctcctttggattggatgctgcaacaaagaagtaaactaagtattagaataactataagaaggtatgcacccaacaacaaagcaataaactagtcctaccttgactctttaattcagccctagcaaagtcttggactacaatgttggcttcatcatccccaagaaagttgtctgaggggagaaaccagctaggataaatgggctgaatggtcaagggaaataggcgctggaggtccagagcccatccaggactgacccaagaaatggcccaagtgggaaaaataatattctttagcgtaactcccccactgggtggaaggcattctaaacctacagagacgctcatcgaaccctataggtctaagttgggtgtactctcggacagaagggacatgatgaattactaaaggagacttaccagaccctgaagtattggcgtctggagcaccaatgttgggaatcgggaccacaggcttaggcctggagggcctccgctccggaggagcttcaagacgaagggtcctcccagatgcagcctgggccttgatgtaagccagctcttgtgccctcctgaagaggtacttctcgtacaggtcctctgccgaggcaattatgtccacccggagcgccctttccgcagccgaagtccttacattcgggcagatgaccttggaaagattgaagtcatccaccgactgattctcggatatcagcttggccttccgacagttctccgtcgtgaccaagtctccaacgttgagggccttcttgtcataagtggagaaagtcttggcccgctggaggaatacttgagtaggttcggtccgcatgtaaggagggatcctaacccactctgtaagaagctccgggaggtccatggcctggaagccggaggaaaagaagaaaaggtgacagtactccttcacgtgcttctggtaattaaaagggatcgggccctcgttcaaagggtgggaccgaagtccataaaatccatctt

SEQ ID NO: 87008 - DNA, 554 bp, Cannabis sativa
cattagagctctctataaataccttctttatcattgaaaaaatggttggaaaataaccatttgtaatggagcttagagactcaatacaatattattttagtctattggtcttcttagtttctcttaagcttttcaactttagccttttgcatttgattttcttactaaagttcagttaaagaaaaattcttaccgtcaataaaaggttatacatgtttagtggaaatagagactacaaaaaaaagccctttcatgtctagcaaaaataatgatggatatgaaaaagttatagggagatttcatatccaacattgaaggacatgaaaaaaaaaattatcatgtccaataatgttggacatgtaaagtgagttgggacatgataaataattactattatttttattttttaaaaaaaaattagtgccattttcatatctagctttgctagacaaagtgttttggggaaagtccagcaatgctagatgtcacgggctcacctttttaggcagcggaacacccgtgcggcaccttgacttctctaagccaaggtcagc

SEQ ID NO: 87009 - DNA, 726 bp, Cannabis sativa
tgtgcctagtttcaattattttaactttaatactattttatgttagttttatttctataattacagtgatttgtcagcgatctactggaaaagtagaattttttattattatggcagttggagcgggtcatgttcttaattggtgcgacgatgtttcattgtatggatcaatttgctttagtaggagtaatatatatctctttctcggccagatatgtctattggccctatattttgtggtatcatgttctcttatttttggatgcctcgtcatagttgttcgtttgattatttctcttatttcacgtgtgaataatggggtagttatgtcctaatttttattgaaagattattggctaataatcattgataggtggatgctgtcagatgtttatttgagttggaaacctagcttacttcacacttcttttttgtgctttatcactattgttaaggttgttgttaggattttctttctttttattataaatgacttggcatgaatattattacgcaatctttgcttgatattttagagaaagctcgtctggttaatcttcagttgtctacctcaaatcattatccgattttcttggaaccatgtattcaggttattactcagtgtgttaagtaatttaaatttgaaaactcatggttacgggagcccatgtgtaagcaactagtgaggggtgtttgggatggtagtatgaagcagatctctttgag

SEQ ID NO: 87010 - DNA, 555 bp, Cannabis sativa
cccatggaagtcaatccaagacatcagagaaggcttccactataacaggattcatgcgttcaacaaagtatcagatctgttcattgaaggcacaaggacctggaatgtgcccctaatccaatcttgtttcgatagacatatagctgaggcaatcatcaacatcaagcctattcaagaggggagtgacctactcttctggaccccatctaaagaaggaagactttctgtcaaaaatgctcattggctccaccaacgacaaaggtttaacaaccaaaacattgtgtggaaacatttatggaagaagaagatccatccgaggttaatcatgataatatggaaaatgctgggggattgtcttccaacttttgaaaagatgcacttccttaacaacccagacagaatgtgcctcttttgcaatagtgagattgaagatacattccacatcatagccaaatgcaatatcaccagaggactatggttcagaagtaaatggggattaggaattgactcaatgggctagagcaatgtcaaggactttggtaaatggtggactaa

SEQ ID NO: 87011 - DNA, 876 bp, Cannabis sativa
tgtaataaaattgaccctttttctgctcaaaaaacaaatcttgcaccctttttatacttataatatttaaaaaatacagctacttactttgatatacaacacacctttctcttttcctattattttttcacattcgtcacctatccaaaatatgggtagtcatcacaaaatttggacccaacaaaacagccacagcagaaaattttagttttcttcacttgacaatttattatactctccatgagtgtacatatgtagttttttttttaaaacaattaattataaaagagaattgctaaaaaaatattattggtgcctatgtaattaagtattaagtatcatataatttaagagaaaataaattttaaagaatattgctaaccaatacactacttataaaaaacattaaatattgatacccaatgctcattataaaatatcttatcccattttttatacatttacaatataaatacagtttgtaaaatagttgctttgatgatgattgtcaaatgaatgtatcaaatttaacaataacaggaatataaacataattattttttttttctaaaaaaatataaacataattacgtcaatattaaatagttaattttttattttattttagagcataattataaaagttgtgcggaatatattatttattgatttttaaagataaatactattttaaaacatgaattttgcaaaaattattagatactatatattttaaaatagtataaaataaaaattaataacaacccgatccgtaattattatgacaaaattaagtatattttttttaggagctttttcatttttacacttcaaaataattttttatatatgtatatatatttacggaattctata

SEQ ID NO: 87012 - DNA, 1109 bp, Cannabis sativa
aatgctgatccttttgattaaggaaacttagttgaattatctcaaagtcttacttcttcggcccacgtgtcacagtccggttggtccacgtatttaggacaaaatcagggacaacactaagtcttataaattaataaatttaaatattacataaataaactaatttgaaaaaaatagatattttagtatggttagaatattttattaaaaataataaaataaaactagtttgaaaatttatggttttgaaaccctaaaatttctattcaaaccaaactaaccaaatataattttaataaaaaaaatgtctagtaagataaaatgttaaacctaacatttacctcccaagccttgtttagtaagaagtgaacaaggcttgcttagatgcctatgattgccttattaacttcctggcatgtgccccgaggcgcgtggggatgcatttatgaccatcattactgcagttaattgctttttgtagacaacgattcgtttcctatccatttaatgatatggcacattaaatgggtgtcagtcgagtactcaaacgttttctaccgccttgatgaacgcttgtcccaaccgttggatctgtggaatgcgaatcgattgctattctgaccgtacgatgacggtcggtcacagctgtctcacactcgttctggcctataaaagccagccttctcacttcatttggttactttcaccatttcaccaaatcttctcaaagctttcacagagagaaaataaatttcaggtaccatagaatacttgcttctcttccttcgccgttgccagtcttcacttgatcaacaccaaccccagccttcaactttacgtaagttcttagtacaccttacacttgcttactgttcatttgtattgcatgtttacagtttctgggttgaattttgaacttttgggaacaaatttgcctgagtttactgtacgatgcgttaaatccctcttttttgtgtcttgattgtttcattttactatgtttcctttgaggaatcgcctttatcttttgtaataacgcctttagggcttagagtggttcgtgctttcttgactttgcctttttttcccttttcttctttgcaatttaa

SEQ ID NO: 87013 - DNA, 674 bp, Cannabis sativa
ctctaagcattcaacttccagcttcaagattcaagatctctcattcacgatcatggtgagaactcgagccaccaattctgctacgatctctgatgaactttccagagtcgaagctccaatggctcctcctcctccaccaaatcattccgctgacaacacaatccgatcgactcttcccactgcttctgctgttcatcgtcatcatcaaaccgatagaccagcctacgaagacattcgatcaccatactacatcagcactgctgatcatcccggattatctctggttactccggtgctttctgacaagaactttcaaccctggaaaagggacttcaagctctccatcggagcaagaaacaagacgccatttctcgaaggtactctccctcaaccccctgaaaatgactcccttcttgattcttggattcgatgtaatcaacttgtaatgtcatggatcttacattcggtttcccctgaaatcaaaagtagtatcatgtattttgatactgcagctgaaatgtggaccgtattaaacaataggtttaatcaaggtaatggtccacggatttttgagttgaatgaaacactaacatatctcaatcaaggagatgactctgttagtgcctatttcaccaaactcacagccatgtgggatgaaatcaatcaattgaggc

SEQ ID NO: 87014 - DNA, 625 bp, Cannabis sativa
tttattaaattggaagaagctgagtgaaacgctcaaagcttcgaccatactaagaataaaaagaacggaacaaggtcaaatagtcaaagctctcaagggggtaatggtaagaatggctccaacgatggcaagagagggaataacagtaatggcaataacaacaatgataacaaaagaatacccccgagccagccaggcgagatccaaccccaaggttcacaacctatagcctactcttggacacaaaagaaaatatctacaatgcaactcactcggtggtaccataccgtaaaccttatcccatgagaaaggacattagcaaacacgacatgaaaaagttttaatgatttcacaatgactacgaccatgacactgatgagtgcaacaatctaaaggaggaaatagagttcctcatcagacaaaacaaccccaacttgaaaagatatgtacgtcgggacaacgaccggcccccacgacaataacaacaacaagcagttggggatgaccaacaattgttacctccccccattgctggtcgtttggacgttatatctgttgggttttatgccataaataaaactctttacaatctgattagttatcaatataaggaatttgaagtgat

SEQ ID NO: 87015 - DNA, 1100 bp, Cannabis sativa
tcttattttacgtaagtaagggcgttacaatttctcttaatgatagacgcgattcaaaaccgtatttaaattatgatgtatgctagtgaaactctcttttacactctctttgacactctctttctaattgagtgatatgtataaccttctaaattatgttcaaaaatagttacaattatacattcatttagtttttattaatgataataaaaataagtcacatcatttactttttttttaaaaaaaaaattaataattaatttatttatttttactgataattaaaatgtatgattctatttaattgtttgcttatttttcaaacaataaaaaaacttaattaaattatatttattaaaaatttatttttttcaataagaaatatgtacaacaatgaatcattcttttaattttttttttataattaatattgtctatttattttataaaaaatagaaaaatatttcttttcataaattttacaccatttttttttattatttttctttctttctttctttctttcttttttttttttttgcttcgtatcattcttttttctaaaaaaaaaaaaatcgtatttttgttttttttttttttatatatatttccttaaattgttctcaaatttctctctaatcaaatatgtatatatatgttaaatcaattatttattttttttgcttattcatgaaaatatttttttttacttaaatgaataaaataaaagtatatcgatctaacatatactattgactaagcataattatattagtttattttttgtcttttgtatctttatatatatatatataacaaacataaatataaaatattttaaaaaatgataaaatttaaaaaaaaaaaaaaaaaacaaccaaaactaatgcaaaatttgttgaaaaaaaagagttagtatttttttaattttttataacataaaatatcacatatttattataaaaaagaaattaaaagaaatagtgcatattatttagtacaaaaatatgagaaattaataaaatagttcaaaaaaaaaaataaacaagtaaatgggataagacattttaattattaatgaaaagtaaaaagagtataat

SEQ ID NO: 87016 - DNA, 706 bp, Cannabis sativa
aaaggggcattccgagaatcgaactcgggacctctcgcacccaaagcgagaatcataccactagaccaaatgcccactgatgtttatcttgcacccagtatgcttaacatagattgatttcttattttctcttgttttcatgcacagttaacttctttcatgttccatttctcttccctgttttgttttgaaacttaaaagtgcagcttttggcttggtgctgtaaaactcaaatataatagaaaatcttattactccaaaggataaaaaaatcatacttgctttgtgatcactaatggtgttaccaaggattcaatttttattgtatcttacatatttaggtttcttttgtatggcttttcaaatctggtcttggatgaaagcatgggctcttttctttttctgatactaataaaaatttgagacgtgttcattattactgttgaattatgcaattttttaataagtaaggacaaggttatgcttaaaatatgcaaaatattaaaactggaagctgtttgcagtcttcatattttaaatttgatacagtagtaatttagatccaaaatggaaaactgtaatagttattatattccctttcaatgactgataaaataaaattaaaatatgtttgaacaaattggggcattccgagaatcgaactcgggacctctcgcacccaaagcgagaatcataccactagacc

SEQ ID NO: 87017 - DNA, 2487 bp, Cannabis sativa
  modified_base (65)..(65): a, c, t, g, unknown or other
  modified_base (1401)..(1414): a, c, t, g, unknown or other
aaaaattatatagataaaaattatgtagacattttattatataaaaaatttaaatttaaatttanaatacttaaaatattataaatattttatataaaaaaaattaattgtgaatattttatattagttttttggtcatatttagtgtgattatgttattttttttatcaatatatatgtagagtaatacctaaagatttttatgattttatggattgttgcatttcacatgatttttaaaggcatatgatcttaaaatatagtttatataaattattttttaacatcaaaatcgaaaaatattttaagtcaaacttgatatatcatgattatataaagcactaattattgataggaggaatatatacactaatattgccgcaatagttaaaaaaaattctcaaaaatcaaaatcttaaatatcatttgaattttttttagaaaaatacattatttaactagaaaaaaaattaaacatacatattacacttaacatcacctaattaaacttagttaaaaataaaaataattatatgtgcattacacgtaacatcaacatttgttaagtttgactagtatacgtgatatagctagaagtatctattatcagtttggtgaggttataatgtatttttattatttcaatataaatgacatgttacatatatttaagtgtagtccgtttaatgaaaaattaaaaaaaaagtttaacccacctaataatttcgttgatttggtcggattaacctattcaaattaatcatttttatttttttattattattaatatttggtgttcaaataatttattttaaaaattaaataaatatatagtatatacatattttaattttacgattgaaattaaataaatgttgataaaattaattttaaaaaaaccataaattaaataaatgttgaaatattatattaaacaacattcttgaaagtaggatagaaaaataaatattttatgtgtaaattttaaattttaaattttaactttaatattcaaatacaataattatcagccataaaattcgaatttcaattaaacactacaaaatgcaaattttaaatgtaaaataatttaactatttaatttatatataatattataaataattttagtaaaatatataaatctgtttattcagtttatctagattatttcagcgagttagaataatattcagctaacccaataaatttattaggcgattttaacttttggttagattgttcattattatttttttttttttttggtttattagtttactttgatttatttaagttagacggtttgtaaatttttttgagatcattagggtgtcgtttggtaacactttttttaatcagttttctgtttttaaaattaaaaaaagtgaaaatattttnnnnnnnnnnnnnntataaaactgttttcactttttaattttttaattggaaatcaaaaaaaattttcaaaaaaaacaaaaaaaaaagtcactttcattatttttctaaagagattttttactcaatgttttggactccgaccagactcggacccagacctaaacccggccttggccctggtgctgaacctaacacccgacttggattcggactcgactctggactcatacataacttaaataaaattaaaaaataaattttacaaaacatatttttattttttatttttaaaaaaaataaaaatattactaaacaagacgtaagtgtgtgtgaacagtttagttatatctgtagcacccacgttaaattattagggttcatcagttgttagttgtttgtttgtgttgcaatatatatatttatgtgccactgcatgcgctattaatatattacttattcatgcatgccttgcatgttgagtcttgtcatggtttgattgaagcttttgttttcacttctctatgttaagtcatatcattgtatatgcaccgcgcgtttaacgcgtgtatttatatatatatttataacagattcaatcactgttgatgacaagtcatgatttaaatataccccactgtactatatcttcacatttaatatctgagtattattataccaactgggaacattaattattataaatggtcaagtttatattatatgtatatgcatgcctgtacataactacatattaactacgctcagaaacataagagcaaaaaagaacttacttaattaacttcaattaattattcaacagtctaataattttacataatgagagaagattttggtcggtttgtaattgactggattcatagtgtacgtgattgatgcaatgcatattgttacgatcaatgactttttgtcaaaagttgcatttttcaaaatttataaatatatataatactcattattaataacatacaatcaatatttgctattagatttagggtaaataccattttggaccttctgttttgcaaaaattaccaattagaccctgtgttttattaaatgacaaaa

SEQ ID NO: 87018 - DNA, 1241 bp, Cannabis sativa
aaacaaaacgaataacaaccagtgtagtactaaaaggtatgaataagaacatcacaaattacaacagtgtgaggagaaaagagacaaaatctttcatggtatagtctgaaagtgatcatattttcaaaactcaagaacttaactaccaaaaaaaagatcacacataaataccgtaagttgtcctagcacttgagggtgatcagaaaccaacttaattgctaatgtaattgctgatgaagtggtctcaaaggaagcaaacaaaatcgaaaagaccatgtctacaacaatggcttcatttagaaatttctcttctctgttctccatttcttcaagtaaatggtccaagaaatcaccctcacctttctttgatgctttcttccttgtgtttatagtatcttttattactttaattacattctgtcgtccctgtcatatatattatcatgattattaattagtatatatatagtttttttagttcatgcattataaaaataacaaaacaaaaatatataaaagtacctttatacatgcatgaaaagcagttccagggatgtttaatggaaaagatataaggccatccatgaatttgttgaagttatctttcaatttctttccttccttcagttcctcataacttaggagcttcttaacgataaattcaaataccatctgccaatttttataaaccgaacatatttataaatttatagatcaattttgacatgcatcacgataactaataatagttataaaaatatgtttatatttatatatattttacgtttgaggctccttgttttacgtctacaatgccaccatgatgagtaagccatgaaaggatgtgggttcgagtggattcacccatctcaagaataagacgttccttcaagctttgagggccaagaaggtgtaaaatcaagttcttaaggtacttgtgaaacgttccttgataaactagcatgctttgattatcacccacaatcttgttgaaagtctccaagtaccaaatccggaaatcctttccttcttgttgaaatatttggtaattgaattcatggtcagttgacactatcactttctgcccaactatgctagtgcgaaacaacgatccatacctgaaatataatcaaaaatatatctttttactttagaatagtaatttattaataaattagtatttttgccctatttgttctccttatatgtaatatccagtttatttttattattattattat

SEQ ID NO: 87019 - DNA, 530 bp, Cannabis sativa
accacaaatgtgaaatatttatagtcttaaaaagtaatagtattattttgatatagggtagaatctgcaaaaataaatgaataaaatttcaaaatttactctaataattatacaacttatagagtaattcaaaacaaacattatcataaataggactaagtaattatatgttgtcaaatttcttattccttcccattgctacttccaccacttgttaacgagccttgtattcgggaattaatttttcaaatctttgcttaagaaaagtgagataaatctttactaataaagtagaatccttgctgagtcaagggaaaatataataaacttgtcaagtaatatatctcaaatatacaggctgagagaggaataggaatgcatggaactccttgattctaagcctatagctaaagctgactatattgtctcactgggaattccatgggaggtaatataggagtaggagatgagctttcttttggggtcaaagattagatttctttcggcaaaacagagacgcatataacgtt

SEQ ID NO: 87020 - DNA, 1249 bp, Cannabis sativa
ttactttgaggatatgcgactgctgaaaaagctttttggatccccagatcatcacatagtgttcgcatttcattacaatcaaattgttttccattatcaaaaattaactagtaaggaataccaaacctgcaaataattgctcgatagatgaacttgtgtagtttcgttgttgttattgttgctaaagcctcagcctcaacccacttggtaaagtaatccactgcgactactgcgtatttcactcctcctttttcctttggcaatttgcctattaaatatatgccccagatcgcaaatggccacgaactggtgatagaatttaaacagtttggtggtctattaacataggtggcaattcactggcatttgttgcattttttagcaaaattgaccgcatctgctcgtaaagttggccaataatagccttgtcacgtaaccttcagagctgaagaatttctgctggtatggtaactgcaaatgcccccatgcacttcgtggaggatataatcacattcatccccatcgatacacttgagaagtggttgactaaaagttctgcaatataacttatcgtcatagatcacatatcgagcagctcgataacgtaatcttttggcttcaagtttatcacttgggagttcacaagttttcaaataagcaatgatggaggtcattcaagtggcttgttcaataacatcaatttgcataacttcatcgcgatcaattgttggatggaccaacacatccataggaattacatcgagtaattttacttctctagtaaaggccaaacaggtcaaggcatctacaatgagagttataagcacaaaggttattcttacctgacaataacttttttaaatttagacaacaactcacaagtgtaagaaaggtactttgccaaacgtccccctcgagccaaatatcgccattgacctaaaaaaccacgatttgagaatcgttaaatgcttcgaggtactcgactttcatctctagggtgagttttaatcatgcgattagagcctcgtactcgacttcattgtttgaggcagtgaattcaaatcttaaagcagtgtgtactttaaatttgttaggacttatcaatataattccaccacccgaaccctcactgtttgatgctccatctacgtacaaggtccaacctgcgcctggcagtgcctcaggatcaactcaatcttctgtgatgatagccacctattccttggggaattaaagaataaaatcagca

SEQ ID NO: 87021 - DNA, 2096 bp, Cannabis sativa
ctgagttttctactttcaattttttctaaaaaaagaacaaaagaaaaaaaaaaaaaaaccaaagcgtgagatcatattcttccctctaaataaggcattcccaaaccctaacactaaatgggtaattaaagaaaataaaaaacaaaaaaggaaagaagtatgcaaaaagaaaaaccagtactcttggacttaaatatttagaaataccaataatcaatattcaaattatttctatttctttttctgttattcattaattaagattttcttttatttctcttcctatggtttaaggtttatttaaattcattttataatttaattacatttattggtggattccaataaaatttcattgattgttttgaaataaattaaaattttccattaataaatgtaattaaaattaatttaaaatatatataattatttttatataaagatatatttatatatctttctacattcttaaatttgttttaaaatactcatttttcattttcctacattggagatcatctttttaccatattatatttatatttatcaaaatgtttattgagtttttttttttggcattataggaaaataagtaaagatgacattaccattgaaattgataccaaatgagaaagcaagaagaggtaacattttcaaagagaaagagtaggtctaatcaagaaagcttatgagttaagcacactttgtgatgttaaagtttgcttaataatcaaagattcaaccaaccaaccttcaaataatcctatagccacatggcctaaggatcctcacaaagtaaggtctctaatcaatgattacaaaattgccaaaactactcaaaaaccatcttcaaaaagtctccaaaacttgactgatttcttaaaggaaagaatcaacaaagtcaacaaggagattgagaaattatgtcaaagtcaagaaaagtcaaagggtattgttgttggtaatggtagtaaccaagaaaaacttaatggtaaccaactttgtaagtttgcttctgaattggataacaaaatgaaacaattgaatttgagaatgagacatttgatttcttctcacaatttcaagcttcaaatgctactacaacaacatcagatgatttcttcttcttcaaaagctcctctatttggcatgaattatcataatatcactagtctattgaactctaatgattatgtatttgataagtactataatggtaatggtactaatctttttcaagaagatcaacgtgatcaacatggtcaatattatgatttgaaaattaatggtagtaacaacaacaatatgttggaatttggaggagtaggggagctacaacaaaatgatgagaatgtgatgagctaaccattgcaaccattgatgcctagctcagtggttgacagtactgaatggccttacaatcaagctggctctaatatgagatttggccctatgtgatggtctaattatgctttcttggtagtagtaataattgatgatcttcattagggaatttaattatgtttaattagtttttattatgtgggtttttttacttttggtttatcatatgttctatgatgtaataagtgaccatattttcttaatatggtattggaaacttttgcttaattatatgagttatttaaaggattttgatagttgttatttgcttgggagaaagccattatatggtttaaaaaaaaaatcattttattttattttaagtgagtaagtttattgagcctaacccatttctttccttctttgggactttaattctcaaaaaaagaaaaaaaaattaatactacctacaaaaactaacaaataaatatttgcattagtgacaatgacatattttatcaaaattttcctcaaagctttgcctccaccacctctactattgtgcctaatagttttgagaaattatagtaaatggcctcaaatcataagactatgttagtttatgtcctcatttcaaaaaaaatataacaaataaccctaattcataagactatgttagtaaatgtcctcatttcaaaatcattaattttttctttatttttttagaattagaagcaaattatttaaacatt

SEQ ID NO: 87022 - DNA, 1425 bp, Cannabis sativa
  modified_base (1064)..(1064): a, c, t, g, unknown or other
tatatatatatatgtaacatatatttaatcaatctcttttattgtccatgtattatttttacaattgagttgtatatatcttccattgtaataaaatctctaacattacaacatttttgtatcaacttttattattctgctctaatgcataatattataaatcttgttacaaaatttaaacgttatttaatgttctatcaaatgatttattaaaaatataaaataataataataaaatatatatataatttaataataaaataataataattatcaaagtcaattaatgtaaagaaacttgctaattaaatttaaataataaaatattaaaaatatcataatgataaatatataaaaacttagtatttattctaacgtaaattttgtactatattacaatttacattttaaattattttttattatatgataaatttacatcatagtttaatagaagaataatttttttataaaataaattatatttcacatttaaatcacttttgaagataatctaactttaaccggcaagtaccggtcatgaaacaaaactacgtgtgagaatagtttggcattagaaaaatgacatttaacaattaaccttcgctttcaactaattttattaataataaattatgaaggccatcgtaaacgaaatttgtaacggcaaactgaatttggtgatcagatgacaactaccttctttagctatatataaaaatcaattttttttttttaaaaaaaaaatagaagaaaaaacaatctttgatattcacgtgttgttctttgaaatttttcctgcagagaaaatgattgaaatatggtaacgtataacgttttaaaatgagtatttttttctctgacaaaaaaaattgtgtttttcttttctctctattttgggaattaaaagaggaaaaagaaataaaaaaaaaagttaattcagatttttatcctcaaaactttaatatctaccaaatcatgttctttgaatttttctgacggttaaaaatttcccatgaactattgagattgttagatttaagaacttttgtttaatttcattnaattttactatttcagtaattgtttatatactaaactatgttctccagactttgatatctaccaaatcatgctcctcgaactttgacatatactagatcatacccattgaacttttattcatgttagactattttttactaaaatcagacaaaagttcttaaatttaacaatctcgatagttcaggagtattttaaatgactttaaaagttcaaggagcataatttggtacatgttaaaatttggaggataaaaatcctaattaaccaaaaaaaaaaatggtgtgaactataataataaatttagaataataaaacatttcagatgaggaacaaaatatatgtagaaatagcatagactta

SEQ ID NO: 87023 - DNA, 636 bp, Cannabis sativa
atattaaatattctacttacaattaatttattctatgaaagcacgatgattctaataatttaatatttcacccataaaacaaaagtttttttggggatgcttaaattatatgtgaagactctatacacaatcatttttctaagatgtaggattgttatgggtaaaaagaagaataacagatagaaataagatatacaagaattaatgattatattgacaagtctttataatcatagaattatagataataaattgggttattggtagaggtaatgtggttttaattgattatatgtatacttaatttatgttatgtaatatgtcagaatagaggtggacttgcttaatttgttgtagttggtgagaatgtttgacagtggcttggctgcctgaatttatattattaacagtgtttcttcttggtgaaaataattagatttatagaatgacatattagcggaggtaggtcactgaaaaatcgagtttttgcaaatgtcaatgatatatataaaaatacaaaactgtattagcctgtagaagcagaatgtaattttgatactgcagaaaccagttttgcagcaacaaaacagaacggacagaatataaaaataattacagaaatttaaataacttgac

SEQ ID NO: 87024 - DNA, 613 bp, Cannabis sativa
ttcacataaaaacgactactggagactatttgcaggttagcttttcaatatttttgttgttatctagacaattggaagcaatgttttaccatattgacatcctgaagaagcagcatgagatcatgtttcattaatttggccatggggctttcatcataattgttagactaattaaagttttgtgggaaacttcttattaaaatggatttgtaaagatctttgttggcaatattgttttaagatttttctaacatgactatctagacccaaaaggctatttagattgtcttatcaatttaattatctatccaaaatatccaattagagtttaataattaaaatgatattgtgcactttacttgataggctacattaggaggtcagcttacaacagacttttcagggaagccgggatgggacagtaatgcagccacatttcaaatgataatcgtttcaaataacttgcacggagattatcagctggctaatggctatggacataatgaggctaaacgggttcttaaggtaactccatgtcttcatgctcctaaacttctctttctccttttcattaattatcactaagtattcttttattttgcacacttttatt

SEQ ID NO: 87025 - DNA, 710 bp, Cannabis sativa
  modified_base (665)..(673): a, c, t, g, unknown or other
taaaataatttccaacagttaagtgctaacttaatagaaatgagcttagcatattttgatattatactgggaatgtatttctcgtcaaaatattctgccagtattgactataagaggaagatgataatcttccaaccagaaggtgaagaaccgtttatttttgtcggttcggttcagggatctcgaatccgtgtgattttggtcctatcggctaaggaatttttgtgggatggatgtctagggtttatggccgtggtattagataccacttggccagactctgttaggccacaagacatcaaggttgttcgggaatttctagatgtttttcctaatgaacttctgggtttaccacctcaacgggaaattgatttagcacctggagcagaaccggtctctaaggctccttatagaatggctctagctcagcttaaagaattaaaaattcatctccaagggttgcttgacatagggtttactcggcctattgtgtcaccctggggagcttcggtattatttgttaggaagaaggatgggtctctaagaatgtactttgattaccgggagttgaacaagttaacagttaagaataaatagacctaggatcgatgatctttttgataaccatcaggggaagacattcttttcaaagattgatctccgannnnnnnnncatcagttgagaatccgagaggagaacattccgaaga

SEQ ID NO: 87026 - DNA, 1057 bp, Cannabis sativa
acaactatcattccaatcaagacaggaatcattcaaaccagaacaatacaggtggtggtcgtggaaactactctcgaggtggcgggaacaatggtggaagaggtcgtggtggtcgattcaatgaacccaaaccaacttgctaggtttgtggtcattatggtcattcaacaaatacctgtcactttctctatctttgtaaaaaaaaaaaagttaaatacctttgtcactttttttgttaaaaaaaatataaactgattcgaaatggtaaaaactaacttaacaatcattggtaaccacaattagaaaaatgtggattaatttttcaaacaaatgaaggaaaaaaactaaaaaaaaaagaagctttacaagaggaagaaagtttttgaatacgatgaagatcagaagagcaataaataatgagtttgtggtaacatgtatttaacttttttaaaatattgactcaaaaaataagtatgaacaacaataaaacaaccgttaacaaagataaaaaatatgtatacaataaaaaacatagagtatgaaatatataataacaaaaaaaaaattaaaatgagcaaaatagatagatgagtgaaaattccccaaaaataataactacaaagaaacttatttgaaccacaaacaaaaaaaaacaagtgaaactgtaattttttgttgttgttgtttttgtgtatttgtgaaataatcctattaaaaaaacagagtatgaatgtaaatttctcaattttttttccattgcaaaattcccaaactaaaacgtaaggcataaaattgggttttagcccattgaatgtgggctctaacattacatggtccagttgagttgacccatagagaaaggaggcccaatggtccaaatggacccattctcagtagtatcgaccttcttctctctaaacttgaactgactgtgtctgtgaaagtctgcgacaccatctgagactgagattcagatcatcaccgagagagacccaaaagagatgttcctacgagtgatcggacggccattattggccagggtgaagcaaacgacggg

SEQ ID NO: 87027 - DNA, 613 bp, Cannabis sativa
tctgaggcccaatcagcatcacagtaggctacaagatccaagtttgctagtttttgcaggtgcaaaccatgatttgttgtgccactcacatatcttaggattcgtttgactggtgaccaatgtgtggaaagaggtttttgcatgaattgacacaccttgttcacactaaaggaaagttcaggccttgtaatggtcaagtattgcaatgctccaacaattgacctataatggtgaacagcttccacgggttccccctagtaagtagataaacgaatgctacttgtcataggagtaggggctggtttagtattgctcatttgggccttagctaggagatccttggcatatttagcttgagacaagtgtaaactagcatcggattgagtaacttcaatgcccaaaaagtatgaaagaggccttaagtctttaagggcaaactgcctattgaaaaaaactgtataatatcttttattatttgcaggtatatatatattttattgggaaaatttcggaggtttggcaaggggatagcgagtgtgagaagtttctttctgtaattgttcttggggtttttctgatggttgctggaattaattattggggcagagtttct

SEQ ID NO: 87028 - DNA, 791 bp, Cannabis sativa
gcagccttaatgttccaaagcagggatttatcttgtggcaagtggtccaaacaagtttgttgactagagacatgcttggaaggtttaatattcaggtgagcaatctaaattatgtcgtttgcgaggctgaagttgaaacacaccagcatttgttctttcattgcaggctagcctccttggtgttggaggatattttcaggtggctgggcttcaacgtttggtctaggaagttcaacagctggttttcttggttgtgctctgtcaaaccgagcatgattgagataattggagtgttgtgcttggctaccacaatatatcacatttggaggaataggaataattgtttgttttccaatttttcaaacacaacttattgtatagtgaacaaagttaaaagagatgtcaaatataggttgtatatgcttaaagataggaaaggatccaaagaggagatgaagattttacatagattgatgtgtaattaagtgtggtgaggttgagccttttttttttagaaatgcttgagggtgtattttgtttgttcgattaatgaagtttcttcttcttgataaaaaaaaatacatatatatatagttattataaacatgcaaaagagtgtgttataaagaataagtacatgtggatgtcgaaacgtttctattaattaccattgattatgaatatattaagggattttttttaaaaaaatatacataaaatacaaaataattacaaaaataacctaacaaatctcaattacaataatatcttgccacgtcattaaaaaatac

SEQ ID NO: 87029 - DNA, 581 bp, Cannabis sativa
  modified_base (112)..(123): a, c, t, g, unknown or other
atagggacaccttacaatactggggcgtagacacagtgcatgtgtctaaattaagacaagagacgtgtcttttgttttaacaacttttatctttttcctatttaattaattnnnnnnnnnnnntatttattacaaaataaataattaatattttgacaattcaaaagaaaattttttgagcttatacaacttttatcccactccttgacagtgtttcaaggtggcgatctaaagaccatgggcctataattctaagttttaataaactatattatttattgaatctaatcaaccaaatattcttgtttattaattctatgattgctccattataaatatagaattgaattcttaacaattatataattatatctactgagttttactgtagtgtccattaatataatcaatttcagcaattagctctcttagtgtcggtttgttattatttttggtcaaattaatattttacccttctaattaattttttatcctttatagtttcgttaatttactagtgaaattataatttagacccaatctaaatttacgcgcaacttttcattttcagaattaacaca

SEQ ID NO: 87030 - DNA, 934 bp, Cannabis sativa
taaacattccatcagtagcataatccttcccccacaaaaataccatttttagtgatggtgttcaaatcagctccaattgtttaagtaaatccatccttgttaagaagaaacccataaactagattattcctcatatcaggagtatgcattacatcttttagcaataagatctttcccgaggtaaactttagttccacgttttctattccaacaacaatagtggtgtgagaatctcccaacaatactttcttatcatcagcagccgtgttatgttataaacatagcacgatcatagtagacatagcgagaggcgtcaatgtacccacaacccttctgatccacttactaggttgatctcagaaattatagctacaaaaaaattttcagtcaagttagcctgcagagtagtgctaggcttgttcttgcactttcgtgccatatcacccgtcttgttgcagttgtaacacaaaaatgaaaacgggtgatcaaactctctaagaaaaattccttagtcttacgcatgagagtgtttttaaaatcttttaaggaaaggggtaatttatcaattaatacaacagcttgaaactgttcatctaaagtcataccttctaagataatctcatgtgcaattttctaaagctcgtgagattggacttccactgatttattgtctaccatttgatacttcaggtagcaactaacaacatactctttagtaggggtgttcatcaaaccacccaaatcgcccgcaccgtaaaaaaatgcgaattaaaattctttacagtgtggtcacggtttgaatttttcctaaactgcgtggtgcaatttgcggtttgcagttttgaatgcggttcaaaccgcaccgcaccgtacattataaaaatacaattttttatatttatttaggtcgaatatgtgaatgttcaactcaaag

SEQ ID NO: 87031 - DNA, 640 bp, Cannabis sativa
atatattaaaaatttgttacaaatacctgaagtcggctaatatggtcgctagaagatttaacgttgtagcgatttgtgtaaaagttgtgacgagcctgttggatttgggctcgttcttcaggtgtgcctgcattcgggtcgaactcgaatgtttgtcttcctaagaaattgtttgtgctaaacaagtattcctcttctttttcctttgatgaattcctaccaaacttgatcttccacattttgtagtaccttttaactaactaatatcaactacttaatactaaaaaaaggaaaggatataaatagaaggtttgtaccaattaattttttgtagattttgtaggtgagtagtatctttcattgtggtcgaattgatatatatagggatttttttagagtaggtaatacaatttttaattcatgctatagggaagaaaattagaccaatcaaaaattaaagataattgattgtacaaaaattttatttgacacatgtaggggattatttcatatattttttttttttgtttctgatgatttttttattattaaatgtttagctgatgtatatatatttaaaaagacttcatgttcatgggtgatacagtttttttttttttttttttttttaaaaaactga

SEQ ID NO: 87032 - DNA, 711 bp, Cannabis sativa
caaatacttttatgtgaacgctctttcttctgctgtgtcatgctctcttcttgaacttgcagtaaaggtatcaagaagcttgttctcaggtcagctctgttatgtttttatatatactagatggattttaatttaggttctaatgtaattttagatcaactctgtaatttattataaattatattattaatacttgtttcatttggttacatatgttttttcttttttttgcttaattttttgtctttacgtgtaacccaataaatattttattgtaaatatatttgtcatccaaaaaactcaaggaatatatagtaaccaacttttgatattgaaggaagctctattataaattatattattaaaaaaattattttaatctaagatatttttactatcataatgtaaatttatttttaaattctgatatttatacttaagttcggatttctatttttttttcactgacctcttacacattattttaccagcctttcattcattttctatgcaatttttaatacgatttgtgaccactgtctctgcattttcaacgttaattgctattattctacttgatttgaaatcaggtattttttatccactcatattgatataaattctctattttttttccattgacctttcacacattatgttatcagcctttcgtttcattttatatacaattttcaatacgatttgtagcca

SEQ ID NO: 87033 - DNA, 972 bp, Cannabis sativa
aaatatccaaatacacatgtttcacgaaacaaataaaaagcacaaaggataataaaaataaactcccactgaatatagttatcctcataatctaaaacacctatacgagcaatgtactcatgaaagaccttaggtggcaaacccttagtaagggggtctgcaatcgtagtatttgtacctaagtgttctatacagattgtccactctatactctttcttttacgacaagaaacttggtatatgtagcctaaaggggatctcctactatcttggtatcccgcaaagttagagtcagaatatccaatgatttcaaagtgatctgaccttctatatgtgagcatgtaatctcttattctcttcaaatatctcataacctttttggatgccttttagtgatcaattcctggattgcttaagtatctacctaacactccaataatgtacgctatatctggatgcgtacaaacttgagcatacattagactcctgacaactgaagtgtagggaatctgttgcatttctttaacttcaaggcttcctttagggcattgcttaagataaaatttatctcctttaacgacagggatatcacctggtctacaatcttgcatgccaaactatttgaatactttatcgatataactcttttgtgataatccaagaatatcccatgtacaatctcacatgtacaatctcgatgtatttgaattcctaaaacaaaataggcatctccaagatatttcatctcaaaatgcttagataaaaatatcttggtttcatgtaataagcctatatcgttagtgtcaaataatatgtcattgatatatagaactagaaatatgtacttactcccaataaacttgatgaatcacttgatgaattttgtagtactattgatgggaagctttcttgagtctataaatggattattttaatttgcaaactgttataaatattaataattatgtggat

SEQ ID NO: 87034 - DNA, 1054 bp, Cannabis sativa
acaattttgggaggatgaagttaacttacaccccatactgttttttcttattttctttcaattttattgttgtaaactttttcttatttttctatactatgtatgggtactatttttttttttatttttttttttacttttgacaacctgcctattcacattatataaatatatatatatattatataaactaacaaaattaaaaaatgtgtgacagtaaaattgaaaagtattaccccaaatacagtatttttgtaaaatgcccttattatttcagctcttaaatgggccaaaactatgagaagttggatattgttgtagctactcatttaaagattattgtcatcaaattggtgatttttgagttcatcatttgatgttttgaagttaatataggtctatttcaaaaagaatatttgtaagggagctaggctaaaaatacatatatatatatatatatatatatatatttgtttatgcacaggttataaataaattttgtgatgacatttgatttgtgaggtgcagtgcaacaaacaagtttaaacgtgtacataaaatctttaattggataaacaaatcaaatacaattctaagattgtacaagaaatgtgagatgtgatttaatttattattattattattatttaacctaaaaactgtattgaactggtaaaagaatataggaaacaataaatatgcatttttgtgtccactacttaagtatagtattgtttatttaagaatattgttataataattattaaattaaattatatgagatttaatttttaaaaaatattaagtactactaatattttttagtatttaagtaatatttaattagaattagaggtaatgaaatgaaatagaatagaaagaaaataatttttatttcaattaattatctaattgcattttaataattttttaacaatattttttattttaaatttaattttattctatttttatttttattcacatttatattcttattcttttattttcatgtattcagtcaaacttactttagtgttgtgaagttgtggta

SEQ ID NO: 87035 - DNA, 875 bp, Cannabis sativa
gaccttatagagctggaattaacagagtttgacattatacttgggatgaattttctgtcgaagtattaggccagcataaattgcaagcagaaaatggtgacttttcatcctgaaggtgaaggtccatttgtttatgttgggccggtttagggatcccgattatttcagtattaagggctagggatctactacataatggatgtgtaggatttttagcagttgtgattgactccagaagacccgaaatatttgggcctgaggtagtcaaagttgttaaagattttcttgacgtttttcttgaggagttgctgggattacttccacaacgagaaatagactttgtgattaatttggcacttgaagccgaacctgtttctaaagctccatacagaatagctttagcagaactcaaggaggtaaagttacaacattaggggatgctggatattgagtttacccgacccagtgtatcgtcctagggagctccagttttgttcgtgaaaaagaaatatggttcccttagaatgtgtattgattatcgagaactaaataagctgacgattaagaacaagtatccgttgcccagaattgatgatttattcgatcaactttaggggaagactgtattttcaaagattgatctacgatccggttttcactagctcataatttgggaagaagatataccaaagactatgttttgaaccaaatatagacactatgagtttctggtaatgtcatccggattgaaaaatgcacctgcggccttcatggatttcatgaatagagtattgaaggatttcctcgacaaatgcgtcatagtgtttatcgatgacatccttgtgtacccccagtcagaagaggagcatgagcat

SEQ ID NO: 87036 - DNA, 664 bp, Cannabis sativa
atcttgatgttcctgatttcctatttagaacgaatgacccctgaaggtttttatttctggatagtaaatcttgtatggacctcttcaagcagtttatgggggaggactttcatgctctctctctctctctctatatatatatatatatcaggtagtttagataactaattgcttgattttctttctttttatagaaattatgtctaagaagattcaaaaagaagaggttgaattggaagaagaagttttggagaacaagagcgctccaaaattggtgctgaataataatccatgggagatggaccaatatatgaacaaatttaggatttacaataatcttaggaagtacgagatcttgcgagggcttgagagtgtttcaggattgtaatggaataggctttccattcatggagagcagccaagcaagtgcgcggaagggggcttcgtcatctggagctgggcccatgtggagatggtcgcacaccttctgttaaggtgttactttgtcaaattctgcagtagccggaatggcaccttttcagtttatccctcaagtgcatcgccttatatctaggtggtatatcttttgtgctcagcacaaaaaagctgcaccaacatcggaagaaatcttgtacttctacaatattaagtctcagcccatgtg

SEQ ID NO: 87037 - DNA, 956 bp, Cannabis sativa
  modified_base (636)..(645): a, c, t, g, unknown or other
aaattagagaaaaattacaatttttataaacattggatacttatgccgctaaaaataaatattaagtttataccgcttacaaaactttgggtacttatggcgttatttatctttaaatgaataacaaagttgttatggcgttagaggttaacaaagttgtataagcctatgactacaagttttttttatgcgaagccctatgattacggttgtgaaatttttctttttttccttttttgcaaaacaattaattagtaatataaatattgttgaactattttattcaaactttttaattataattatactaaaaaaacctttttgacttattatcaataggattgactgagtatataattttgttgtgaaatttgactcaaatcatttattaatttatttatttgtatttgaaaattataattttttttagttaattattaattgtgtgaaaagaaatatcttggtagtcaagttttgaagtgtttttttggagaaagttttgcaatgttttggtacccaagtttattatttttataaatatgtattttgtgtctgggtgaggtgtgtgtgagaaaaagagtaagttgtgaaaataagagtgaatgtgagaaagtgagtaagaagcaaagggtgtannnnnnnnnnatagtgagtgtatgtaattttaaaattataagtgaatatatctctctttgcaggtttagtgactttaccaaaccaagtaaattttttcttacttcttttctttcttattttgttgcgctagaagtttattatttttcttaataatggcacgtttattatacaatattcagaatcgaaataaattaatggagaaatgtaactagaataaatgaaaaataatcggaatcaatatttgtaatatgttgtttgctaaatttttttagaaatagaatgatagtaatttatcttgtttactttattaggaaacgtaa

SEQ ID NO: 87038 - DNA, 594 bp, Cannabis sativa
attgtgtgtgtgatgagcatggttttgatctgtcacagggccagagtttgaggattctccaacaagtaaaggagacggttgaggatggggtaatgtttgtagtttaggaacaacagatgtcaaagatgttctggccaaacgagtaagcagaggccatgtattgcctttggggaagtctgtcctataacgatcataagaagaagatggcagtttcgaacctttaatttgagggccatatggcagttcaggctcaatattcagatcaagtttctctaaaaatagtggacatttttgatagagatggccaatcattccgcattccatacaatagtcaggcaaccgctcatatcggaactccacccaaaattcatccttaatttttggaagagaaatcattctaccacgcagcaatggtttgttgagattaaggttgacacgaaaacgcagaaaaggacccaaaccctcattaagcgagtcatcatggacagcaagaaactcaccaagaatagacgccaaggccttggccaaagatctcgacttactaagaaaaggcaatcgataggcttgaacccaaaaaggactgtaaatcatgat

SEQ ID NO: 87039 - DNA, 521 bp, Cannabis sativa
  modified_base (41)..(50): a, c, t, g, unknown or other
aaaaaaaataaaaaagaaaaaaattctgattttttaatttnnnnnnnnnnttataattattttttaaaaattaatattacgtggaccactaaaaacttgtcacatgtacacactggacagtccaccgtgcacttaccaaaattttaatttttgtggttaaatgttacaaaccgtaaagttcatttgttttaggcgctaatatccaaaaaaaaaaaaaaaaaatcagtattaaaactactcattttttaatgattagatttacttttggtatgactgttgtaataatatcttttttaccttttattagtgtagactcaaaacttatgcttattttaaaaaaaaaaaatgttgttactcttactcattaatcataatccatccattgaaaacgttaaacaaaacaataattaaaatatgttaaaacttatgatattattgagtttaattaatgtagataaatagtgagtcataacattattttcttcaaattaaattaaaattcaaatcatatatatactaaa

SEQ ID NO: 87040 - DNA, 683 bp, Cannabis sativa
aaaacaaaagaataataaaaaaaaaaatcacccagcttgtggaggacaaaactgagagaaattgaaagctagagagagcacccaagaactgaactagcactaagtttttgagtataactattgctgattaaagcatcaatacaaacatatgagtgaaaaatataaggattgtttgactttataacttaaaaactattttcaatttttaaaagtagaaaataatttttaaaaactaatagaggtatttagccaaattttataaaaattgagttttaaaaaactaaaaaacagaaatatcataatgttattttttattttcaaaaatattttttttgtacatattctttttttacattattgctcacatacccggaccatgctcggactcggaccatagaccttgacctcgaacccggatccagacttaaacctgaatcgtagacccgaacttggacccagccccggctcaaaatctcaaacctagacccagacctggaccctaaccaagacttagacccggagtcagatattggaccccagacccagatctagaccacgaccccgactcgaaccctgtacccagaaccaaacccggaccccagaccccggacctagacccagacgccaagccccgaccctaaccctgatcttgaccccaaccccgaccccgacccgaggctaaa

SEQ ID NO: 87041 - DNA, 1005 bp, Cannabis sativa
gtcaaaatatataggttaattttatttttatcaattacatataaataaggacaatatacaaattcttcttaaaaataaacgtatcatctatcatgctatttaaatataagcccataatttttttctaccactatgtactaataaaacaacatcaaaatattagtataatttgtaaagtcatgtttggtttgatgtaatgaagattgtaatgaaatcaaaattactattataattttcaattttcttttaaaagtgatgtaatgtgataataatataatgatgattacattgtgcaatagtatctttataagattggagaaactatgtaatgtgaattacattacaaatattaaataaagtaaaagtaaaatgaatcaaataccctttctatataagaataaaaattaatgtagtgatatttttgtgaatttgtcacttattctaatatttatttcaacaagaaataaacatcgtaatcattttttattatcattcttatttcattacattactattactattctaccaaattaaacatcacctaagctcgtataattttatacactattgcaactgatattggaagaaaatcgtgaagatcatagataaattaatccttaatagactcgaagcagttcatcatcaccaattatgtttatattggatacaagctgctgtcttcaagtgctaatcatgtaaaatggaccagacaagtatggtattgtaaagcctgtgtttgaaaatttgctaattttaattaaaacttatcttgttatatttacaaacttataggttgggatcctgagtttaaaacaacgactgaaaacacatattttatacatatatagttacatattattttttttacaaacaacatgcaacaacaaaatgtaattcaaaatgtagtatgactgagaccctctaagttgtactgccgcaatatgtataatctttgtcgagctccaatgctcctccaacttagccttacccttacctacacaaggt

SEQ ID NO: 87042 - DNA, 1328 bp, Cannabis sativa
gatagaaatgtgtatggatttaccctctccctctgttattatctataaatgtgtttcttcttccccacaaaaacttgtaaattaaatttcaataagcataactacaaactaaatatataagtctaaattaaatatgagtagttctactcccttaaactttttctctatgtcacacaaagcacaaggactactccagctagtgcttgttgcattccttttgcttttatcatgcaaaacaacaaatgtgagagcatggtattttcaaccaaaaacgcatgtagtgataatcaacggtctggattctgatccaagcgatctaacccttcattgcaagtccaaggacgatgatcttggtacacacgtcgtcccttacaatagctcctacgagatagtattccatcccgatctcctatgcaccacactcttcttctgtaactttcaatggcccaaaagtcagatcgaccatttcttcaacatatatgattgtcaaagagatgacaagaaatgcaaaaaatgcaagcactacatttggaaaataagttccacgggtgcttgtatggaagataataaaaccaaagactttactatttgttatccttggaacaagtaatattgttagatatatttatatagctctaaaatattattcttgatgatgataaattaatcattatctttttaataattattatccgtagtaataataatacgattatcaattccatcttgtgttgttctttaaatattattgggtaaaatcttattggctgtaaaattacatttatgtcttttctttggatctctttcaaatttacccaaatgaaatggtcgtcgaggctatggtacttgacaaaatgaaggaaaccactctctctacgatccaaaaatgaagttctcgatgtcagaggagctgaaatggtgtttaccatagccataactttcaagctcagtagagcctaaagcttgtttactaataaccataccttacatttatttacttactttattaaaattaaaagaaaaaaaaacttgatgaaataagaaatgaaaaaaataaaatacattgtctattaatttttgaaatattaatttttgaaggaatgtgataatgatttttattatttttttattttttaatattaaaatatatagtaacaattttatcctttaaaatatgccttacaagataattaccatatactataatttaactcaacagagttgattatgttttcagataaagtgaacaagataaataattatcatttcattttcaaacaatgtattgtagtaaacaacatattataaatattaattctgattattct

SEQ ID NO: 87043 - DNA, 798 bp, Cannabis sativa
  modified_base (187)..(191): a, c, t, g, unknown or other
cagggtccagggaactggttcaccggctagggaattcggtctaccaatttggtcaggatcataacctttaatttttgtgtttcctcaaaatttagaacattaccgtgttgtttattgatagggttacctttagtttttagtttaggatcacgagaaagtttatccaagttgtttacccatttatgtnnnnntgacatagggtctctgttcagcacgtgaattttccattcaggccaaccggcaagctcgaatctggaaatgaggtaagattagcataaagtatctatatgtatgtgtttatgtatgtaattgtatgctggttatgttgtgataccctaccaacactagtatagttgtgatatggactgcaatggtgtagtgtataatatttaagggtatgttacagtgttaccaacactagtacggaaccagtacgtagtgcatgtggtataatactcagtggtacccgagaacacagttcagccctaccaacactagtacgggagaagtacttcagtgcatgtggtatacaggtcgtacttccgttaagaacgttcttgaccatttgataagccttgtaggtaggcatatggaagcctaaatacaagtcgataatacattgtataatttatgcttatcttactgggtctattaaaaagatttcggagacttggttctctttgccttacgagcttcaaccttagacggaagaggtctttttttacaaccagaagcctctaaaacattagggacattagaaattcccttattgccaatacctttcaaacctattttagg

SEQ ID NO: 87044 - DNA, 1118 bp, Cannabis sativa
  modified_base (42)..(52): a, c, t, g, unknown or other
ttctgatctttattaataagtaactctgattatattgaaatnnnnnnnnnnnagggcacaaaacccaacagattttacatgtgggagttaagaacttgtaacctttgtgaacttcactataaccaaggttaacacattttaaagagtgaaactaaaacttgtgtgcttgataaggccttatgcaaggaaaacaagcatcaccaaacacttttaagaaggcataatcaggtttcttaccatgaacagcctcaaaaggagatttatggtcaagtattggtgttggcaatctgttaattaaataaacagatgtttgaaaagctttccaccaacggcatgtgagcttgtgctaaaagagtgagacccttttcaacaaagtgtctatgttttctctcagctctaccattttgagctgaggtatgaggacatgaatgaaggaaatcaattccatgggctaatgcagtgtcttgtagggcttggtattcacctcctccatctgtcctaaatctttttatttttctttcaaactgagtttcagcaaagattttgaattggagaaaggcatttattgcttgagctttggtttttaatgggtaaatccaagtgaatctagtgcaatcatcaatgaaatgtatgtagaatctataaccattgttagagacaataggagaaggtctccataggtcactatgtattaaatcaagtatattgttggctttgtcatttgaaggtttgaaagggagagcatgtgatttgccaaattgacatgcatcacaaaaatgattcatttcattcttgggaatttcaacttgaaaacaatttaaaacttgacttaatactttgtgtgatggatggcctaacctcctatgccacacatcactcttagaagcacaatacacatttgttttagaccgactgacactagacttggacgtgacaacaacgacagaaaatagttgctccttaggcttattcgactcgatttttcttgagaacaggggaattggctttgtgtttggtgcttgaagttggtagagaccatccttaagcatcccttgaagaagcactttccttgttagcttgtccttcacaacacaacaatcagcataaaactcaatgag

SEQ ID NO: 87045 - DNA, 726 bp, Cannabis sativa
ttaatcataacaatataatataacataatttaatttaataattgtaatctttataaaatagaaagttataaatactagatagagtataatcataccaatggcaatgtcttctattgtcggtatactttcttcttcctcctcatattcacgaacaactataggttgatgtgattggctctaccaatttttcagagatatcaaagcttccacatttgttggattcaatgagctcctaaaaggatctaaaatacgccctccagtggagaaagccgcctcagaagcaacaatagtaactgaaacagctaagacaccacaagcaatttttgacaaggttggatatttggatgaatttagacaccaccatttcagtatatcaaagcggttaggttgaccaacttttataggttcaacatcatctgagaagaaatacttatctaattcatcttttgacacttcaccatattgcttgttcctctcttgcagaaactcaacatgcatgtcattcacaagaaatgaataagaatctaatgagaatgtagtagtagtatcaacactagtagtgtcttcaccttggctcgctagaactaatggttgttgtaattgctcatatccaccatacgcctcaaacaaatttctcaaaattgtttcaatcttgttcaccatcaaattggacgtgattgggtcatgcaatttacggaagcgatggttgagatacttcaacttgta

SEQ ID NO: 87046 - DNA, 1584 bp, Cannabis sativa
cggtctcggcattcctgctgaaccgctcttccgatcgagagagagagagagagattttgggctttggagttgggatcggggcttaaatgtttgtctttccacacttctttcatggctattttcatggctatgggaggattgagtttgaggaaaaaaaaaagtgaagaaaaaggattaggtgtgactggaagtagaagaggaaggagaagaaaaaaaggaaaaaaaaaggaaaaagaaattatatttttaatttttttaattttaattatttttttaaaattattatttagaccaataatcactcaatacgtgtctgtcaaatttaagattaacgaacttacaaaatatgtaaccttcagaactattgctgttatttttcgaagttggagattaatctgcattataaactttttaagaacttttatcgcaaatttccctaactaaaaagtacatcctgtccaaggtagatttacttgtacgaaaaccccccatttaacaaaataaataaataataaaataaaataaaattgaaacagattttaaaaccatttttccatcttaatatcacaagggaaagaaaagaactagtataaatgtaacgggttaaggttacctaatcacaagaaagttttgtacatatcaagtaaatttgtcaagacaaggcaaaacatgataattacagaaaataaagtaagaacatgaagactttcaaaaacagaagatgtgatcagacagcatgccttaaaaggaatatatttacttataaacactgctctttctttcttctcctccaagacattggctccatattatagtcctagctaaagattgcgtaattatcattccgtctggacttatcggcctgaaaaagcaatacaaacacatcaaacaagcctcaagaatcaagatacttataaattgcacaaatacaatgacaaaacacaacgaagtgtcattcgttagctttacatgaaaatttctgacttagtttacaatccataaatttctacctgttttgtttcattttgtactattagcttggtttaaatcagaaacaataaagcagttatagatagtagctgctaatcatttatctatatagcacttaaaaaagcatgtctagcagtatctgtgaccctgtaaaaacaagcaaaatcacacattggatgatgaggaaatacccggtgaatgatcttttcaaatgcatcaggtccattctcttcaatgtatttctcggcagcggtgagaatatcatctggtttactgaagacgtccttctttcgtgggacataccagatgttaatagtgtgagggttaacaaagaaaggtctaacaaaatgttcataaacatatgctgccccactgaagtacggtatgaccaaccaacaggtgacaataagcttagcgtatgaccagatcggtatcctgccataaacaacaaaaaagtttaaatagaatcaaaacccagcaaagatgaactcttttgcaaaaatgttgatactacttatggctatgaggccattcacgagcacagacaaatacgaaataatacaaaatttacaaatccatttaggcactcaactt

SEQ ID NO: 87047 - DNA, 930 bp, Cannabis sativa
ttttactgattttgaaaaatactatatttttttctaaataagggcccaaaataattttttttctatggcccactaaaagtcagggccgaccctgctctctattaataaaaacttgttaaatgagatgaatatgatgatttttcatagaatttgagctttaacttgttattttttgtttttataagagcttaagaaagaaaaaatcttgaatctattaccatcttcctttgtccttacctatactataattagattataagttcagagggactgtaatggagaattttgtgttgttttgtgaaacataaagatattattgagaaacattcatacaaaatgttatttttgcaacaacgtaaaaaagattgaaaaaaagaagagaaactttggcaatattgtgtcgtaaattgaaaaaaagggaaagttgttggaaagttattaaaaaaaatgttctctagtttttatagaaaaaggagatattgggatgatttataaaaattgtagggtgatattaatagagaagtttatgatataggtgagccgaaatgatatttttcatctacccttacctaagtctaatgttaaaacccatttaagtccttttgatttaaagcacacgtcgttgatattagtggataaggttgaataatgtaagcttattaataatcaatttgtggatatgttggattgactttgagcatgtatattaatttttaataatttttgtcatttgtgagttatatttttctttccaaagttgagtgctaaagttagtattgggagcaattagaatgaaaatatagtattataacaattgaatcttgtgagtagcggtgatgtggtgtgaaatgaagtaaggcttgctatgtgttcatttgtttttagtttagtgtcgatctttactcgagggcaagtaaaggttaagtttgg

SEQ ID NO: 87048 - DNA, 951 bp, Cannabis sativa
aaaaataataataaataagaaaattaactctaaaaataacataaataataggctaaaaatatgctaacaaattttcccaaactaaatccttactcggccttgagtaagactaacaactaaaaacaacacaacctaaataaaataagtcaatccactgaaacacaagaaattttcaagtaagataaataacatggttatgaacaaaaatttcaccaataataattcacaatttcagttcaatcacacctttgattcactacaatctattcagttcatgaaaacataattagcacttaactaacaattgaaacaattcatgcatgccaattacaaccatcaatccactatcctaaaaatattccatatgcttgctatacttactattctccactaatataaataaatgcacaaccaagaatcaaaaggtttttctaggctggtaatgttaggcttaggtacaggtagttaaaatggtcatttaggcttgccaatactataagcttttccaatcatgtcactcaaaataaatttttctacacaatcccaataccccaatttttttctaattatatgagagattttttttctcaacaatattgttacaacttattttttctttttttttttcgaatttgacacttattgtcagatttttttcttttttttttttaagttgctaccaatcaattttttcacattctctcaattttcatactttttcccatacatataacaaactttccatccaaattctcccaaacgaaagatccacttatggtataattagggttaatttttttttttttttgggatattcatggtttatcttgtttagactcaaaatgtgtagaaacaaagaataggttaaagctcaaaaagggtaataaggataaaattacagggatgaaaggcacaattgatccaaagaattcctaaatcactttcctagtc

SEQ ID NO: 87049 - DNA, 682 bp, Cannabis sativa
gtgtcggtaatcctaagtaacaattctgggatttaccataaaatagggttaactcctgattccacatccataaaatatatacttggcattgaaaacacaaatattcagatagagctcaaaatgagctttccaacggtataaagaactcccaaaacggactccggatcacaaagttatagctattcgaaatttgcattaggatctgcccagaaagaaaagggcgggtcgcggcatgcaaaagccatgctgcggcacctgggttcaaaacccagaagattcagcaaaaacttcgaatttcagccgcaaaaccaccttcaaatcaacccaaatcaacacagaacttaaattaatcttctacaagctagcaagcacaaaggtaggcattaaaatacataattctcatgcttaaatctagcagaaacacaacacaaatttcaaatttaaacaacataacattcaaagctccaacttgagaaaacccatctataactcaaactcaagaacatagaacttgcaactagatacacccaaaaccagcaactaaaattagggccaaagatccaatttaatctctaacaataaccctaaggagagatgtgaaagtccccacatgagcaagttcacacaacaaaatttcaaacatctagcaccattatcactcatgaaatcaagaatattcaaa

SEQ ID NO: 87050 - DNA, 884 bp, Cannabis sativa
aatagccataaatgatagttaatggtagcagctataacgctgttgaaatatatataaaaaaaaatctctcaatttagtatgatctactataaaatgttaaaagtttaatataagatattgcagtctattaatattaaggtaaacactctaataatttaataattaacatacatttttttttttatatataatcaatactaaatagattttaataacctatgtaatagaactaatattaataaatatattaataagttttaaaattttaacatcattgtcatgtagtttagttgattttgatacttacgattataaatttcttttaaaaaatttataatttttataacacaatagtatattttatattgcactcatttggtacaaataaaaaataatgaatattatattacactcactctacatgtcaaatattaaaaattgaaaaaaaaaaaaaatcctttaagttttttaacaaataagaaaataattttttttttattttaaatttttaattttacttcaatatataatactattacatttataaaataataaaaaattattccattttttatttagaaataattgaaaaataagaaaagaatgatttataatattttacttagtaaaaatattagcaactacttaattaatatatgaatttctaaattaataaaataattataaattaaattttattttttaatgattataacaatcaaatgagacgcaatatttttataacaatctcacgtgtgctcaatcaactttatatgatacttatcattttagttactacaaaacagtaagacaaataaattatggaaataattagtcacatgaattatgattccctttttatcgttataatttaaggtagaaat

SEQ ID NO: 87051 - DNA, 2855 bp, Cannabis sativa
tcttgaagtgacaggggcaaaattggtacaatgtttaaaaaaagaggtaaaagtgataagactttcaaaaagaaggtaaaaataaaagaagacaatataaaaaaaagtatagagtgtaatttcctctatttgtaattacctcattatattgggcctgtaattcttttggaccactcatttaaaaaccaacttgcgggtcggctttgttaatgggcttttgaggcccagtatccttgtaattgtccatattgggcttgctattcattaggcccaattacataaggcactacatgatcaagataacaacttttttcaatttttataacccaagtatttcatcgatcgaagccgttagaaatatcaaaaaaatcagtctaaaatatttctaagattttttttaaaaaaagatatcaatggtagaaaatcgcaactaaaattttaaaaatatatattattcataaattgaggttattttctctatatatctatctgtatctattgatataataatactgcatacactttttgatattctcgttctatgttttccaagatgttgagagcaattcttaatttcttttcttcttcctctaaaacatacatacatggttagtttgttaattttgtttaatcatcatctttaacaatagtcatttttcacaataataataataatgttttgtttttgtttttgttgatcactacagatgatatacaagaagagatcttattaagattaccacacgaatctttgataacattcaaacgtgtgtgtaaattatggtacaacatcattacgagcaaatcatttataagtaagcactttcaatatcactccaaaaccacttcacacaatactacttttgccctaatttttacagatattatgtccatgccaagattacttgagcctaaacttgtctccatatcttttgatggtgaacatttaaacatattttcaaatattacgaaaattttcacaaatgaaaaatattatactacactcccattcgcgcttcattgtaatgggatcgtttgtattccctatcttttacttgaagaaagtactaaaaacatctttttcttcaatccaacactaagacaatccaagataatcaagggactagttggcatatcaaatgaaataggatgtggatttgggtacgatcgaagaagagatgtttacaagtatatttctattacaatacttaaaaatacttttcattatacagttcatatccttactcttagtaatagtacttggaaaacgattaatgttgaggcagatgataaaaatatgtggataggaaaatattgttatggtaatagtgtgcatttaaactcaattatttattgggtcaaatctaaatgtgttgttacatttgatctgtgtgatgagaaatttgatatgataccattttcaaatgaaattatggagcataattattttccattcgcaaataaaaaactagttgtgtggaaagatgaatcggttgtgttgtttgttgggggagttacaagtgtgcagatgtgggtattggtagtaagtaattggagttggagaaagcatcttataatcgatgcgacaccgtttaatcggttaaggcccttggagttttggagtcatgaagagttgctcatgttgcccgaagacaaacctataatttcatataatattcgaaccaacaccattaggaagttgaaaattcatccatgcttgcattttttgaatttgttgtgtaaaaaatctttagtttcggtattcaataattagatgtgtttgtattttcattattatctacttaatttagttgaactaatctaatttcaataaataatgttatttcaattttattcatatgcaatacttgtggtatatcattatatattatgtagttacataattaatgggtgaatttatacttatttcattgttactctttcttaattcttaaaccttgaactattattattttttagaacatataagtaaatatttttgagaacaataaagttgtttcatgagatgagaagtatttttgttggcttgagacatttaattataatgtaaattgataagaaaaaggatactgataaagagatatttaaattagcgttttataagcagtacgatatgtttataagagcagtttcaatattaatgtttatgtgttgcttgtcggaaataaacctacttcaaatggtggcctcccaccatagtagtcttgatttattttaagtaagggacaatagtgatgattttagagttgcttagtattaaatacgacacacgacacgaaaatacaaatttcttatcacgaaaatatgatacgtaagcacaaaataaaacacgaattaaaattcataaaattatttttatttaataatttatcactatttcgtataaaagtactttatttatatattttaaaactatatatatttttgaaattaaattattttaatatatgtagtatacagtttttaacatactctttgtcaagcgaaggttctaaattacgttggcacattttataaatcagcgacaatagtttacaattttatgtgaaaatttattaatggattaccattatggtgatataatgttgattattaaacatgtaattgtaattgtaattatagtttattttcggtgattttgaagctaattttaattaaaacaatttatttgtgctttaaaattagaaactaatttgataagtacaaaaatggcaattgtacacaacagtgtttagggactatttgataaatatgggtcaactatttcataaaaaaaaataagaggaaattacactctttaccctttttatattgtcctctttcatttttacctt

SEQ ID NO: 87052 - DNA, 591 bp, Cannabis sativa
acaagggtgtgagtgtcgaacatgacagacaaggcttggacccatgtgaaatctcgggtccttccttgaggccttgttccgatgaagtgggcatttatttgaaggttttcatcggagactatggcgaaatttccaccctttgcgccgtggaagtagaacattactccatcaccgccaacaaaacgtgggtcgtagcaaagggaaccatagccattacagttgggtcttctaactgcaaaaatcacaacaaatttaaaaaaaaaaaaaaaaatcatttttttaagatgtcacaaatgcatattgagttctaatcacatgtctataaataaatattttataaaatttaatattaaattttatttaatttaattaaataaataatataagaaactaattaatggaaaataatataaaacttgaatgtgtgttttttaaatatggagagtgatttgtgaagttggtattttctcatcaactaccaataataattaattctatcaaagaagaaaagcattaattgtgactctcctctcatgagaaggttgtgttgagttggaaattatttaaaatagttttaacatgtaatgtact

SEQ ID NO: 87053 - DNA, 627 bp, Cannabis sativa
ataaaggtacttgggaaagaatatttcttagtcaagattaataaaataactcagtaaagaattatacatatgggaattgtattcattcatctcaatcttagggacaatgatcaatatatacatggcaatggcattggtattgtttttgcctcacaaaaattgtaacaatcatttttattagagattgtcaataatcattgtgtatgagtgtgtgtgtgcaaatcattaggcattgaaacgagaaataagatcgatgaaggcattttctgtgcaaggaatggtaagagctcccattggatgatcgaatccgaattcttcttcagctttactcaacaacatttggaatgatggttggttcaaaaatgataaagggatcacaattttatttgggagtgtcattttattcattgcaaccattaaaatgccaacatatcattgttcttataatttatatttttctttcaaaggttagacacaggctaaataaatactgagatctgctgttaatactaacattattagcgacaaatttgatccgccgctaataaatctgccgcaaattgataaaattgttgcagtgtatatgcattcccatataaaattgatcttaattttttcaaacgaaaa

SEQ ID NO: 87054 - DNA, 921 bp, Cannabis sativa
ttgatctgaaagacgatatccagctgcagagagggattcaaccatatttttcattttcaagatatatttatccacgcttagagaacctttcttggtggtttggatttagagtcaaagttgaagctccctgactttggactgagtagtagacagagtagcgaatgtatgccagagttgagcagcagattgacagtgaaggacatacccaatcatggcttcggatagggaattcatgagccacgacatgattgaagcatcacatcgattccagtattcaaaggctagatttggaacttgagtggcaggattgatgacaagtggtcgaggtgtgataccaagaagaataccttcgaggccatgggcacggattgaggggagaataagggatctccagtgggcataattgtgacgatcgagatgaatgttgagcagaagcaaattgttcggtatctgaaattgtagtggttgattgtcatttggtggagcttgtggttgacgatgagttggagtgtgattatgagtaggattttcagaattgttcaccatcgatgataccatgttgatgtttggaaggaaagaatttcatagaaagagaaaagaaaataaatcaagctcaatcgcaactgacatgagagatttgcatttattggaagagattacaaacaatatacaagagttagttagaaaaactaaccaaagaagttgacataacaacttttacaaaagattagttaaaacagaaaacaattaatttaactaactctctaattctaagacaaggcagagaaagatctaacaactattcttaactatgcatggttctatctttctgacaaaattacattcaaaattatatgcagagaccgtatataataaaactagtatgataagttaaataaaaccaaaaaaaaaaaaattaaa

SEQ ID NO: 87055 - DNA, 1046 bp, Cannabis sativa
ttttatatgagcaaatcatgcatccattacggaccattacagtactatctatatctaccctattatttaaattcttatgtattttttattttacattagttttctattttttggaatattttaaattagttcatttaccatctcaatattaaaataatatatagatttgttaataatattaaaatattatattttctaagtttttttttatatcaatagaattaaagaagagcaaggattaatttttattcaaaaaaaaaaaaaaatctcaaaggatgagcaaaatagtctttaaatatagataaaacacaataacaatatgttaaaaacgtaaaatatagaattggatggagtgttcttttgacctttttcttcttttttttttattatatatatatattttgaatgtttatatattccacataatctattactattagagttagttagggaattagttcagtttttcggttatttttcgttttctgttattttttcttctcatggcttttgtcctataaatacatgtatctctccctcctgtacagaacatatattgcaattcaataaagctttcttttctttcattgctctgttcctaatgtggtatcagatgacataaactaaagctccaagaagtcaagttccagcttcaagattcaagctcttccctccacaatcatggtgcgcaaacaggccacgagttaagctaccacttttgatgatcctaccagagtcgaagctcccatagctcctccaccatcaacaaattcccctaaaaatccatcttgaacaaatctcactcctccccctgctgttcattgtcccaatctagtcgacaaagtagcctacgagggtgttcgatccccctactatctcagcacagctgaccatcctggttaagctcttgttactccggttctctctgacaaaaatttccaacaatggaaacaagatttcaagcttcccattggaacacgaaacaagaccctctttctttaaggtacgcttcctaaaccccctgctaatgatccccttcttgattc

SEQ ID NO: 87056 - DNA, 524 bp, Cannabis sativa
aatatttgaaaagcaactccatctctccattacactatgttttgtaggaaagatttttgagtgaaggagagggatggaaggaaagagttggaaatagagaataaatcacgtgtttggttgggaaaaagaagaagagagatgaaagatagaaaaatacatttttcctccaaatgcataaaatttaatcgttccaaaagtggaaggaaagtagaaaataacaaaataagtatgctagtaaacttgtaattttgatgcccataatgtggttaattgagcttttattcacaagttgtatggtactattccggttgctttggttccggtagactttttatgtaatgaccgagaggtctagcttgtttaattaatggtccgaacacgtttattttcaacaaaaaaattcctaaatcaccctcataacaaataaataatcatcttttcatccttctaattttacttttaatactaaacaacacgaaggatatactctccatcttttttaaactctccctcctttcctaatt

SEQ ID NO: 87057 - DNA, 2670 bp, Cannabis sativa
cagtcagcccatcttcatcacgttctcttccttccagcactgaggttggagctaactgttccggagtaaggcctgagaaacgtggccgagacctctccacggcagaaataatttttgacgcttcacccatggtcatgatcggcctgttcgttggagattctggccgccttttgttgaaacgaaaactatctcgaggaggtgatgaaggagcacacaaccaggatccgaacctcccactatcaaattgtggattatctccggcaaaatctttgagaggacaatctaaagccttgtggccaatgatgccacagtcatagcaaaaatcaggtaggtggtcatattgaaaaatgagagaaacctcattaccttgatcatcaatagccaccctcaaaccccttttaagaggctctataatattctaccctcactttcatggtaccattaacaatcttaatatcctctaacttaccaattctctccccccattctctagcaaatagttcagtcatacaagccaaaggcacattattaatagagatccaaaaagaagtaaaatcaaaattcatcttagaaatttcccccaaccccattggtttaacaaagcagattaattgtttatcaatagtccaaggaccaccaccaaaaactctctgcctatcctcacgacagccaaaaaagaaacgaaagatattcttggaactcaattcttcaacctggaacctatgattaattttccaaacccctttcattgctctctcaatcccatctttattggctggtctagggccaataactttcccaatcaaacataaatccaaccttttcttaccttcttcaaccccggctttattcagatgaagaacaggcccatctccatcatcaagaatcaagacttcagcaagcctattcaccaattccagatccatgttcctaacaatgagaatcaaatcgcaaaccagatacacaatgatgaaaagcacgaaatcaacccttcccatgaagggactttttcttcccaggaggtttcagagaaccgaaactaacgggatacttacgggtaaaagttttaatttcggttttcttatgaaaatcgagataaaagggtatctttttatctccatttttatgaaagaattaggattaaatgtacatttttattccagattttataaaaaaaaattatcctactgacatatattccgatctctattttaacgaaaacgtgaataaaatgggacaaacttatttttgtagtaatgaaaaataaaataaaaatataaaaaaacgaaagaaagtagttactgtcaaatgaatgataaattcgcataaaacacgttcacaataaaaatatatgttttataaagtggttttgagagatacagttcaccctccctctcaacagaatgcatgtgtactccattaattgttaataataattttaaaatataaaaaaattaaataagagcaattattggagagtttctttcatcactccactaccccattcattattattcaattacgttctactgtatctgtatgcaccatctccagacctacaactgtatatgaagtgttactacttattaatatcttttgtgtttgctacactgttttttctgtctttttttgtgctaaacttgtttgatagactgttgcattaacttttgataaggggtactttgtctaatatatagaatacaatatactttataaactatatatataaagtaccttgaacctcagtacctccactgaagaaaaacttgctcttgagtatcttcacaagattttctagctacaggcccaaagcttaaggaaacccatctttagaatttgattaaaaacaaaattctgtcctcttataaaatccatggctttttcctgcaccaactcctcaactcgttttctcagtcaccttgtggccaagacccccacaagtgttaatattgagagtaggctttttgggatttcatgcagtggaagaaacttgaagcagaatgctgtgtgtggtgtagtccagaccatatttgatgtgagtttggaaagtcatgtaacaaaagttacaaagccaaaggtattagatgggagtcgtatggagcttgatgttgtttcagagaaggagttgagagagaagggttttctgggtttgaggaagactaagttggtttgtactattggacctgctagttgttctttggaggagttggagaatttggcattgggaggaatgaacattgctaggctcaatatgtgtcataacaccagagagtggcgccatgaagtcattagaaatatcaagtggctgaatgaggaaaaggggttctgtgtttcgatcatgattgacactgaaggctttcagattcatgtagttgaccatggacctccttcgtctgttaaagcagaggtaaacgaaagtaataattagaaaaccattttatgtttgctaataatgatatgtaatactcttttccgaatcaccaggaagattcactctggctttttactgctgaaaagttcaatgggtctcgtccatttacagttcaaacaaactatgaaggtttctctgaaggtagccattaatgcctccaacaaatcaagaaattcatacatacatacatatgatgatatgaatataaatatatagttatgcttttttttttttttttt

SEQ ID NO: 87058 - DNA, 1699 bp, Cannabis sativa
  modified_base (991)..(1003): a, c, t, g, unknown or other
  modified_base (1667)..(1668): a, c, t, g, unknown or other
attgaaaaattattactaagatggaaataatttatttattttcatatccatctaagtataactttataaatattaaattaaatcttctagagttttatggggtgaagcacttatgatcgcaacttatattttaaatcgtgttccaagtaaatcagttcccaaaacccctttgagttgtggactgggagaaagctagtctgaatcatcttcgtgtatagggttgtctaactaaaataaggaaaagttcgctattatttcattggttatccaatgcactcaaaaggctgtcacttttactatcctactcgtggtacgcaaattattgaatctcagactgctaaatttctaaaatttgatgttgctgaaaatattccttcaacatctcttgaaatgggggagtcatctaagggaaatattaattcctatgtatttttcaagagatgataataatagcagtcttattcttactctagttgataacgctcccattgctaatgaatatattactcgtaatatctaagatgacgagggtcttattatattgatgaggaacctattattgaagaaggttttattgttaatgagggtcctgttatcgaagaaattcaatcgtggaatatgtcattcaaaatgatgatcaacaaatagaggttattccagaagtacctcctatatggagatttcaaagacaaaagatgttaataaagtgtgatgataattttgtttactttggagaaggtgaatgtgatcttggtcattttgaggatcctctcacttatagtgaagcacttaatagtccacattcttcaaagtagataaaggctatggatgttaaaaactaattttctgaatggaaattgagtgagcaagtctatatgtctcaacttgaaggcttcgaggaaaatagaaatgacaatttggtttgcaaattgaaatgatccatttatggtctcaaacgtgcaacttaccagtggtacttgaagtttgatannnnnnnnnnnnngtttagtttcatcgagaacaagtttgaccagtgtatctatatgaagatcagtgggagtcatcatatttttcttgttccttatgtagacgacattttacttgccagcaatgatttgtcattataaatgagaccaaaaaaaatttatgtctacaattttttatatgaaggatctaggagaggcatcttttgttttggtgattgagattcaccgtgacaggaataaaagttcttggtttatctcaagaaagcttacattaatcgtgtactcaaaaggttcaacataaaattttgtaagcctagttttgttcctattctgaaagggacaaatttactaagcaacattatcccaagaacgacttaaaaagggaagcaatgaagaatatcccatatgcaagtatagtagggagtttgatgtatgcttagatttacactagacctgacattgctttcatggtcgatattcttgggagatatttatctgatcctagccatgatcattgggttgcagccaagaaatttttgagatatgtgcaaagaacgaagagttgtatgcttgtgtataagcatgtcgacaattttaaaactgttagttatttacattcagatttggtggtagtgtagatgatttaaagtcaacttctagctatattttcacttttgttgnngctgctatttcttgaaaaagtgttaaataga

SEQ ID NO: 87059 - DNA, 1176 bp, Cannabis sativa
  modified_base (295)..(303): a, c, t, g, unknown or other
  modified_base (619)..(619): a, c, t, g, unknown or other
cttaaattagaataattttcaaagtatattttattttattctaataattatttttcatataaatttcgaaatacaattagttcaaatgtagatattttgaaatttttcattttaaaaattagattaaagttgaaaattaattttagattaacttaaatcaagtaatattttcattaatgattagttaaataaatagactaaaatatacaatattttaattagaaaattaataattagtttgtgaaatatctagatagttatgttctgagtagatttttggtatttttctagatannnnnnnnnaaatagaaaattattatttaagttgattttgtttaagacacttaaatatttgatttttttcttaatagatttaattaaataagaaaattatatttatgttgaaattaatttatttaattaattttatatcaacataaattagaataatttttcctgatttattttattttatttttttaataaaattttttgaaaaattgtatttatttttaaatacattgaacttcgaatttagccatacatatatttatagaaaattagatttaagttaaaaattattatttaattaaatttggaccaacttaaattaagtaantttcataatatttattgaaaattaatacaaaggatgtaaaataaatttttattttcaaatctatccaagtatgtatataattttataaaatttgaattaaaatttatatttagagttatctaaattagtaattttaattaaataaatatattaatattaaaatatatatcaaatgaaaatacaattctttaaaataatgagcttaagtttaaggatattcaatctccattgttagttctacatagttcttgttttaatgagattcatctctaatagatgttcattcattaacaatttaacaccgtagaatctggaaagataagtattattgtaagtcttttattcttagtcatgatcacccaaatagtaactgctaagagtagggattttatgccatcaataaaacttattttaatttaatcagatttactaattaataagagattagtaatcattttatgttgaatggctgacataatttctttcatgattatatatttaatgtataaattctattaaatctagaacatatggttattcatgattatagtattgtc

SEQ ID NO: 87060 - DNA, 1063 bp, Cannabis sativa
ccacaataatggatgattaactttattaaaaatcaagagaacaatacaactaaatcaccaaaggagtcttgctcttattacaaatgactaacttataaccaagtttccattgatgtgtaagaggagtggaatcagtatgcactcccccaccactgcgaccaagtttccattgatgtaggagtggaataagtttatggccaacattgacatcttctaatggtaatgtactggtttctctttgactttggtcaaacatttcttggtcacttagtctttctttaccattgtcactctctaatgcatcttcgaattgttcaatcttttcatcatattagtaccaaaatcttcatcttcatcagccattttagtccttgtttgtgggcatgttttcttgttatgtttcgatttcttgtaaattgtgcatttccttttgttcacagccttggaaccctgcatttttgctgttccttttgtctttgaaatgtgtgggtcttctacaattatatcattttgcttaattttttcttcctctttgcctctcttattttctaccttatcatatttttgcaagctaatactcattctctccaacaattgtaaagtttcatggtaagcttcatgtgttttagccccaatgtatgcaacttcatccattttcgtagttatcctaccatatcgagcttgcacttctgttgacgcattctcacattattagaatcattgatgagattgttttaaggattatattgattaacagtgtaagtgcattggttatagataactttcaatattgtacactatttttatacatgttaggcctgaggactatgataattttctaaaatgtatgtaatattatagaacacactatgatatgatgtaatggtaaaataacttagtttattaagattacaaaaacatcacttataggataaatagatggtacttttctggcttttccttacaaaaaaaaaggcttcattagatcaaaatattgtcaacttagagctatggatggacaatttaactattaagttgtgccttctttcaaaaaaaaaaaaaa

SEQ ID NO: 87061 - DNA, 2252 bp, Cannabis sativa
  modified_base (343)..(350): a, c, t, g, unknown or other
actgaagtaaagtagtgacagacagagaagaagaaaggaaatgaaatgaaatggaaaagaaagaagccaaagccttcccacactactactatccttttcattatttatttatttatttttttttttttgctgaaacattatttatttttcttgcaatgaacacttattattttatagggtaaatactattttgcactttgtgttttacgaaagttattaattagaatctttgttttgataaataacaaaatgaattttctgttttgttaaatggtaaaaataggaccctcaattttcaataattttatttttttaatataatcaactttaagacaatttctannnnnnnnagatacagaaaatgtaactagttttgtcataacatttttagaacagattattattattaagttttattttgagaaaaaatcagttcatggtcctatttgtacaattttagaaaatataaggtccattttatcatttaataacacagagagtctaattggtaacttttataaaatacagagtctaaaatagtatttaccctattttatataatttaatactaaaaaataataaaaataattaaatatttaattttatataatttaatttaatataattattataaaatattactaatcatttacaatgcactacttcatgaacaagtgagagagccaacaacattttttagtggagcaaaaaaagattattaaaaaagtattgataaaaaaaataatttttatagacattaaaataaaaatatgtgaatataaaaataaaaattgtaaacttaattgggataaaaatataattatgtaagataaaaaatagaattatattggattccttcctaccaaatgcaatcttactaataggtatgtctcctttttcaattaaaaacaactcattcatcatactttatggggttgttcttcgctttctttttgctggaagctatgtgataactgatgatcaaataggtgatcctttgatgatatgtgttgttttccttgagtccattaatctgctttcaatgcatcaaattgaattgatcatcgattcaggcgaaataaactagtgcataacaatattctacttttttttttttttagtataacgtaatggtatttttacaatcaattaatagcttgtagctttaaggtcttgggttatctctcccttttctcatccctccctcgccactaagctagccttagtggcttgcataacaatattctatttcctcttgatttggttgttactgttaggattttatgctctaaataaattcaatttcattataatcttatttactttcaataaagatcaaaaatcatattttgatattgttagatgctttgttcacatattttatatgtgattgtatgcttaatatataagttctatcacatcttgaacatagagttattcacaattatagtgattttgtcacagtgaaaagtaattgtaattatatatttcaatataaactctcacgatttattagtgcattgaatttatattgatgtgataatcatcgataagatttacttacacttagataagtggaatgtcttttccaagacattagtaaagtaaactagcatcggatgtatcggctatatagtggactggatcgatattgacagtagaaaatacatcataaacttatcattatatcttttctaagttaatatcacttagttgatcatagatcatttgatcttaatactgaaatagttaagctctaacttaaatgtattgtgcaagttctttaacttgttcgttacaacttacatgtaggctaatacttacatcttgagaactcagtagtgcaattaagtgagagttttaatcatagatatggacatctatagcttctataactacttagaagtgaaacgatggtaccttagagcttgacttaaagcgataaatgatagagcactcatttcgataattatattagtttctcgaaatatcatttagaagtatctaagtgttttaaggataaaatacattaaaagataaaacggtaattttgtccctactcaacgcaaaccgtctatagaatatcaatgattgttgtgattgaaataatagataatttatagtgtatctatatttggtatatagagcgtctatgtaattaggagtgcagttttgaatttatagttgaattaggaagagttaataaattaagaaatttactcgataaatgcttattaggagcttggtcacat

SEQ ID NO: 87062 - DNA, 629 bp, Cannabis sativa
  modified_base (526)..(526): a, c, t, g, unknown or other
tttaaattagtaatagagtttgttctattataattttgtttttatttacatatgtatatatatatatggagatacataaatgttggggagccatagccacccttgccatggttgtggctccacccctgactgcaaccacaccagtacaataccacaatcaccacaaccacaccactacaataccactacggccatcgtatttattagattccaatcaaccacaaaactaattgaaatcaaaacatctcagaatttgatccaaatccacaaaacaaaaataaataaaaaaaaataatctcaaatccagaacaaaactaaagaaaataccaaaataagaaaatcaataaacgaaaaaaaaaaatgaaatagaagagaaattattaattctatttttgtcatatttaatgtgacaaaaatattttattatttactgtttaaattcagttggagtaattacattggtttccatattttgtatttgacttttatacagtattaatcaaatttatttttggaaggaaagttntctagctttcctatttatggaaaataaggtaaaaaaggtaagtttggttgctcaattttttttctatttatccagctgtgatattctgatcttgtgtgagttt

SEQ ID NO: 87063 - DNA, 842 bp, Cannabis sativa
caacaaccaagtgatctcacaagtggcatgagccatagcccggtattctgcttcagcgaaagaacgagaaatagtgaactgcttttttgatttccaagaaataagagatctgccaagaaagacacagtaacccgaaatagaccttctagtgtcactgcaagaggcccaatcagcatctaaatttttttttagatgaaagtgtatgtttgacatatcagtttcaacaaaagcagataggttatttgaagatgatgagtaaaagaatagtcattgactagaggtacccttgagatattgtaatattctgtgagcagtagtgaggtggggaaccctcggattggataggaattgacttagcttgtttacggcaaaagagatatcaggccgtataatagttaagtaaagaaatttaccaatgaggttgcggtagattttgggattgtctaatggttttccaacatcagatgagagccgaatgttggattccattggggtgggagcagtagaagctcctaaaaaacctgtgtcagttaaaagttgaagggtaaaaggtcgttgggagacagatattccggaggaagaacgaccaatctcgaaacccaagaaaaaacgtaaaggacccaggtctttaagttgaaacacagagttaagttgctgtttaaaatctataacagcatcatcattattagaggtaatcacaatgtcatcaacatatattaatagggcgagaaaaatgcctttattatttttgacgaacaatgtatgatctgaaagagactgggtgaaaccagtggagagaagataatggctgagttttgtgtaccattgtctagaggcttgtt

SEQ ID NO: 87064 - DNA, 778 bp, Cannabis sativa
  modified_base (167)..(186): a, c, t, g, unknown or other
  modified_base (683)..(711): a, c, t, g, unknown or other
ggaaaatgtggatggaaggatatggccattaatttatatatatatagagggatctgtccatactaagtccaaaaatgtcaaaaccaagtcaaagctagctagggttgcccaacaatctctttctttttcagttcattttccgatacataaaatatatatatatatannnnnnnnnnnnnnnnnnnntgtgtgtgtgtgtgtgaaagtggggttcatgcggttaactcatagggaagctcgaagaaaaaaaattaaaaaagaataagacaagcgtttaaaatataaagaaattagaaatgtttgtagcatatttgattaaaagttgaaaaatgagtggttctttttaggggttgggtcttacaaacttcaaagcagtgtatagaaaaaaggcttgatcatcgcgtggaatggaagatacagtgttcagcgcctgtctgccgccatgcatgcaacgaggagagtttattttctttattttttatggtaggcatcgttggccgctaacacaaaccaattgggtcttgtacatattttatattttatattttatagtggagattttaatggttacaaataatcactatatttacatttaattttaacaataaattattattaaactagtaaatatctcgcggggaagtgcggatatataaattatatataaaaaataaattgtgtannnnnnnnnnnnnnnnnnnnnnnnnnnnnttatattaaaattttaactttattattaaaaaaattttgacataaatacttaacatattaaatttat

SEQ ID NO: 87065 - DNA, 684 bp, Cannabis sativa
  modified_base (656)..(658): a, c, t, g, unknown or other
ctttccatcatttccatctatgtttttacaatgaattctatctataaagcaaaaaaccactctttatctacacttgagagtttctttgggaacaggaattggacccgtgtctttacattccgtttcacctcctcaactaatcgattggtgtctatctttgcaccctgccatataacagaattcctcattttccaggcacaataaaccatagcagcagtagcaacacagtatacatccttcttaaattttgaaatttttgctctacctatccatttgacaagttgttgtacattagaggctagagcttttcatcgcagccactcctttatctccttcaagcagtgaccggtttccctacttgaaaagaaaagatgctgaatgttctcagcttgttcttcacataggctacacttctcctgcaccatgatacccattttgatcaatcgttccttagtcttcagcttgtttaacatcacgagccagagagttatactgtgtttaggtgtgttcattcgggaccagacctctttactccaatgggtagtcggttttggagtattgaacattttataaccagccttgataacatatctatgcctctgaaattcagtactatcatgtaaagaaagaatttgtaacgaataagatgatagaannnttatggaatcaagaaaaaaaatatct

SEQ ID NO: 87066 - DNA, 867 bp, Cannabis sativa
gatcaagagctacttgtgcagaagtaagcacgtcattaacaaatgattgtttctttttccaaacaaccttgttcctagccttccagattgcccaactatacatggcaataaggcaaatcatatcatcttcagcttgcttaaagatggtctccaaccaatcaccgaaagatccgcgaggatcaaaaactactggagttgcacattggcttcagcaatcaaatgcaaacggtcaagagatgaggacatggctgatggtttcacgttgtagattacaaacagggcaagtgactgaaagatcgacatgcttactcactagttggacacgagttggtaatgtacctgtaatagctctccagaaaaagttttcgacttttgggggaaccttcaattgccatagttgtcgccagaagtttaagttttcaaccatctcttcggttcgcttttgttgttggagcatgttataagcacttttgaccgagaactcacccgttctttccccctcccaagaccgtgcatcaatggagacatttgagcttagtgggatgcccaaaataatatcagaatctcgattattgaacatatctcgtacaaggtcatagtcccaagagcggttgtgcacatgaaaaagggagctaacatgttggttcattaacctagagtgtattgttgaaacatatgggttatcctgtacaggtagccacgagtggtttagaatgcttactatgtcccctgatccgattattcttctaacacccgaacggagtaaagattgggtagtccaaatacctctccagacaaagcttgggttacttcctagctctgctgacaagaaatcagagtggggaaagtatctagctttatagactt

SEQ ID NO: 87067 - DNA, 1751 bp, Cannabis sativa
caggtcaaagatccaacactgaaaattggcatactatgaaacttataaaaaaacacagtaaaaaagtaaaaatttccgtctgacagtatttttgtaaaaaaatagcaaaagttagtatactatgtaaattttcctaaggtgaatgaggttttatttcaaaaccaattggcaataataagagtagcacattcatcttatatatgacaatttattttcacatattaacaatgtaagactaactttaatacactctccacacgtttgggcctgaaaaatatgagtataaccaacgacttttaagagatcacatgaccgaacgtgacatttgaaagaatcccacaagaccaaatattagaaaatttataggtgtacatgtggaaaaaattgtgaattttgaaacaggtcaaagatccaacactgaaattggcatacattgactgaaagatcccaaatggaggtttatggaagacaggggaagtatctttttggataggtggcactttgggctcacaacggatcacaagcgactctgataatatgttagaatttaaggataaagtgaatagtgttccatctcaaaaccaattggcaatgagaggagtagtccattcatcttatatatgacaatttatttttacaaattagcaatgtgaggccaactctaatatcccttcctatggaataaattgtggaatacaaaaattatagaaaggtataaaaaattttggtggtcgattttgtcaaatgtgttgccaatttgtgcccgttcattgatgaagtattttgcccttgtgtggaagaaaaaaagaatccatgaaatatcttttcctccattgtaatttcgattctcaattgtggagatcatttccatcaggccttgttcctttacaagataatggtggtagatgctttgattgggtcaatttcttacaaagtcttaacgagaggggtgttggtttaaataatgtgtttctttatgcttcaatcatggtggatacaatttaaaatgttcggaatgacagagttcataacaaccttatttattgtattctccattatattaacttgattggtttttattttgcagagttttctcgctctctttgttctaaattgttcgctaactctgctgataattaggcttctctcctattaggttgtatcaaaatcaatcatgattttgctgtggggattgacaatggtggttgctttggctagaaatcacttagaggaagtgatgtggattagatccaattctctctctctttttcatgagttcatcaatcggctattttagagaagctgaaacttgtgtttgtgctttgaattcagcaatggatcaaaaaattagtttgtgataattaaaagtgattcagacattataatcattatcctgaaaggaactatggctagatgaaaggtgtaagattacgttactatctgtttgaatgcttttaatttgttattaattattaggatattcaaaaaaaaaaaaattattaggatataagtttactaaaacgcataaattttttaattttgtagctcataatattacttaaagagctctaagtgtaaacactatgtgctcataaaattcttaattttatggctcataatatttctaaaagagctctaagtgtaaacactgccggctatttagaggttgccttcttgccgagtgatgtattttgtttggatcaatagctctttcatataatatagatgctatttttcaaaaaaaaaaaaaa

SEQ ID NO: 87068 - DNA, 1204 bp, Cannabis sativa
ctcggtcaacaatagacaacttgtacaagattaaatctacttttcaagctttgcttaatgctactatccatacaagtcgtattcatgcacttttttttttttatatttatatacaaattttaatttagtcaaatgtcataaattgcacatgctaatatattcttatgatcacataatataattttatgacacattctaatatatattttttttcatttttaaaattagatatgtgttttttttaacatctgtattttttttcaataacaaaaaaaattaaaataataagagtaatttgcggcataaatgcctaagtttaattctcacttgcaaatagatatttgggtttaatttttagcggtggtaatacttaatttataattctagaacatctgtaggtacccggatgttaagtgctaagtaaattgccacgtgacgattcctgattggtccaaatcattaaatttttattttttttaaaaaaaatcggtttaaatatattaataagaaaatgacacgtggataataactttaagtacctactaaattccacaaatataacttaggtattattaccaccaaaaattaaacttaggtatttatttacaaccaagagttaaacttaggtatttataccacaaattacccaaataacaaagcccattaacttaaagttaacttttttcatggtcatgtatgctatagttatttttagacatccttcaaaattttgagaaattctgtataatttacaatatagattgcaatattcaaacaatttatttcacacgcgtataaaataaaagagtcacacgtgcaacaaatagtgtaaaccttattttcggcgtgttaaatttttttgaatttcttaaaattttacaaaatgtcttaaataactgtaatgtacacgaccatgaaaaaaaaataaactaaaaaagtccctcgaatatcggaatagataaggggtgcatcagtgcacaagttttagagtggtgcattttataattttcctgatttaaaaactaccaataaataggcttagtcgaccagtacaaaattgaataaaaaaaagcatcagttttttcaaaagaaaaaaaatcatcataaaaaaaaaatatgaaataatcccctacaatgcttaaataaaatttttgtacaatcaagtatctttaatttttttattggcctaatttccttccctata

SEQ ID NO: 87069 - DNA, 674 bp, Cannabis sativa
ttcaaccccaaatattttccagcaacaaatcaacaaataaagaccaagttcgagcattagaagcaccctagaatttcatttatatttcaacaatagaaaccaccacaagatcatgaaattaatactcaaacttatcaagatttaacattcatgcaaccaagaacattaaagcctagaaaagcatgactttcaatttttacttcagccacaaatcacaagttaaggccatgaaaagtttacctcaattcaaactcaaacacaagcaccaaaatccacaattttcaagcttcacaccaagcagtttctcttcaatttcaagattgaaattcaatgagggtctgagagggagaggggctcgggttttgggggaaaatcagtcagaaattctttttcattttcttaaaatccatcacatttaccaaatatacataaagatcataatgaccaatttgcccttagggctaaaaaggcatgcacacacacacacataaggacatttaggtcatttcacacacacataaatctaaacatattttcagattattcatcaataaataaaatgccaataattccatttcaaattgcagttcgggcccaaactcggttcggcccgaaatacccgattgtgactataccgcgccaacctatctaaacacacctgaaaaagacaacac

SEQ ID NO: 87070 - DNA, 612 bp, Cannabis sativa
  modified_base (151)..(167): a, c, t, g, unknown or other
tatatatagatagatgagcgcaaaataagagttgtaagtaaacaatttgacatattatatcgacccgacattaattaattcttattggtttttcccccgcaaaaaagaaataaaaataattcttattggtttgataataataataataatnnnnnnnnnnnnnnnnntaataataataataataacagaaatgttaaaagagatttgggctgtctaatattctctaatgtcttatattactagcataattaaatatgaaattgtatatattaatataataatttctataaaatatgtctaattaattacaaaacattatttttaagtggtgctaagcaataataataataataataataataataatctcttcttatatatacacatattccatgtgtatggtgttccttcacgcaaagcaagagccatataattggataactattgactcataaataaatataagagatatgtgatctccccctcctcatttgatttaagatgggtgatataattagtgtatatatatatatatatatatctatattatattccatttcggatacaattataaattatgtgtagttggattatgatatataataatgagtt

SEQ ID NO: 87071 - DNA, 924 bp, Cannabis sativa
tctattaatacatgccaataccaagcatagtattatattaaataatatactaatacaaaattaaaatggatataaattataagttaatattaaaattcttaaaaaaaaaggttgggtcagattagattcgatctgaataagtcggttcgaatctgatcgggtctgagtatctaatacagcgcaacgggacgggacaaatccttacatgatctgaatcaagtcggatcatagccggatcagaatcgacccgacccatttacactcctataattaaagcatgcaataattgatcattgtgaagagaaaaatgtaagtatacattatcaataattacttattaaatcatttgagtgagtgagaagtattaatactcgtaaataaaattttttttataggtctgacacgaagttatacagggaatattgttcgggcagaaatagttgaggctattggtgttagagaagttttaagttggatcaagaattaagggtggaatcatgttacacttgagacggattgtttggtttttgtgcaagctatcaggagtccttttgaagtgctttctttatttggtatgattattaaagaatgtaagcttattcaggatataatcaaatatataccatgatagtaatgtttgctactacgtagtttagtttgaagtttaataaaacttataattattcaataaaaaaaaaaaaaactaaaaggtaacacatgcatgcattgcaatgtttctttatttcttcatataattcatttattttacatagatctatttctgattcatgtaacatttcgattacaatccaaatgaatatataaatcagagataattattctaaaataagaaaaacattaaaacataaaataacatgactatacctgtaatatccgctaactccgaaagggtatttttgtaat

SEQ ID NO: 87072 - DNA, 673 bp, Cannabis sativa
gagagagagagagagagataacttcttttagatttttttctttgaaaagttagaaaaacctaagtgagaaaatctaaaaaaaaaaatatagcaagaagctatgggttcttaaacttgtaagatcttattgtaatacatcaaagtcattcgacataatacattgactcatggactaaagttaattaatacttgaaccacgtaaaaatctccatctccattttatatttacttatttaatttcttaagctcttatttaaattgattttaaaaatctcggtaaacaatatttttttaaaaaaatacatctgtgttaccttatttgatgttgagatcttggtaaccatgattgaatttaataaaattaatgagaaccctaaggtggacgataagtttatatgcaattagtgatgaaactattgcaatcttaagaagaatcttgagattaataaaatatatttatgcaatttgataatgagatcattgaaacttacctaagtgaatttatcaagattaatgtatttgatgatgagatcatttacaagcttgtgtataaagttaatgcaacttaaagaaatgttgaagaatgatggtatgataatcatatcatcattcatgtaatatttaatgaaagtattttcaaaatctttgaaaaatcaaaggaattcaaatctaa

SEQ ID NO: 87073 - DNA, 1283 bp, Cannabis sativa
gatctacacaaaaagtaaagttagcatatataaatttataagtataggacacacttacatattgggatgttggatatagaacttacgtgaatataatgaattttaaatcatctggtatgtcgtcattgcctgaatccaagtgtgccaccatccgcgtacttggttggatgagtacaagcattcagtgaaatattttcctgtatgaataaatatgtgtaaaattgttaatatatacataataatagataaatatgaagagttataaatactgaaattattcattttaaatctacatatactgattattatatggggcaataagccatttatttgagttagtcattctagtcatacgagtgactagtgcttgataacggttactatcaacccttgcatcggtggcaatcgcacccgaatctagaaattcatatactcaattcagcccattaatgtccaatagtctttgtttcatgtgcccaataaatattcataattaataattgtcactgtcaaaagaacattatcaagtttattattaagagttagaaatcatacttgcacaaaactcttactggttgggctcccaagtattaaatggtgcacaattcatgaatgtcgtttttaacaagccaaatatagtcatcttcgatcccaaatagatcataagcaacctaaaattagattatggacgactttgaccaccttttgacagagttctagaatataatgattgagctagtttgtcgtggttggacataacgaccatggcatgttggcttactcggccttcaaggtgttttggaggctgtgttggaggagcaagtaaatcttcagagatttttctgcttctcttcacgggttgcttctaaagtttcttggtgggtggctgtgtctatatatatgaaaaaaaaatagtataattagcaatgtcataatgaataaacacaatcaataagttataagtaataaacaaacaaataaattaaaacataccaagtattttccaacaggtgtaagatagtctttcgaccatggtacgtacgtaacattttctagcatgacctactattgtcaatgaacctttggctagggacacaatgcattctccacattgacttctttgatcaatactcgatgatgtgtaggtattcatcattgtgaatggagaactttccatctttcaaatatttctccttcacaatgtgcctcgaagcaaccttctgtaccattccactaggctccaactgacagtgcatccaacacggtaaggtctacaaatccaa

SEQ ID NO: 87074 - DNA, 587 bp, Cannabis sativa
  modified_base (51)..(59): a, c, t, g, unknown or other
tctctgtaataaatactatcataaatatacagactcgtggactaaggctcnnnnnnnnnccaaccacgtaaaaatctctcttaatttcttactgctctctaaattattattattttattggttgctgaaaacctcggtcaacattaaccttcttctttttgaccggggttttgaatgagagaaagaagtgaggaatcctcttttggaatctgactctcccactccagttgttgcttttctttctgttactttgaaagtcactgcttcagcttcagccactagaatttttgccgatttcgagagctgctacagttctacaatttctagttgaccgagaaagaccagacttgtaagacactttttcccaatttcaagaaatgttgatcgcctcacctgaagctacgaaaatccttattgaataaaagaatcgtagtctttcttcataccgccaatcctgtctcaagaagggagttagagagaaggctcgagagaccttcgcttgagctaattctcgatttgcagtggaggatgtaaaggcatcttctatagacggaccgaaaccagacctaaaggatttgcctggtcag

SEQ ID NO: 87075 - DNA, 764 bp, Cannabis sativa
ataagcgagactcaacaaaatatttctgatttcacaaagacatagggcattctaccgaagaatgttgacaactgaaagatgagataaagagtctaatctcgcgtggataggttagacaatatgtaagacatcaaggaagcaagagaaactagcccaacaaccctaataacccatataataagagaatacaacctcctcctattgagggcgaggatatactagtcatttcaggagggccacatctcgctggaataagtaataatgcccagataagatatatcaatgaaataaataatggacagtcggtgtttgctccagaaccactgaaaagagcaaaattagatgaacctctgattatcttcttggaggaagacacaaaacatgtgcagtatccccatgttgatcctctcgtctttacagttcagctcgccaacaaaagagtgaagagagtattggtggacaaagggagctcggtcaacatcctttatagagatacattaaagaaaatggggttacaggatgcaaggttgaagccttgcatggtaagcttatgtggactcacaagtgatagtgtcgccagctaaggcatcattgaacttccattaactataggagagtcactgttatcaactaggggtgttaatcaaactgctcaaaccatccgcaccgcaccgcacaacaaaaaaaatacgatttgaaattctttgtggtgcggtcgcggtttgaatttttcctaaattggcagtgcggtgtagtttgcgatt

SEQ ID NO: 87076 - DNA, 692 bp, Cannabis sativa
tttagatatctgttccaaactgctctttccagtttttacctacaaggcaacgacatcagaagggacatatacattagtaaagtccaaatgcacagagatgcaaaaccgtaagataaatattgcaatcaataatgtagtgccttttgtttatgagtaaattaggaatgggaagaaggagaaaaccttgggaggagggctttagtgatcagagaggtagagtaaattgagaaggagaagtgagcggtgattccagtggagtggtcttcagatgctttgccagagagatgattggccggaagccattttcaaccggagtagatgatcggagtcagaggaaatgaaccgcggcagagtacaatcaacggaaatagaagaatgggtgagaaagctgtggatagtaaatactgaaataatttcacacatactgaaacaaattttacagtaaataccttggatcgtcgttcaccggaggagacctagacactcgaaattcatgtcgtcagaggagttgagcacgaagcaccagcgattatccttgggggcgctgagctgaagcacgaagaaacctagcctttcttctgcaagctactgtacccaacaataagaatgtccaattcaaatgagcccaattttgaataactctctaaggcccaataattaataagacccaataactattagataacgttttt

SEQ ID NO: 87077 - DNA, 757 bp, Cannabis sativa
ttaaaataattgaataaatgttatttttagtgtgattttatataaaaaaaataatacaataaaaaaagtattattaaaaaaatataaaaataacaaaaaaaaaaatatgaaaatatacttctagggaatttaaatattcttacgattttaataattttatttgcataaaatataattttttgatgtatttttatttgtataaaaattttatagttttgatgttattttacagttatttacatgttttcttattgttttgatgaacatcataaaaatatatataaaaaaaaatcgtaaaaaatttacaaaaataataatttatgtaaattttctaaaaaatatatattgataatgaacaaatctatatagtttctattatatcaaattacctgcaagaaactactcttttttttaaaaaaaaaaaaaaaaatcgtaacttcattacccatagctttttcttatttatttatatcaataattgtttgcaaattatatccattcaaagaaaaattggttgctaatgccactactactacaaatggagggacaacttatacatagggtgataggcaaaatggtaaattgatagggaaatgaaatgtgtataaattaaggatcaaaaagtccaattttaaaatttagtcactctgtcccaatagcgtaagttagtggttctaattagagccataagaacggtcccaatggcatttaatttaagaatatgataacataatggcatatcgttctttctataatt

SEQ ID NO: 87078 - DNA, 577 bp, Cannabis sativa
gctttgtccaagttcagattatttgtgaagattctcaacttgttcattgcaaggttaaagtggttgatcataattctatttcatttattactgctgtgtatggttctaattctgctatggtcagaaatgttctttgggaaaagttggcaggttttgggtgtttgaatcatccttgggttgttttcggtgatttcaacgctacgcttagctataaagacaaaattgggcatagataaatcatggctaatgatgttctagatgctcaaaattggttagctcattgtcaagtggaaaagcttaagtatttgggttctagcttcacctagacaaacaaacatgaagtgggaaatatgatctattcaaagcttgatatagtttttgtgaatgaaccctagtgtgatcatttccctaatacaggggctctttgcaagtgggatgatatttctgaccatagttactgtacaattaaaaaatgatatttgtaatgttagaatcaaagctttcaggttttttaattggtggatgcttaacagtaactaaaaatgccaaagtctaagagaaatggaacttacctact

SEQ ID NO: 87079 - DNA, 868 bp, Cannabis sativa
ctcttaaccagtacgatgcttgtaattgctgaaccgacacaatgattgtgtcactatgatatcacttaaacatatacaatcatacacagaccatgcatatacatcatacatatatacattcgcataaatatcacatattatacacaattcttaccttctttccagattcaagtgtgatggccgacctgaacagaaagtgtcgtgctggatggataccctaatcacatataaaaacggggtaaatcacatgttcgaaaccctaatccgggaaactcgaacctataactctaggctctgttatattcactagggattacactaacttaggagacagggaaacacccaactactgtactgaaatggatgagaattgagaaaacgagacattcgaggaaccctgccaaaaccggtttaccagttttacaggcactggtaaaccggtaaaccaatttataccaattttcccaaaaaagatctcatttcttgctcaaaactccaccaaaagcaaccaaacattccagagtacctaaacattgtatacacaacatattccaaccaataattcccagaaaaaaaaccactgaattaagacatgccattaaagatcaaagcttaggtttcaaagcacaaacttgcaaaaatccaacacaaagcaataaaaacagctaccaaaacctttaatcaacttaaattgaacataaaaactgtaacctaagcatttctaaccctaacaaccaccaacactaaaagtcactacttgaaacaaaattcaaagcttagaaacacaaagaacaaagagctagggattactcagcttgattccagaaaatatgaggatttgaatggtttcccctggttttgtggctgg

SEQ ID NO: 87080 - DNA, 936 bp, Cannabis sativa
tattatttttttttaattttattggtttaactttgaattaaaataaaaaaaaattatgtagatattttatataaataatttttaatttaaatttggtataatgcaaattttttgcttaaaaactcgagatcagtctcctataaaattgacatgtggatccaatcctcaagggatggatgagcaattagttaatgactctgcgagagttgacctcgcttgaaccaaactcgcgagatgatgcagccttgataaggtctagtcgcatactatgccttgcgtagtgtaagataagtaggcccgagagcattttatacaagttgcgcttatattgaaacatatgcaatgaaaatattggccatgacaatggcttttactgcttcagtaaatgggccaactttgaggtcaacagggtagaaggcactgtttttaatatgggggattggaaattgaaggagttttatgcgtttaaaatgctaggggtcaggatagacttcaattgtcaccctcatatgttgcatgtctttatacttgactattattgtttgtccttttataaatgctaacatttatctgtgttcacaggtagaccagctcgttctgtgtgtggataaagaccgtgtggaaatcactgaagttttgagcagtcttccagttcaagaacctattggactaacctatataaagtccctatttttccacttgaaactaagacacaattcggtttattgtgtaagaattagacaccattaataaagagctatatttctattattgattcataatcattgtaactggatttggttgtttgacattcgagtgttagactcaacagggtggtatcagagcttgacgagttcttgttgcttgaattgaaccaagcttgcgtgggatcaaacgtgaagaacaattaaggaaagaaatggggaatgccaagtt

SEQ ID NO: 87081 - DNA, 833 bp, Cannabis sativa
  modified_base (304)..(310): a, c, t, g, unknown or other
aaggttacaatcaagaagaaaggttacaatcaagaagaaggattacaatcaagaagaaggaatatcaagaagaaggaattgattatgaggaaacctttgccccggtagcaagacttgattccattggaatgttgttagcttttgcatgccacaagaattttatcttgtaccaaatggatgtaaaaagtgttggattattgttttaccaggaactagatttactaccatgtatgttatttaatattcaaaaatttgaatttctaaaacaatgtaatataagcacatataaagtttaagaaacctnnnnnnngttgtagcggaattaaatgactcatttcactcagatctttaaccctagtatcctttctgtagcatggtatcacaaagatttgagcccgactctccttcacttgaattggattcttcacattcttacacactatgattgagtacaaattttttatgtgtgggcatgtagtctatcactatagggtgttcgaaaatagagaagagagaaacagagagagaaggattcgaatgagatagaaaagatgcctcaattttttttatttttttttactaaaggcaagtgaattattaagcttccaattttgagtccatcactatgtatatataggaaaccttctaggtttaggtttgacttatttggctttaaaaaattgataaataaattgtaaaatagagcataagtggccggccttgaaagtgggccctaccactttgcaattttgccatttttcaactatttatcttatgtttctcaaaaatgccataatttccaattcaaccacttaaatgccaaagatcggaag

SEQ ID NO: 87082 - DNA, 664 bp, Cannabis sativa
tggaggcttgaagcggggacgttacatataatcatcaaggcattgaatacttcgaatcaccaactcattagctagactgccattgttgagacaattcaagctatggacttgtataagcattttttttcattcttttagtagtgctaaccgtgtttcccattgtatagctaattttgctcttaaatattttatttgtaattcttggcttggagatattcctccttgtgctaatgtcattttaaaggtagaatcgcctagcctgtagttaattttgtgggaataaaatattctctttttaaataattaaaataaaaataaattactttgatattaaaatttgtgttcattgtattaatattttgagataaattatttgattcatctcttttttctacttgaaattttttatatttttatttagtgtattattcaaataaatcaaacaaattaatacaacaaaaaatataaaaaataattatcaactatgttatactagttatgttgatcaacatgtactgtaggataagtcaagtcgacacatgaataaaattaacagatacgcgaatatgatatgtagacacgtgaacatgataggtcgacatgtggatatgataggtctagttatggttgagctttcttaatacaaaatataaataggtcgagt

SEQ ID NO: 87083 - DNA, 686 bp, Cannabis sativa
caattggattggatcggatggcaaaatccaatatccaataaataattggattggatcggatgagtccaaatccattggatgtgatccaatgaacactgggctgagatattcccaattcactaaaccctcaaatgtcaactgtcaataaatattttattttattttgaaagaatctaattttattttttaaaaataaaattagtgacattttataaatgttactacaaaattgttgaaaaaaggtattaaaaactataattaattatttttttcttaaatgtatatgtgtattgtacaaatactgcgacaactttgacaaatcaaattaagtagacaatccatcaaacaaatattattaaaatgaaaataataattccccaaacggatctaatctgtttttcaaatttatattgtactaaataatttgtttttcaaatttatattgtactaaacattgaaaaaatactcaaataattttacaaattcatcatctgaagtaatgattttcatataaacctttaaatacttcaatattctgcatcctgcaagagtgacgactttactatattgactttcctacaagaaaaaataaacataatcaataaaattttagtatatgaacttacaataaatgttcactaaaacaatagtatccgctacaaaaaatataaattgaaaatacttta

SEQ ID NO: 87084 - DNA, 1692 bp, Cannabis sativa
  modified_base (32)..(57): a, c, t, g, unknown or other
tttagaaagttcttatttaggatgttaataannnnnnnnnnnnnnnnnnnnnnnnnnctggtaaaataattccaacattacttgggtactgggagtgctgaacggacgttccaacagaggaagcttgtgattggtttggtttaagcttgacttcttctcgctgaatggcctctttaagcttgatgaaaccatctgcacgatcgaggaagtcactcatagagtgcaaaaattgggataacattgataatccttattttgttgttgaatctttgattggtcttctttataaagcgcaagaggcagttcccaaaaagttgcgttcttccactccagttcgagttggggtaagttcaatgactactaatccataatggaattgagttttcaaaagttgcattctgctccttaatcttatgtatctgtttatctttattatttgtgtagcttaccatatgttctattttaataatattcatagtaatttgttaatgtttttataaataaagtcttaatgcaacatcctgtaaatggttccaggtagttctcttttacaacgttttgactcttcactaggcatatatgtttatgtattccttcataaatagaaacttactatgaaaatattattggcaatgtagataattttgttttgtggtatttttgtttaaagtttaaatcattataaatgtggttagggctaagaaaggacctaagcccaaatatgaagtgagatgaataatctttatttgtatatttgtttatgggaattggagtaccaagaaatattttcctatgtttggctgcttagataatctttttcctttgtagctgaattcaagattttttaggaatataatatggtattcttttcatattgttgatcacagttattcatctacatttgagagatcgttcttagattatggccttatgtatatctctctatggcacattactatatatgattttcctttttgaaaaagaactcaagaaaacttgttttagtaatgtaatagcctaagatgaaatatgcttttgttatgaattgttataagatttatttactttgataagaacacatatagtgaatacgaattttagattggcagcgtagtactttgatttgtagatgcacaaaatgaaaagttctcatcactataatattttatgtccaacattattattatttattattttattcaataatacattaaaaacattttgcattaattgttattttaggtgattatactattggaagatattgatgaggtacacattctaattctactgtctaatgtatatatctctattgaaatattaattcaatttaacacttacagaatttcattagggtttataaagattaggaggagttagcatgcattcattaatcttgcagtaacagttattctacggatggaagctggtgggcatggtgtacctcctctaagaagccatgatagttagtgacaaatgacaactaacaagttctcataatccatgaaatatctgtttttttagtttaaataaacagacaattatccttttaatttgtttcatttattatcattttgtttagacatttttaggtagagtaagatacaaatttgtttcattttggaacaggagtcacaagtttcactatgtgtgttatcctaaatttttcactctaacatggcatcacacgat

SEQ ID NO: 87085 - DNA, 514 bp, Cannabis sativa
tctgggaagagacgctagaaagttcactggaaactctgctttggactaaagagattcatttatgtctttggtgagtttctttttttttttttttctttttgtggggaacttaactattcatttttgaatgtcattcattagtcagtttttgttaggttatatatctatttgtatttattgatcaatgtagtcatttgttgtgggagctttataactgacttattgacattttagttctcttctaaatattagatgccagtcttggcatatgaagtttattttacttttaaaactatataaaattatgtggttatatggtcagtttggtacattactgatgtattaaattttaaagtgttgtaaattattaatattttaaattttaaagtgatattataatcttgttgcttacgatcacaaatatagagaacttgtgttctatacaatttttatatattatgtttttgttataaaataatatgaagtagatgagaggaaagaagaagaagagaga

SEQ ID NO: 87086 - DNA, 594 bp, Cannabis sativa
acggcagcacgaaatatggagtacgaccgaaacctatatctctcaatgggcaaaggtttgattttcttcttcacaatttttttactctttcctctaattattgtgttgattcttcacttcttggagcatgtaatttatttctacaattctagaaactaaaacccctgctaatgagaggcgacaaggctttattaggcattgtggtgaagcacctgctaggcgcatcttacctggaattgggttacacttgaatgctattgcaacaacctcaaaggattgcaaaattactaagaatgtgtcttctggaatacatataaggttgcctggttccactgtctccatacattctccgatggatgatcaagagggtcttgataaagccttgattccggtttcttcagaaatggacatcaatgaaaatggggtccagcttctagaagatccttctgatcaagcaccaggatcaataactaatgaagaattcaatcaaaatagccccaagaaaaagaggcaagtcttacggctgggagtggtggggagagttcttctatatcggataataataagcaacctagaacggtaacgacagtggcg

SEQ ID NO: 87087 - DNA, 929 bp, Cannabis sativa
aatagcttgaaaagaaatagggacaagcctctcactatagccacaacctgaggaggaacaagcggcagtcgccaaacaattggctgctttgtttgtagatcgtttaccaaaaacataaaaaacattgttaagatcagatattaaagcatgacaatcaaaaataactaaaccaaaaatacataataaaggagtcgaactatacagagcataaatgatgcttttacaatttgactcaacaacaacttgatctaggccacattctttgatcgagctcaaagcttccttcaacctaattgcctccaccaaaagaggagagacacgactagataattatttggaccaatgataaatgacagctccatgatgatcacgggccatccctccaatcccgaagtaaaaaactccagaagtgacagaggcatctacattgactttaatcatttcaatactgagaactgactaatgctccacccgaatacaagtactagaatctattgtgtttgcagaaattttgtgagcaatcttccattgattaaagtaagacaatgcaacaaccaccacctcatttgcaaaataattttactttgccaaacaagcccatgttttgctttctaaagagaccaacaaatcatcgcaaaataacaaaccaaagtcttcgaaaatccgatgaccaattgataaaaccatcttgaaagatctgtgcccgaaaggttgcaaatagccccatcaacccgctaccaacaagctttggataaatgacactcaaccaaaatgtagaggattgattcattcacaccttggcacaccgggaaaatgacgaccgcatcaacatgcccaaccttttacctgggtcagtgttggtaaacaccaagaacatgccctccagagtaagtctttaacctccagaggaatttttgagttgccataat

SEQ ID NO: 87088 - DNA, 1649 bp, Cannabis sativa
gcataaaacccaacactttcaacatctacttacggtgtcttggagctcggagcaatgcttgtaggaagaggaacttctaccttgattgtttggcagataatttttggccagatgcatcaccagtcctatttctgagtgcgcatttcatcttatttgacatggctgtaagaagaaaacacctcttaaatatttaaacaagtaagaataaataaagataagtacaataatagctaccaatgactttagggggagcacccttacaaataagaaaaggaagggcatccttgttagaagaatccctgcattttccactaatacgaccttcatcttccttattatagtggcggtagaacggccagctacctcagggtcatatctaatcttgataggcgagtgagtcggtacttgatgcccctagggagttttcttatttttttggagcctcttgctcagttataatctcctcaactacgtatttggattgttgaacctccttggataggtaaatccaatacttaagaaaattggctatgggagaaaattgattaccaagagcgtccactagatctttccatgagtcgattgatctagggagagcttaaggtgccatcattgagctagccatctcattgtagcaaggaatattctacacctgacgtcgtctctcacaccttgaagatcgatctacacttcgaagtagtggatgtgagatagtggatcttccttcccggtgtattgatgccaggaaggattcttaaactttggaggaatgggaagggctttgattttcttagagagtggtgagcataattctcaattgagcttaaatttagaaagcttaggtgtcgtgatcccctttactaagttagctaaggtatcaaactctatctgattgaccccgtgaatggtggtctacatcctaaatggagcttctgtcacctggatagggtcttctctagatatcccatgttcatcgttcttcttttgttcaagaggtcatgcaggtctctttgccttcaaggtcgatcatgtactctggttgacccgggtcttgtaattttctcctaaccacaaggttgtgaaggcaactctagtgaggcctccagaatgaactcaagatcatctccagatgacccactgtgagagtgttcattctctcaaagtaatcttcagtaatatcacaggtacaaagataattgaactggtcactcaggttaaattcctctccaggtactcaagggaaatactcgtattattggccatcggggccacaagcaaagtaatagcacaactcccctcttcaatttcaaaagtacttctaagtatgaaggctcattggtccttactcgccagatttcgtagcctcttattttgaagtagcatctcctactacttctttcaggttaagtagtaggtccctttcccattccagggtctcgagtcctggtctcttgagaacgttaaggaggacttggtggaagagtcttgttggttctcttgttgtttcaaggtctttcaacatcaggtggaggacccattgattgaccccgttgagcttgagtccttttcagctcttgatcgaagatactttctctttgggagctctccatgcttggtgtttgcatagtgcatgctctgttaccaggtat

SEQ ID NO: 87089 - DNA, 1003 bp, Cannabis sativa
aaactgtacaacatagtcttaagaggactttgtgatggaggcaaatcggcattagctgttgggtatttgagaaagatggttaaacaagttggttgtgttcctgataaggaaacatatgatattttagttgatgggttgtgtcttgagggaaaatttattgaagcaaacagagttttggaggagatgttaatcaaatcttattggccatgtgttgacactttcaatatacttattaggggtctttgctctgtgggtagacaatatgaaggtgtgatgttgttggaagagatgataaaccagggtaagttacctgaaaagtctgtgtggaattcattggtgacatctctgtgttctaacatagttaacaactacaagatatatactattatgcctatgactagttgagaagctctttgagcatttattgttgttttgaactatgtttggttgttgggaaagaatataagaatgaatgagaggtaaattacttgaaaaaggaaatgaagaaagctatgttgttgtgtttggtgtgaaaagtaaaaatatcataatactagaattccatttgacacataaaattactgagttgaatagtaaattaatttgagtcgttacactatagatggacacaagtgggaagtgtggaacaggacaccatgaactgattaaggagatcattaatatttttccttttggttctttccaaagtatggaattctaaagtggatggtattaatttttattactagtaaataacataaataaacatatacattaaaatgtattcaaaaaagaaaacaagcatttgtaaatatacgacaggtggataaacagctagtaattttgttgagccctttcatctacgtgtagttaccttgccatgcaaacttactacgtggctaaaccttacatactctttttaaccatatttatttcttacatggccaaaacgaccaaacaattcaactcaaagcaaaaacgattgatttcatcaacaaaatga

SEQ ID NO: 87090 - DNA, 961 bp, Cannabis sativa
accacattattgaacttattttaaatactcataataagagtgaataaatgagataattaatatgagtggaatgagaatataatttgaaccgatttttattaccttaaaaaaatcctatttttatacactttttttgcaatatatatatatacaagtgaaaaatgagataatttgaatctattttataggtgtgtaaaagcaaaaacaaaggtggggtttataccatcaaacatgtttattacaccaatctttggtttggagattttgaatctattttattggtttggagagtaatagcttggcactccaaaacataagtttatagcttggcttgtaattcttgacaatattaggctgcaaactaggactagactacacaaatttggtatttatcaaagaaaatttgttttatttcattggacttgggtctattaaagattggttgggttggaaagtaaaatctgatgatttagtatggttgttgaggtggatattgagcggggttccgtcgtgggtgtttttgcagttgcgttagtagctatagtttatcacatttgaaagattcgcaatatttctttgtaggagcataaagtgtgtagaatcaacatattgagaattaacatacaatttccaaaaggagtaagtgagataaataaaatgtgattgtggagagatttaattgtatagctttactagagtagtgaggggtttgtgttgttcatgagtggctttttttatttttgccctattagttttgtagtgattgtttgaaaattgaatatagaattttaaacttacctatcaaacaaaagagagaaaatgaagaaacaaaagttggaggcatgtgcaccctgttgtatgattaaaatagacttaatgaatatttatgatacaattgagtgaaatttaagattgcaatcaagttgttgaaaaaaagagttaaaaaatcaggttgtggatt

SEQ ID NO: 87091 - DNA, 660 bp, Cannabis sativa
tagagataaagagagaagacagagaaaggcctctaattgttttgggtgtgctgaatttattgcatatgcacttatgattgtaaaagaggttgatagttcaaaactcactagctttcaagaagctatgagaagtaaaggtgatggagtatggatgcatgtcatctaagaagagttccagtatcttaggaagaatataccctagattgttgtgaagaaaccatacttttacaagatggtaggacgtaaaatacttttgaagcatgaagaatgttcagggaatgaacctaccagattcaaggcaaggttagttgccaaggggttgacttagaaggaaggcatcaattataatgagattttctctctagtggtcaagcaagcttcaattagagccatgatggcaaagacagcaagcatggacttagagattgaacagattgatgtaaggacaactttcttacatggggaattagaaaaggatcaaaatctatatgcaatagcctaagggctttgacagttggaactcatatgaggtatgcctactcaagaagcgtttatatggcctcaagcatgcacctaggcaatggaacttgaggtttgacacctatatgcagattgttggatacaccaaaaataagcatgactcatgtgtgtatttcaata

SEQ ID NO: 87092 - DNA, 556 bp, Cannabis sativa
aggtatatactcttgtaatctccattacagaataacaagacatcatctgcaaagctgaggtgattgagctgcaattctccacatctctcatgaaacttaaaatcctgtttgcacccaactttcctcataattctagataggtattccattcccaaaacaaacaacagaggagacattggatcaccttgtcgtagccccctttttgaatcaaagtatccatgtaaagagccattaaacatcaaggagaactttggagtccggacacacaccataatgagatcaacaaagctagctggaaacttgaaagccacaagcatctcttctataaagtcccattcaactgtatcgtaagctttttgtaagtctagcttgatcatacaattcgccttagaggttttccttccatagtgcctaattaagtcctgacagaccataatattgtgcccaataaacctccctgcacgaaaccactctgattctgtgaaatcaaatccggtaaaaccaatttcagccgtgagcaaatcaacttggtagcagctttatacaacacattaca

SEQ ID NO: 87093 - DNA, 778 bp, Cannabis sativa
  modified_base (160)..(178): a, c, t, g, unknown or other
tttataggattacttaaatatcatcacaaaaaataactatttctagtgataaccttttaatcacaacataatttttttgtgagtaaatataacttttagacataacgaaaggttacttgggactaaaacataataattagatacaagttgtcactaattnnnnnnnnnnnnnnnnnnntattgtgactaaaaacatatttactcacaacaaactggttatacagtcctcttgatcaatttgatgttcacatacttcctttcttacatttaccttaagcaatctcattttcaattgactaaatgcaatttcctatagtacatttaaattagagctgatttcgcactttttggaattatctcattcagttaaaattggactaaatgctaattctcttatatctcaggacactatacttttttcaatggttattaatcttttcaatggctttaaagtcatttaagattcacaatttaaaaactattatgatactttaatgtgttttggtgtatatctcaagagtattccaaaaggaaacacatataagctagcagatgcttagtgaacaccacaaacaacccaatattgtagattgtttgaggaaaagatgaaaaactttttggcagcagaaagtttttcatcttttcctcaaaaagttttcaccagttctaccaaataaggcaatcaacaccctccttcatcattacagataatattaattaagaagaaaaaccgctctatatcagtttcacattatattagtaatggtcatcagggtgg

SEQ ID NO: 87094 - DNA, 1273 bp, Cannabis sativa
gtctccattaatttttgtgcttggcatggaatacctaactagaattatgaaaaaggtggggcaaaagtcagactttatttttcatgatagatgccgagaactcaagttgaatcatctcatttttgctgatgatgttctcctattctgcaatggagactataagagcatctattacttgttacaagggctgaaattgttctcacaaacttcaggcttgctgcataacccaagcaaatcggctatctactgcaatggaatgccagaatctgagatccaacgtatcattgatgcttcgggttttcagagaggtgaagtccctttcacctatttgggtattcctattagccccaggagactgacttcaaaagagtgtagcttgctggtagacaagatgactcacagaattagaatatggagtaccagacacatcttttttgctggaagagcgattctagtcaactcggttctattcaccatacatacatattggagccagattatgttgcttccaaagaagattaccaaagacatagaaagtgtgtgcaaagctttcttatggaaaggtcaacaactaatggctggttcgggtcaagtggcttgggaaaacatatgtcaacctaaagtagcaggaggtattggcttcaagaaagtggctgagtggaacaaggcagccatgtttaagtatgtctgggcaattgcaacaaaggaggacaatctttgggtcaaatggatccatagtgtctacatcaaagaagcagattggtggagttactcagctccacagcaaagcagctggtattggaggaaaatcgttgcattgaaaggtactatcttaacaataacaaacccctcctctttcattcaagatagatatcgaattgcagaaggatacaagatgttatgtcctattgagaaccgggtcaaatggagtaaggaagtttggggtagacttaatactcccaaacaaagttttgtattttggcttgcaattcaaaataggttgaagaccaaagagagactatttcgtttcaaagtggcagcagatgtacaatgtctattgtgtgataatggagttgaaacttgtgatcacctattttttgagtgcccctttgctattgaatgcctacaacaagcaaaaacttggctgggatggaggactccagcaacctgtttgcgttgcttggtgaaaagcttggagcggaggaagagttcagccttccaaaagaaagttatagcagctactcttgctgctttggtgtacttaatttggaag

SEQ ID NO: 87095 - DNA, 1071 bp, Cannabis sativa
ataacatctaaataagatataaaaataatatgacaatgttagaaaataaagattaatttaaaataaaaacttcaaatatgaataaagattaataatcgaataaatatttcattaattaaatttggagttctggattgtaaaccattgaatagaatattaactatttcttcttctagtctcttcactgaagttataggcaaaataacattttatatccattaaaagtagtttatattcacatgtggttgcaacaatttttaaattttgtactctacaaagaaccgttactcaattagttcttcagcttataaattaaagttttctttattgtgcattaaatttcatgtaaaataaatcatatgtcacatttagtataatatgattgtcaaataaaaaaataaggaaataataatataataaaatttattatataattcattaagtgtaaaataactgacaaaaaattaaaaggaccaacaattttcttacaaccttcttatcaattaaaaattcttagtgttgagaaactcccacattttataaaactctaatacttctttttcaattatctatctcgattattatttaagccacaaaaaaatactctatgatttgaaaatggtctatttccaaaaaattatatacataacttactaatagttaatatttaattcagtattatagctttattttcttaaaaaaaaaaattaaaatcaaaatttatggtttttttttttttttaaaaaaaattattagtaatacggtttgtttttaaaaaaaattagaattttgtatagttagtgttttaacttttttgttttaaaaatattgctaaaaattagatatattttttttttttgttttagaaatattataataaatgagaatatataaatgctattggaaaaatatttttttaggttattttttattcaataaatataaacttaggatatatattttttaaaaattgtttttttttttttgataatttcatgttaattttataaatatatatatatatatagattttttttattaaaatcagccacgtttattttttttttaaaa

SEQ ID NO: 87096 - DNA, 609 bp, Cannabis sativa
  modified_base (38)..(49): a, c, t, g, unknown or other
ccttaggggatggcatagccttaaagttaaaggcgagnnnnnnnnnnnnaaaggcttatggtggatacctaggaaactagagacggggaagcgcgtaataagcaacaaaatactttagggagttgaaaataagcggagatccgaagattcctgaattaggttaacattttgaactgttgctgaattcatgggcaggcaagagacaatctgtcaaactgaaacatcttagtagccaaaggaaaagaaagcaaaagcgattctagaaaggcctatggtggatacctaggcacccaaagacgaggaatggcataataagcaacgaaatgcttcacggagatgaaaataagcggagatccagagatttctgaataagttaacctttcaaactgctgctgaattcatgggcaagcaagagacaaccagcgaactgaaacatcttagtactcagaggaaaagaaagcaaaatcgattcctacagtagcagtgatcaaaatggaagcaacctaaatcacaaaaatagggtgtgggagagcaatacaagtgtcgcgctactaggcgaagcagtggagtgctacaccctagatagcgagagaaagtatcactagctta

SEQ ID NO: 87097 - DNA, 878 bp, Cannabis sativa
gtgatttgtgtgactctttagtatgggcaagggtatttttgtctttttgccttttgagttttgtcttttagtggggatttaatgttatgtttaaatctgattttttaagcttaatatggctgaaataaggtgtttaattaagggaaaaatcattcatttattcattttattccaagttaacaaagttagacaaaattgctttttctctcaaatctctctctctatttcggccactacttgagcagctagggtttggattatttttctgcatttcaagcttgttctagcagggattaggagatcttgagctctaggtaattccttgttgctttctctttgatttcttgggttttaaggaaatggatttttgcatgctttgggattttacttgttgtggttgctgtgattagttgttgtttttttcagaagcttaaatatgtttaattgagtggattcaagctggttttgttgttagttagttagatttaaccaaatttaaagctttgaactcaaaactttgggttttaatggtaaaatgatatttttgctgctatggttattgtatgtgtttgagtttggtttctggatgttagatatgttgttttatgttgaattaagttggttgtagtggctggttgtggtgttagccaagctttgagctttgaagctcaaacttggagctcacatggtgaattttgattctgagtgtgtagggttattttgttgctttgaaaatgttctttgttgtctgtataggaggaagacttgaatgtaatagtcttctttttcttctcaacttcctcttcttcttgagcactcatgaaaatttcatggttcatgagtgagctgattaactcttccaagggaagtgttgagag

SEQ ID NO: 87098 - DNA, 542 bp, Cannabis sativa
ttcaaagctcaaagacctatttatccacttccatttcagcaacaatttcaaattaaaatagtaagaaaactacctccaaatcttcaacaattcaagatccaaagaattcccacaaattaagcttgaacccaagcgatttctctacaaattcacaagttgcaatgatgaaaatagggagagaggggtggggggtcagttttggggtgtaagaaaccaaaaaatgcttttcattccaattaaaattatcttttgttgtaaataattaaaatatgcaaaattaccaaattgcccttaaggccatatttcacatactcaaactttcaagggaaattatgtcatttaacttcacatacctacccaaaataaattcagattaatcacacataaataaaatgccaatatatcatcccaaaattgtacttcgaccctgaacccagttcgtcccaaaatacccgattgtgactataccgcgtcgacttgtcagaacacacctgaaaaaggaaaaaacaggcatactatataataatatagtccataagctc

SEQ ID NO: 87099 - DNA, 870 bp, Cannabis sativa
aaagtaccccaacaataacattttaaaatcaaaaaaaatttaaaaatgcacttaaacatcaaacatcaaacagcaaaacagagcatagcatcaaagtatgcatatttacttttctttaaatttccatattctattgtatatatatagggaaatgtaattcttaaattcaccatcaatgtggtccaaagtctgcataattttttttttttttgaactaaatatttaaagtagatattgtgtgcaagttgaatcatttacagaagttgacctcttcataccaccagcatcaccacaccaaagtctgcataatagaccaacatatcaggatatgagccatctacctttgccaagcgtacaaagaaaataaaagctatcattcaccaaggtctccaatttgaaagtttggcagcaagttacaaagtccttaatacaaattaaatttaatgcatttatatcttggatgtacatatatttcattaaaaaatcaatcacattattaaggtttagaataataccattcaaacatcaccgtaaaaaacatagaagacgtatatttccattcgtattaacactaataagaaactaacacgacacataccatacaaatctgattatgtcattgtttcaggcattttcccaaacaaggtatgtacactagcatatgctttcaaaacacccactattgaatcccacttaggcacctgcgaagcaaaaaaaaaaatagagtgagagtgagggcgagaagagagttggctttggagctcgagagacgaaggatgattcagatacaatgaggagagggtttcagatcagaaattgaatatagcttataatgtatacctttgcctggaacaattatgactggagctg

SEQ ID NO: 87100 - DNA, 730 bp, Cannabis sativa
tttaagcagttgataaatctaacatagtggaaatgtattatttaaaattatttacttattgtatcttattttataaatgaaggatccttctctgttgcattttgatgttttttttttaaaacccactgtcgtatttaatttttttttcatcttttcaaattatgcatgaaaacagtatttttgtaaaataaggtaaaatattggggcgtcacatggccagatcgccagtggccgtttgggatgtgcagaatgagagaaaatacccaagttaaaaaaaattacctctaatgaacaaccagttcaaaagttattaacgttcaaagtattcaaaaaattttatgcaaagttcctttctctaattttttctatttattttggtccttaaattattgtttcattttattagtcttgaaaaaatatataaaagcgagtgatcacattgctaaattagttaaaaaagaaaaaagttatgtcattcaaaagctactaagtgctcttcactcacctcactttctggacctcatcacatactaaaactaaaatatgcaccatctcaaaatcaatacccaacgttaaaatattacacattatttattattcaatatactaattattatgtttttattcaaaaaaaatactaatttttatacaaaacgtaacttaaaaaattataaaaataatactaatatactagaaaaatacaaatttatattataaaatttaaatgtat

SEQ ID NO: 87101 - DNA, 853 bp, Cannabis sativa
atatgttgtaactagctaaaatgcatatacatatacctcccgatttaatttttttaaggggggcgactgccccacctcgcctctacgtgatagttaacaattgaactcattagagaagaaatcttatttataataggatattttttgtaatattgaaaaaatataaaaaaaaattacaaaaatataattgtacagcataattttacgatttaaaagtttttttgggccaaaaatacggactattaatattttcatgttattttttgttataatttttttttattttcttattatttgtatgttattttttaattattttcatattatcaaacaaacttatgaaaaaaattataactttgaaaaaaaaaattatttgacggtagaaatattaaaaaaaaattcaaaataatatatttttatatatatttccctcgagaagctactaaaactatgtccaatttatgggctaaaaaaatatgttaaatttggcataaaaatttagtttatgctatattcactattcaacactttttttataattgtgctctaatacataattacaaatgaagtaattattacaaaaatatggaaaaaaaattaaaattgtgatatatatatatggtatacaaatttaattatactaaatatgacctttttttaaaagaaaaaactcaaaatatgaaagaaaaaaaattattatagataagaaggaatgtcataaaaaattatataattgtaattctttttttatcatataaaataaccagttatttatacagatattgcaactataaaaacatataaaaaaatctatagaagctgaaaaggtaataaattaagaaaacaatttttt

SEQ ID NO: 87102 - DNA, 1279 bp, Cannabis sativa
ttacaagtaactttttgttgtgacttaaagttatatttagtcacaaaaaatttatattgtgactaaatagttatcactaaaagtagcagttttttgtagtgatattttgtaaaatttagaaaatttaatacgctgaaaataaaattgagtattattatctttaatctaattagtaagtttatttaaattattagttaaatataataattgtggtgatttttgttaattaatatgataatattttttattttattaaaagattaatataataataaataatttctttagtattatagttggaataaaaatattttttaaggctaaatttaatgataatgtaatactaaatttggtatgttcttaaaaatgctctaggctttgaatgatggggcacatccaagagtagtaggtatgataattaattactaaccaaatcaaaaaatgaaatgagattcacgtggtgcaagtaggtaggtagcctcttttctataaatatatatattaaaatatttttgcaattatgtggatctcttataatattgttatagtaaattattaatttaggtggtatttggtaatatttttttaatcagttttgtatttttaaaatcgaaaaagtgaaaatatttttcaaaaacatattctgtaaaactgtttttacttttcaattttttaattgagaatcaaaatattaaaaaaaaaaaaattacttacaatatttttttaaacaatttttttttcttaatcaatactttagatttcaatcagattcggacccaaaatcccccacaaccctggcgctgagcccggcctctgatctgaacctgaatccgaccccggacctagacccgacgtaattaaaataaaaaaaataaaaatagaaatgaagtttatcgaacacacttttgttttttgtttttaaaattgaaaaacaaaagtagttacagaacgtattttcgtttttcaaaaacaaaaattttaaaataaaaaattttactttcaatttgtgattaaaaaaattagaaaataaaaatgttatcaaacgacaccttagttaattaataacaaatgggagattcaagtggtcgtgctctaaataagggctgttttttttttttttttcttttttgaaatagcttgaaattgatatgagtctcgattaggcacgaataaatatgggtttggacgtgattcaatacgatactataaattggcacgacactaggcaccaaagtacttagcgtagtgtttaacgcctctatgacatgacatcttataa

SEQ ID NO: 87103 - DNA, 675 bp, Cannabis sativa
gcatgctcttcagatggatgaacaacttgtttcgctagatatgaagattcatgttttttattagatgtatattattttgataatcataacacgtagtataataatattatttttatttgatgaacatgatcataactagcatgtatgacataatgatatttttaatgattttgttcattgctttaaaaaattatattactatatttaggataatttaaactgcctctcaaaatatttaagagtatgttaatgctgacatcattatatacattaataaattacaataagccttagtgaagtgcagaccctctagagaattaaagcttatgtgctacgcatttcttagacctaaaactaagattttatttggatcatgaactttaagatggaaaaaaaattatatttttatgttttcattaaatcaataaattaaaaaaatttatggtatgattttataaaataaaaaaataaataaatcataagattactgatttccattatattttcccttataaaatattttttttggaaaattcaaggtttaaacaaggtctaagaaaaaaatattatcccaaaacattgaagagaagaaatagcataagaagaacccctatgagcctccttcaacctcccgcgcgcctccctattcaccctctcgcctatattttacccaaa

SEQ ID NO: 87104 - DNA, 798 bp, Cannabis sativa
taatttctaaaattttttaaaataattttatatttttattaaatttttaattaattttttttttttaatttttcagacatgatgagtttattaatataaataagcttgaattttttttttccgaaaaatcttagtttgtttaaattaattactagatttttaataatttaagtctgattttttaagatatgtatttattaataaaataaagtttgaaaatagttttttaggtataatttaagtttttaaagtaaactgaatatttttatcatatttttaataattttacttaattttttgagaatgaatagaaaattatattttaaacaactaatttttttaataaaaaggacaaagttttgtattggtcaaagttcagaaggtaaaaatagtaatttttaacggtaaaagaatcaaaatctaacacaaggggaattatatgtaactgttatattttaagaagaatttttaacaagccgtatattttaatgagcatgattaagtagctagtgtcaaaagttgagaggacaaaaatactaattattttattatgtgatagactataataaataattttttaaaaaaaatacaaaaatacattaatacaaaatatttgttatttttatgttttgggattttttatttacaaaaataccctttcaataaaataataaatggttttttttagttattttaaagtttatttatagttgtcaagatgttattttctctatttattttttatcgttttatagtttgtttatagttgatgtatagttatcataatgttaatttttc

SEQ ID NO: 87105 - DNA, 1009 bp, Cannabis sativa
  modified_base (521)..(524): a, c, t, g, unknown or other
cctatacctgtacaaagcattttggtaaaaataaaacaaacacagttgcacgatgattataaacaaataatgaaattcattaaagataacaaaagcatgcaaacccagaattaaaggctgcccagacagctagttgtctaaaaaattaaaaataaattccaagtttaaagaccgctttgtcgatcactttgtcttaaaaaaaaaggccttatggccgaacaaaaaaaagagatataaaaagaaagcattcaaacggttggagtcccaagttctttatactggtcttctgggtcagttggagctggaggatcatttgtctgagcggggggaacttcaacgttttggtcagctagagaggtggaagtggtcacctcgaattccccataggccacctgagaagtggaatacttgagaaacatgtctttggtatcgcccatgtaatcaaattttgtctggggattagctttccagaagtcatagaaaatctcgagaccagctatctctaaggcattcactttccnnnnaagcctctccacttcggctctctgctgcccggcctctgacttatacttctcaacctcagctctaagctcctcctccttggtcttcttctcttcttccaacttgcggaagacagcctggagagcctccctttcctcttgaaggccggtcacttccttagacaaggaggcaatggcggcttcaagttgatcaaaggcttgtagatctttggtcagttcagccaccttcttctcagcagcaagaagtttcttgttgacctctcccagttccatccggacagccccaagctgaaccctggcttcatcggcatccttcctagccaagcccacttttgcccgcatggtgttaaaaatgacaacattcttagaggcagccgacttagctcaggaataagcataagccatcttcaaaccaatctgtacagaaaaagaatatttaaatttgaataggtgaagaaggataaaaggaagatgtcaggaaggactta

SEQ ID NO: 87106 - DNA, 518 bp, Cannabis sativa
  modified_base (435)..(440): a, c, t, g, unknown or other
cgcacgagggggaggtgtgcgagggagaggctgcaatgcagccctgttggtcgaggtagctcggcgtgagcaagccttcagacaaggccatgtccaagtaaccttggtcaggcatttgtctgaagacgcttgctggtcgagtgttgcctgcatccgcgcgcgcacacgtgtgcaccaaaactagatatttaaatccaactttaaaaaatcataactaattcataaaaatttcaaattgagttctgtaaaagcttaaatttaataatttgtcatttacattccactaaaaataatttcagaatgaaactaaaattatttgtcattgtaaaattgcgatttctatacaatcatcaaatatgcacataaaccaacatgaacacatccaattcaacacaaacattattttaaatatatatatttcatgaaagtaaatcnnnnnnatggctctgaggccagttgctggggattattttactaggatctagatttactaccatgtacgttatttaacatcctaa

SEQ ID NO: 87107 - DNA, 1078 bp, Cannabis sativa
caactccttccacaagtagaacttgttagaaatattcttggacatgtataaattctctaaagtctctcaaattttcttataattcttgcactctttcaattctatattttgcaagacgtcatatgacagatttagacaaattgtgttggttgcgatctcgtctatttcctcccaatgtttgtccttcatcgtactagactttttctctatgcctaataatgccttgtgggtcttctgttgaataaggagatccttcatcctcttttgcaagagggaaaaattattgttgtcgctgaacttctcaatttccagttttcggcacgtcattctttagtctcacagacctctgtactggctaggtgatttcgaagaaagactgtgtttatatatatagcagtccaatcaacaaatgataggttcagacagtctcctaaacaaatttacttttaaaagtgagtttctaggaaagaagtggagagccacaggtggactaattaaattctagtctcctagacagaacttcttacaccatacgtaaccaatattggtgcaagaatagagctctcgaccttaacgctctgatgctggttgttgatgataatggataatattccaattccccttgaggattaatatttgcgagaaaatacaatggagactttgaaattctttgcttatgtaaagatcaatcacagcactgaacatattgcgaattttcgaatatcttctaatgtaaatatttttttttatgaataataatcaaagcaatgcatgcaaaagaattatctcgtagcaaataaaaaattacaataaattttctactataacaataataatgggtacacaatattattaaactctcaagttttgtcgacaaatacttacactaatgtggtaatctcaccaatttctatacaaaatgtttctcacaattttgtaggaactctatttttctttctctctctcagatttctcttactaagaggtattttctctattttttttttcaagagtctcactcttcactcttggaatagcttgtaatagttgtgacgagatgagcaaacgaaagggataa

SEQ ID NO: 87108 - DNA, 1721 bp, Cannabis sativa
ctttatgtccccagttttaaatttaatataatatctgtgagttgtctaacaagcaataaactccttgacataaagttcatggctgataatttttctattcaggacaagaacagcaagaaggagattggcagaggtgaaaccaagaatggtctctacactcttgatccctccttcaaagacactgtcattttcaatgtcactgctgaaacatggcactctagattgggacacctttctaataaacatttgaatcttttaaatagcaagttgaattgtaatgctactgctcttcacaaaaattctccttactacatatgtcctttagctaagcaaaggaaattaccttttcctaacaacaataattttgcttgtaatatttttgatttgatacattgtgatatatggggaccttaccatgttgtttctcactctggttttagatattttctcactcttgttgatgaccattcaaggtttacttggatataccttctaaaacaaaaatcggatgcattaactgtcatacctcaattcatcacatatgttcaaactcaatttggatgtatgatgaagtgttttagatccgacaatgctcccgaacttgtttttaaagatttatttaccaaacatggcattttacatacatgaatgattttacttgtgtagatactcctgcctgaatgaacaaaatgcatgcagtagctagccgaaagaaaacatcaacatctacttaatgtggcccgtgccttgtgttttcaagctcacttaccaatcaaattttggaccgagtgtgtcatgactgcagcctacctaataaatcgtactcctacaccaaatttaaagaacaaaactccctatgaactgctatacaaaagggaaccagattacactcacatgagaatattaggctgcctggtttttgcttccactctacccgtgcacagaaccaagtttgatcctcgggctagaccttgtgttttcataggttatcctcaaggtgttaaagggtataagctttatgatattaacactaaacaaattttcatatcaagaaatgtagttttccatgaaaatatttttccttttcacaaaattaatgaaagtattactaatgttgatcctttttctgagttagttcttccctcatcatctgttactaattcccccattagtgactaccctcctagtacagcaggtgatcaaaatcacaaccctcctaaaagaagctgaacaggttattgaagaacctgccactgcctctcaaagcacagaaatcagctcacaacctgctgcagaaaccgaaaatccaggccccaggagatccagcagaacaacaaaaccgcctacttatttacgcgattttgaatgttactcttacatacaggacaaaagctcttctccccatactcttaataaatatatgtcttatacaagattaaccgaatcttacaaagccttcattcttgcagtcacttctctcaaagaaccacaatcttatcaacaagctattcagtttcagcaatggttagatgcaatggataatgagctcactgccctaaagaacaacaaaacatggatagttgtccctctccctccaaataaaaaagcaataggatgcagatgggtttacaaaataaaattcaacagcgatggttcggtagaaagactaaaagcaagacttgtcgcacaaggatactctcaacaagaaggactcgattttt

SEQ ID NO: 87109 - DNA, 840 bp, Cannabis sativa
  modified_base (526)..(535): a, c, t, g, unknown or other
aatacattccgtgaaagtacaatcactggacaaaatcatatccctaataacatattgttaatttgttatgttttttttctgtttttgaaagaaatgttaaattgttatatttgatgttgaaaattcagagcaaaagtatcggataaggagcatggacaatatggttggatgcacataagacagagtattcataacccaaatatagccattaatatgcagtcatcactgcctggtggctgccaaacaatgactacagatttcaaacacaagtatgttaatttcaaatatattattcattaatcctagatacttctatgagagaattttttatttaaggttttttcatgatcgtctaatttatagttatttaaaatatttttcaaaattttgacagatttagaaaatttaatacgttggaaacaaagttcaaacaatttattacatgcaagattattttattttatacgtatgtaaaatagactatttaaatattattttcagcatgttaattttattttttattttnnnnnnnnnnttttaaaattttacaaaatgtcttaaatagctacaacatagacaccttgaaaaaaattgaactaaaaatatttctaaaataccaaaacaaataaagagtgcactatataatttttcaatcttaataattaattttttttttgaattttcttctgtttttttgcagatttcttatggcaagtgggatacacaaagtggttgatattagccaaatagaaaagtacgagaaaaatggacaagtaaattgagtgactgctaagtcttgtgatattgggaagtatatatacatagcaatagaaatcaatg

SEQ ID NO: 87110 - DNA, 1496 bp, Cannabis sativa
taagactgtttctataggcattctgagcatgtagctgttatgtttaatagcttaagacatcatgatagaattaagatcccatttcgattcattgatgtgtggctccagggtgatgagtataggagagttatagaagaagcttgcaatatcactacgaggggtttccatacttttattctgtcaaaaattcaaaaatatgacttgggctctaaagaagtggactattgagtactttggcaagtgcaaaactaaacttgcaatactggaaaaattactcattaaagtttaaagctagaatctaactcgtgaaaatcatgaatttgaggcctctattatgttggaaactgaggagatcaaagcgcgccaagaatcaatatcgaaacaaaaatccaaagagctatggcagaaagggtggccataattataagttttgtcatacctcaacgatggtccaaagaaagaagaactatatttaggacattaagaaggaagacgatttttggattgaagaaagataggatattgatgcttatttttgaggtagtttctctagtttttttacctcatttaatcctattattgatggcgaactctttgaccttattcctgttgagaccttaattcatgagaatacctcccttactaatgcccccctaatagaagaaatttgtaaagtggtctgggagctctcaccacttgttctaggccatgacagtttccatgcaaaattctacaagaatttttagaatcaagtggagaaagaggtggttatgtttgtgcaagacttttttattacaggccactttgtctcatagattaacgcaatgtcatggtattgatcccaaagcccctgcttgatttgatgattatcgccccagcttatgtatgttagctataaggctgtcgttaagctcttggcaaataggctgcataacattttggataagcttatatcacctaaccaatcgccctttgtcaaaggcagatggatagctgaaaaactcgattatagtccaagaaatcaccaatgatttgagaaagaagtcgagtggtttggcctttgttggtatcaaatgtgacatgtctaatgcttatgatttccttgaatggagttttattgaaaaggtcgtacgtgccttttggttttgatcaaaaattcatctcactcatcatgtgttgtatcacttaagtcagcttccaaatccttcttaatggagccctaaaaaaagctttaggtcttccagaggcattcgacaaggtgatcccatttcaccttacttgttcattttgtacttagaggagctatcttgtcttttgtatgatgaataggaaaggcttggaaatttggtttgttttagggtaggcgggtgtagcctcgcaatttctcacctcatgtatgcagacgacaccctcatcttctgtaacgcccttacttacgtaaaataagatgccataaataaattggcgttaagatactaatgttgcctttattaaaa

SEQ ID NO: 87111 - DNA, 917 bp, Cannabis sativa
  modified_base (607)..(608): a, c, t, g, unknown or other
ataggcaacttgggccgcacagtactcgaggtacatgtccttagcgtcgcccaagtagtcaatattggcccggggattagccttccagaaatcaaagaagaactcgaggccgacagtctctaaagcattgaccttctccttcaaacgatccgcctcggtcacctgggcgtccttatcctcctttagccgaagaagaacttgccgcagagaactcctctcatcctgaaggcggtcaacttcagcaaataaggtctcgatggtttcctcaaagcgatcagcaacctcgaggtcctttgttagcatggagataatcttctcagcggtaaatatcttcttgttggcctcacccaactcatgtcggacagctccagtctccgccctgacctcctcagctatcttctttgccaagtccacttccgccctcaaggtgtcggacagagccacactcttggaagtagcagatttagcccgggagtaagtgtaagccaacttcaaactggcctgcataaaggaaaaagtcagcatatggagctaagtgtgaaaagttaaaagggaagtatcaaaagagactaaccctggtgagctccttcaagactccgcccaccannacatccagagatgagtcgttgtcagcaccagccagttgctcgctaacttcaggaaccagctggttcatgtagtgagccagcatcttcttgcccttcttggcctcaggcagcacggtcacgagtggagttggtgcctgcactcgctcagggattctcctgaccagttcagacccagttgatgatggcccaaactccttaggcttggtagattcgggaatagaaggattcgcagcagtcagctcctcggaaaggtcaataacctctccagaaggtctcttctccgacgacccctctctgcccttaagcttc

SEQ ID NO: 87112 - DNA, 1000 bp, Cannabis sativa
  modified_base (557)..(570): a, c, t, g, unknown or other
  modified_base (596)..(599): a, c, t, g, unknown or other
  modified_base (697)..(698): a, c, t, g, unknown or other
  modified_base (915)..(917): a, c, t, g, unknown or other
tttaattaatacttactcttacttagactacatcaaacaaatcaggtttttagacttgcgttaaggctagaaagtctacttgtgagatggtgattactctaggattagagtagtgatttttggagaagtgtaaaaacctatctgaaatctcaaactcgaccagtgaatggaatgttaaagcggccaagaaggctacttgataattattcagcctatggaaagttctatatagtttttggcattatttcaatcatggattaactgctagtgttactttctgactaacacagatatagttgccaaatagtaaagaatccagtatctcaagaggagcagacataaagaaaagaatttcacaatattaaggattaggtgactaaggagatgtaatggtggagaaattatgtattgaatacaacctgtcaaatcctattacaaagataatactacatgctacacttgatctggatataggtgttgagattaattaaaatgcccttttagttttatataagtgcaagtgggagtttgttcggattttatgccctaaataaaannnnnnnnnnnnnnatcaaatttactaattaataaaagannnnaaattattttatgttgcatagttcacatgatttcttccatgattatatatttaatgtataaattctattaaacccagaacatatagttattcatgatnntagtgttgtcaacacagtagaatataaacgtgattatattttttaaagtttacgtcctatgatttgacactacacaagatttagactgacatgataattagtgataaagtatacttacaccttcgataagtctcaagtcctttctaagatattggtaaagtatgctaggatcggatgtatggcgtatacatagaactggaccgatattgaacttggnnnagatatcataaacttaccattatatctatctaagtcaatatcagcttagttgatcttaggtcaatagatcttaatcctgatat

SEQ ID NO: 87113 - DNA, 1295 bp, Cannabis sativa
aatttcgggtataagaggtttcaaaatgaagagaattgttttttgcgtcacctaacaaatgtcgcaaataaaaaactatttgcaactatggcatatatgtcggttttgtagattgacgcaaaatctttatatgtcaattaaaaactgatgaaaatattcctttttgtagtaatcactactagaaaaataggctttagtgactcactttgagtaactctaaaactatttagtgacacttcaccgcgcgtcactaatgagggtgactggaaagacagtttttagtgacactttacatgtgtcactgaacccttttacaatcactctctgtgcgtcactgtaagtatttagagtcagactttgtcataatcagctactctttaagagtgtcactatatctattttttttttaaatagaaatattaatttttttaaattcagattatatattataaaatttattaaaataatttaattatttatattttaataataatatacttaatcatataattctcctaaaaaaataatcatataattaattaattatatagtaaatcaatataacaaaaataccaaaaaaaaaatacatacatatttatgatttataatttacaaaaaaaaaattacataaatttacactctgggagaaactagtcggacataaatgtacacatacagaaaaaattacacaaatgcacaaaaaaataattataaaaatacaccatttcttcagagtagatctgcaaagcataacgttggaggaagcagatcgggccatgcactctcaacgccgacacatttcttcacggaggcggaacaacagcagggcttcgtgttaccaccgtctgcgactatggaagaaaaaggtgtcgagatacggtttgatgcgcggctgctgtgaggttcgagacgatcgatggagaatgactgcgtgtgagagagcaacggggttcatggagaatgactgctgtgaggttcctgttaccaccattgctatgatggtgagagacgagagagcccaggacttagataatagggctgagagagagcaacgaggttcatggggtttggcttgggctcgaacggcgaaaagattgtctggtggctgccgtcggggtggtagagcgcagagagagagagagtacgattgagagaggatgtttggtttggggctttagggtttgataatgtcccttttatatctcattaatttatttacttaaataaataaaactaaaggtttttttaaaaaaaataaataaaattaaagaaattaataaattaaaaaaataata

SEQ ID NO: 87114 - DNA, 1565 bp, Cannabis sativa
caatcttattagatttctgatattattctagggccttttctcttatgaatgtttcgtccctttttcagtcttatgtgcctctatttataattgcatagtcagacagttaattacaagggttgactgaaatctttacaacaattatctcctcaaatcgtggggtttaattacatatcacgtaagatagatgcggttaatatttgaatatcacacatcttgattagcttgcttttttactgggtcaaaataatcatgcattaaacacgttataaatcatatcgttctgggatgcctcaataagaacccagtaccaatgacattgatagcgagctggagcttttcccgtatctttctgaggttgataatataaatctcgtcgctcctgtgctgaagacataacactccatctgacaatcacaattcttggcaacaaggtgaacttctacagtcatgcgcatgtcttcctatgacgagatggacgcctcgctatcagttgcttgggtttacccgtctattatacttactctgtatactgtatattatacgctaagtgtcttcacattcattatattttgcttacgtctactcatgcttaacgaggttgatacctcgccttgcgtattccttgacgtatggtttctcgctaatgtataaggcaacagtttgtatatgcttatctcgcgtaagaccttatagtcaacaatttgtaaatatactctgtcactttcgcatttactgagttattctatttttaaatataattactgtttcatgcattgatccctactccttccaatctgacacatgtcatccaataaaatagtagccgaatttcgggtataacaattgccctttaaaaagtttttttaataaaaaaagtactttttaaatgcttacagtgggtatattcgtcacaacccctttcttcaagaccacgcatggcctcaattttaaagactccacggtttcaagggtcattattagcattaatgaatagccttttcatcttcttcctcatttccaactgttagattttccaacctttagccttaccattactgggttctaaatataaaacggtggctcagtctagcgatattccataaactccttgtttttggtaaatttcatccagaaattggattgtcactctcctgtgtagatgtcccatccaggttcagaaatatatccttcaaaacttgtaacgctggaatataccaaccgtttttcctctccatatgttcccaaaaacttcaaacctcagtttaaattggaaacgacagattccaagactaaagatcgtctgattaatccaaatcaagtagatacagttgatcattataggtgatccccacaagaaatttcagagggtaagcatcatcctatgcgaatggtggtctgatttgaattcgtcatttttattaccactgttgcttcattgatcttttatatttgtctctacgggaatgggcagagattttgagagcaagttcagaggtcctccttaggctgacaaggaattcaggaagaaggtaattccggttggcgaggtcatggattctact

SEQ ID NO: 87115 - DNA, 810 bp, Cannabis sativa
ttataattttgctacttgctacttgcatatacttgcatatgttatttcattatgttttcattatgtttgtttttttttttttttttgtaaaatgcaggactgggtttacaaatacagtcccaatgatttctacagatcgaagtgtgtatgtacgagtaatttctctattattaataacaataagaatactttatctgtcaatttgttaaatatgtttcgtgacacctaatttggtcattttttgaatatacctgactttgtttttcacccccaagttgttcatagcctacttttgaggaaggtataccagcccaatcccaaagaatttgggctaaggttgctagtcgttgtatacggtttaatgctgagaagtattatcattgatcataaagctatagaggatgctttcttgggaagtaggtggggacaggatgagtccctaggttcgaaactatctgttttgtatttcatacaatgtttccttcttagcaatactctgaataagtaagtttctaggtttgatctagatgtcgatgacagcagtcgatgggatgagtattgttggggtagggagtcgtttgaattgactattgattcttttaaaggaagaatagagcatgggatcaaaatgaaaaataaaaaagaggagaagggaggtcagtcctatgatggttggtatagagtgttgggctgtccatgggtgttcattgtttggttttatgaatgttgtcctgcgatggtaaacaccttttgcaaaaggtttcatctaggattccaagaattcttaattggaccaatgatgttgggacc

SEQ ID NO: 87116 - DNA, 619 bp, Cannabis sativa
ccgggctgccatagagatgccattagatgtctcatggcatcaaaatcaatagatcttcccgtaaggaactttccgataagacaccatctatcgtcaaagggctgttcatcaccctcagcctccccttcaataagaacgccttcttcttcatcatcaatctgaaaattctcatattgttcagcaaggtcacccattacacggctactagatgccatagcaaacaacaccaagcgacacaaacaaacctcttgtgagcaagacagccacaagactcaccactcacaaacaaaccaacaacctgggacgacaaggctcaccactcatacacttttacatacatacataccaattcactcaaaaaagagagacgtcattcaatagtactttttttatttgttagctaactatcacttggagattataattaattataagactttggtaacttgtttgtactataacattacatgtacaattattattgtttttttaaggaaaatgtaccattattatagaagttatttatggtataaatatttaaatttaatcaattataaataaatatttaagtgtaatttttaacagttataatattagttatattaattaaaacttacat

SEQ ID NO: 87117 - DNA, 1664 bp, Cannabis sativa
cgatgcacattttctcctccaatatttgcgattatcacaagtacatacgtttggggatagtgtacccacctggcgtcactctccatgatggttatgtcatcacattccttcttagaaaacttctcaggtcgctcacttagattgtttacattggtgagcgatttttctcttgcttctttggcatataattgttgcaacttcttcgaatctccaccaatatgtggccctacaataatagtcaagatgttgcggggagttctcaaaccgcttgcattgtttatgtcgttagtttcatccgcgtcggatgtgtttctcccttcttcttgtatttactaaattttccctcgcctaatcaattcctcgatttcatcctctaggaaccagcactccagagtggtatggtcgatgtccttatgatacttgcagaattttttccgattccttttatcacgatttcctcggattggcgaaggatttttaaagactccatttttctcctcgatcgcataaatgcgatcgcgaggaactgcgaattcggtgtaattgagaaagcgcggtcctccttttctctttggagatgtttccttcttggaaggggacttggcaaccttcagacttcgctgcctttgggggttgcgtcttcttggtcttcgacctctggaattctttcctctaggacttcgatagcgcgattgaggtacagacgactcgcatttttccttcgctctttccagtttctccaaagagttctcaattctcttatgcggcttagccatggcgaagaattccaccaacgactctggtcatcgagcttgtaactccttccaagaattaatggcaagacacctgtaatcaacatacacaccaacgaagactcgggggccttctctactttggttaccttagcgttaaaacatttaaaataatcttgtaaggactcaccaacttcctgtttgatgttagccagagttgtataaggcagtttgtatgtcatcgtggcctggaagtgcatcaagaataggtttacaaaagtctcccaagtcaagataaatgcttcaagtaattgggtgaaccaatcatgagcattgtcctccaaggttgccgcaaggatgcgacattttgctagctatggtcactggtctacttcgataattgtattaatttttttctaaataatctatgggattagtagtacctttatactttagcaattcagataccctgaatctctaagggagtcgagcctgtcacacttcttcattgaaaggagaggtcccatggagtttataaagctttctctgctgctcaattatttttaatgctcgtagaagaacactctgatcaatatcccctggcacgatagggttgttttgagttatcgctggtgcagtagcaactgctgctattttagttaggatcactaccacggtagtcacagttggtcattaggagggtgaacaatgttagctgggttattttcattatttatgccttgatcgcccacttggggatcacggggctcatctcaatttcaaggtgtttgggatcgcaccctaaaatttttattgaggcagtcacaaagattgcccctgtgaacatggtatctccttccttgtcgtgtcttcatggagccagacctagtataaacactaagtgtacgacta

SEQ ID NO: 87118 - DNA, 800 bp, Cannabis sativa
tttcacaaagatatcctttgtgtgaagaagaatatccaaggaaaacacattgttgagttcgaaactccattttatacctgttgtatggcctgagatgtggataacaggcacatccaaaaggtttgatgaaggtatagtcaggtttttgtcccagtaaagtctccattggattgctgtagttaaggacaggtgttggcaacctgtttatgagaaatacagcagtgtggaatgcatgccaccagtagctgaattctaaaccagattgagcaagaatagttaaccccatttctgtaatatgcctgtgtttacgctctgcacgcccattttgctcactggttttgggacatggatgttgaaagtggattccttggtcactcaagaaccgcgagaaaggtctgtattctcctccccagtcagcctgaactttcttgataggtaaattgaactgtttctctaccattgcttggaatttgacaaagatgtctaaggactgagacttttgcacaagtggataaatccaggtatatcgactataatcatcaatgaaatgaatatagtagagataaccatctttggatttgatgtgggatggtccccataggtctgtatgaatgagctcaaggggttgagtggctttggaatatgtgctagagaatggttgtttatggctcttgccaagttgacatgcatggcaaaaggaaagggattgtgtattggctttgtggttaatatttgtaagtatcttttggagaatagtgggagatggatggccaagtttgtgatgccaaacatttatgtca

SEQ ID NO: 87119 - DNA, 993 bp, Cannabis sativa
ttgatattttacaacttgtttggtaggctgtataaatgtcgtattgtattaaataacaaataacattatgtttagataagctattatattacatgaattattacgaccataaattttaatgcaatgttattcgtattatttaatacataacaaatgacccgtattagcttgtaatataatatttacaaacgatctcgaagtcaatctcggctccgaccctagtcttcgaccccagacccgaactcggaccacgaacctgaactcggacccaggctaacctagaccccagacccaaacttgaaccctagaccccgaaccctagatcccagacctgaaccctagatttgaccctgaaccccagacccagacctgcaccactagaccttgacctaacctggacctcgaacccgaacttggaccccaaaccccaaacttgaacccataccataacctggacccagtgacttttccagtgctggcagcaaactccagtgactttttcggcatgagtgacaattccagcgatcactagtttcatctgttttatttttttttaaaagagatatataaatatgaagggaattttaatatttttatggtaattcaattaaattttaattttctatgaatcttaaattcagattctctttttgatgttttatattattttttttaaaaaaatatttttagtttgattggttagataatgccatatttagtgtcatttactttttatgtcatatttatcataaccttaataatttttcccatattttgaaaatagcccttataattagtcataattttttcacttttaatcacaagttttactgtgactaaaagtaagattttttgtagtgtgtcttaggccaaaaaatctaatttgtttttttatatgaaagtttttatattttattataaatagtggtaaaaatctaaaatatagtattttaaaaatgtaattgagtattttttcttaataaaatataaatt

SEQ ID NO: 87120 - DNA, 611 bp, Cannabis sativa
ggagtccacctcctccataacagtgtccagatgagttttcttgcctatgttcttccgaattgcaccatggttgaggtagtgtggcggctagcaaacttccttcagtcctcaatgaaagtaccaaaatatttaccgggatttttaaaaactagtaaaatagagcttaggaaagaataaaataatataatggaaagataatttttatgtggttcgggcgttaataatccctagtccacgagtcagttgtattggccttactgcgagtgtttgaataataaaaatgtttacagtataaaccctagctctgcactccttttatttctcatgaagaagaagaaaggttataggaattttagtagaggtttgactagtataaaattgttcaccctttgtacataaaaaaataatggtatttataggcatacatgtgggtaaaagcataccctttacccacctaggcttttgtactcaacacgctgcaagggctagtactacaacatgacgattggaccgttggttggtaggaaccttttccattgtgtggtgtacgactgtaatgaaggatttcatgtaaacgaggacacgcatcattcaaaggtttcacattgaaa

SEQ ID NO: 87121 - DNA, 685 bp, Cannabis sativa
agtaatgtcaaacatggagcccactttatataatctacttgacgctctgggatgtcgatggatacccaatatttcaaacttgaagaagataaaagttcagtttaatcattcaaagaagaggacaatctatagaaaaaatctctaactatgaaatctcagaatctattcaacaccaagaactaataacaataactcaaaaacaattcctactaactgaattgttttacaagaattagcatttctatgtactacttactagatcagaatacatatctctgaaattaacatgatgtttcaagatttaatctttgtggtgctccaaaaaaaatatgtaagtcataatcaaatacttgaaagccaacagtaaaaaccaacccagtaagtaaagtacctacctctctcaaaggaattgagaaaattattcatgggaaatgttgtttttggtgagaaacccaactgttgattcccttatcaactatcagattaaaatgcatcttcttcctcgtcgtacattgttgatggggtctctctttctgtttcaatgaggttgagcaacaccagcatccattaaaaaatcacacacaaacacgacagatttgtaaggaaattagatcagtacctgacactgaaaacagtgacgggcttttcaccaaagagaaggatcttagagtccttgaccttaagc

SEQ ID NO: 87122 - DNA, 704 bp, Cannabis sativa
tgaaaagtcaactcattctcttctaatccatagtaactgcatacttatgcgagaaatctattctcgaaataataccaaagtttgttaaacaatcttaaccagatcaacactttctttcctattctaacctttaaccagatagacctgattaatctaccttttggagataactaattctctactaagtaatggagtctcaaaaaccctaaattataattatcacaaagcctacccagtttattattcacgctagctaccacatgcaaatgtgtagttctagtgatcaaccaatacttgaacaagagaaattagtactaagaagttgacctttcacctgagtcgaactagctgctgcattggtctgagtaacgacaacctcacggactgaagtgatcaacttctttcttatattctttattttttcagttgaggacaagtcttctttaagtgactaataagtccacactaaaaacatgatctttctatatctgatcgtggataatccctcttgtatgtcccattaggccacatcagaaacatacttttcttttgcactcatcatgatgaagtttcttacagttgggaatttcgagaaaatataagggccttcaaaaactccccactgatcttcttgaacttgtttttcatgagacttcttgtatggtgactctaactgattgtcagcaacaaatcgtattgctaga

SEQ ID NO: 87123 - DNA, 621 bp, Cannabis sativa
agtatcttaaagaaaacacctgcgatcttcaaatccggagcactctttttaatcaacgcattgacagccaccaagcaatccgagaaaaggaagatggacgaccacccctgctcaatggcccattgtagagccatgtagatggcctgaagttcagaatcaagagccgagtagccttcagtgctcttacagattgagatccaagtagatgaattcctgtcgaaaccgacagcagccaaaccgcatctcccatctttgaaggagccatccgagacaagaatgtttgaattgaagggggccctttgcaccaagtggacagttttaagggaagcatcagacgctggtagatcgttgatacctcctaattcctcaaaccttttcctcacttctgtcagcaaactcaaacaatcccgacttctcccacccagccgaatagagttcctgtaattccaaatggtatcccatatgacatatccgcacacaagcagctttgaagcttcctcctcttccaaatcaccacacagttcaagaactaaggacataacattctcgccctgcagcctttcgattctgagaggaatggggcctccaaaccagagggatcgagttaggctacattcaaag

SEQ ID NO: 87124 - DNA, 679 bp, Cannabis sativa
  modified_base (552)..(555): a, c, t, g, unknown or other
attggatccaaaatatgaaatccacacttagtgcagattgaatgttatttgaccaaaaaagtgcgaattaaatcggataaacatccctaataattattttacaacactcataaatatacttttttttgtctaatgattgtcaaataagaattttataaaatatatatagtatagtgcaaacatataatggtacgaaacacaacgactccaatagtataaactactaaaaaattaatttatctatacaaagtgattggtttatatccaagtttcaatttaaaattagattaaacaagactctaaataagagaaagtcatatgtaaatattttggatttaatttaataaaattatgtttttgtatttgatatattagtaataagaaaagtttaatatacatttggaaagaccaatgattcgaaaaaacaaaaaataaatatataaaaaattaagggccaatgaatgcgttttgcgtacgcccactaacttactatttgattggattgaacaaccaaaacataggaatagatgcttttcttttcttttttttttnnnnttttttttttttgagaaaaataggaatatatgcttgaatgcttcactttgtacaaagtaaattaccttttgtcatgctattaaaattaaaaatggggaaatgctaaaattataaggacaaaaca

SEQ ID NO: 87125 - DNA, 1776 bp, Cannabis sativa
gttcttcataaaagtaagaacacccaaagtcacaataccaaaagtggggtattactagtccaaatttcatgaaatcaaagccaaaattgagttacccaaagcctacactacacatcacaagcataaaaaaataagattttttcaagagttaacattttacttacccattcaaagattacaacccgagaacacaagaaatacagcgaagaggctcccatgcaccatcacagcttggaattttcttctctaatttttattttccacaagggagctaattatcttccttgtaaccatttatttttccttgaaatttattttttaatagtatagtggaaattactattggggttatgctgtaaaattatgtaaaaggatactttattttttctttcttaagtttgggatgtattgtagtagtagaggcatggtgttcttggtataaggcaactaagccatcaagatggacccaaagaacgtaactctaacaggaaaagttgttaacgtattgtcatactactagaaagttggggtgaatttttttatccatattttgataagaatgacctagtttgtatgaagacatgtggcatgagattacaatagaataaacacacaaagaagacgtaaggtcaccttacacaagggtataacccttatgaacttaggttttaccattaacatgaaaggccctctaagacgaactaagccacaatcacctcatagagagttggcctaggtcgagtacccctagggttcggctgaggttgagtagcccctagggtctacccaagccaaagtctccctatacaaagagggtgttagccccaatcctcgtccaactttggaaccataattcatctccacttggacatggatgatgatttatttgtccaggatctcaaggttcgtcctgattattcaacaccaatccttgttcatgagttactctccatacaactacaagtattgaaataacacatgaacatggacatggagtcctaacgtatgaagcaaattcatctttccaatggatatggcacaaggtcgagtcccataaggacagtctcccaaagaattatttgcacaacatttgataagttagcacatacaaaatgtttaaccccgctcaaagctcaaaagtggttacaaaccaacgaaaaatagtaggatatcacaacaagaatcgtccctcaaccaatctgaaaaatcaagggaacagttgatatattccagtaaacaattagggtttagtagacccttaggtcgtgtcttttgaagagagatgcacccaccctttttctttataaggggtcatacctggccttagaaagatatccaaaattcatgttcactaagagaaactctaccatttgacttcttgtattcaagagtctgttcttgacatgcatataacattaataaaacacatggagaataggcaattaccaatacttgaggccaaacctctttaaattctggtattctttatttgtatttattacatttttgttttagttctcattatttacgactccatgttcgttggctaaaaaactaaaaacctaatcaacacaaacatacgtatgtacattgagaagctataatataatttctttttagcttgtgactctaatttctttctgtcaacctaattttttatatttataaaatttctagttattattttaattaaagaatatttattaatgagaaaataaaaatataaaaaagaggaatatattaaaaaaaatgagcagaatacatacggaaaaactt

SEQ ID NO: 87126 - DNA, 717 bp, Cannabis sativa
  modified_base (64)..(75): a, c, t, g, unknown or other
ttcttatttataactgccccaaattgggacttgattttttaacaaattagaggttattcttgannnnnnnnnnnntaaatagaggttctactgtatgtatagggtgtttattgaagaaaaaatcgtctgtcctactcctgtccctccaataaatagatgccagatgttaactttctgctctctcactcatctattaactttttaatctatccatcactttctttatctatctctattccccaaaatcacttcccactagatatggaaattgggcggttaatgcatggggaatgcaatctccgttcccatccctgctacctatttatacccctattcccgctccatcacagtctaataacttacgtattcggggtaggggaatacccccggttatggggaacccatcgagtatccattaagccaaaatgataaaaaaataatttaaaataattgaaaaaaaaaattaaattaaaccaatattctcacaaatatttattatgcattcataattcatagaagataaaagacaaatctacctaaaaaagtattacctagtagaaaataaaaaataaatatgttcaaagttggaaaaaaaacaaaaaaatcataacccaagtatagtatcatagtcttgtacctctcaagtctcccaacaaattaaaaagcaaacaaagatgaaactaagaatcgagaagaaaatatctttacacatgtaat

SEQ ID NO: 87127 - DNA, 509 bp, Cannabis sativa
cagaaatgatgggaactccatttactattagtttacgatgatgatagaagaggagaacaaaaaaataaataatcatgtttgtgggaaacaaagtgtttataggttgcaagtttgagtgaatttacattatgaaatataaccttataatgaatgaacctgttggaactttggatgaattttacaaaaatatagcccgcgtttagcttgaggtaatgaaatggtaaagaaataatttttatttcatttttatgtttggttgcattttaaaatattagaatatcattcgaatggagtgacttttttattattttagtagaatgactattccatttgtaaattataatttatttaatggtcatataaatattatagaaaaatattttttagccctaaatcatcattagagtatcatataagtaataatatttaattatttaaatttatttatatgtataataatattaatacaatgtaaaggccttcaaaataatttttcaatactaaaggta

SEQ ID NO: 87128 - DNA, 1031 bp, Cannabis sativa
tgggattgcacaacttacctagtatttccccttacggatcacgggactactgactgtcacattaattgtttactaatatatgtcatatattgatgtattaacactgtgtatgatcatcacactttattgattattagttagggttatttaaatttaggttaattaataccattttaaattttatgttttttttactgattgaaccttgtattttttataatggcataaaatagtattatgaactaatttttactcaaaataaaaattaataatagctcgatatctagagtttttatgacaaaacttaaatacaatatctgcatctatttttattagaaattatcttcaaattggttatattatttaaaaaaattatcaaaaattgctattaagatactattttgtactattttaaaaaatacaaggttcaatttatcatttacaagacagatggtcaaattaataacttttgcaaacacaaaattcaaaataatattaaccttttgaatttagtactatatttttttgtaaaaaaacaatagaaaataatcatataaatttatataaacaaaatatatgctatagtacttagtatgaaatactaaaggacactaaagatacatattattacagtgtatttacgtattgagttttatatatatcttaatttaataatcataaaaatccgttaacattcatgagccaccaccttgtagtggtacctgacactataatacctaataataatttattaatgactatgactcaatactacaaaaatagtttttttgacgtttttaaacagttatttaaagtattcttgtcggtttctataatcgttgtctatacgaccgtcgcaaaacgggcaaaattagcgacagttaaaaattatcgctaatgtggatttctcgatggtttaaaactgtcgcctataacagggtataggcaacgatttaaaaccatcgggaatgtaaagcccgcttagttaatttggaaattagcagttgtttgtgattaattatgaaattatt

SEQ ID NO: 87129 - DNA, 564 bp, Cannabis sativa
tctcttatgggctcttatttatagagccaaaatacttccaaaacaggtatttttcgtgttacacttagtggagaaaatggcactaaaagttgagaaatggtatcataggattctgtgcgtgtacagattgtgggagtagcaagcaatgtgtcacacgccaagagtggagagaggagattgaatgtgcacataagtcgctactgagggaagtggcttcatgatcatgcacgtctcatttgggatcaaaaatgaagaataaagttgatttccacgtgtcgagctcaaggacggtagttaaaggaaaatagctttcgtctcgtgttgaaagctaaaaacaattagattgggccttatgtgatttaacggaccacgtgaatgcataaagtcaagtggatcactcctccatgttgagttgactcaattaagtggacttataaatttaattgaaaatggagaagggtggaagctgggccacgttattgaacccaatcaaatggacacctcactttgttaaattttgtagtaacttaggcttttacattcatttttcattataccactttg

SEQ ID NO: 87130 - DNA, 861 bp, Cannabis sativa
atgaaaaatagttttctcacttttgacaaacagggcacataatttgaactgggacccttttactacttaattgagtcaaggtgggtaaataatttgaagcaactcgccataccaaattaagagctttcagtggtacctttaaattctagagcttgcgccagaactcgtttctgaaaggcctaggcccaaactaacagactttcgtcatcatcatcatggcaaaacatccgataccctatctcaaggagattcttccccaatttctgagtcacaaactctttcttcagtcctactctcctcgttctcttgagatagcatgccaagagaaaaggatcctcagacaagaataattgagggcaagtccaacaacacagctgcaatctaatttcctttctgagcttgtatcaacttgtatgtattacacaccgagtagaaaccatgatgctccttagacaaaaaaacgatcatcagctacattcggactcaatggaactgctaaaatatattgttgatcgtgctcattaaaagatctttaataatatctaaatttcattcactcttatcagtatacatcaacgagctcaccttatggcccaccaaatattgggcacctaaagtaacaaaagggcacacatcatcaagaagccatggctgatgcaaaatatcaaccttcacactagaacctgtttcccaacaaacccaagacatgaaaagcttttgcgatttcgaagacgctcttccacacaaaacttggattattaccaagggatactgaaagaaaattatccatgggaaaataacgagccttatataacctactcacaaaagagtttggtttttgtcagtaaacgccacccttac

SEQ ID NO: 87131 - DNA, 722 bp, Cannabis sativa
tgtaactacaaggactctgattcttagttttggaaaaatattgtaaaagccaacacaattctgagaaaggggcctgtaaagtggtcgctaatggtagagatacttgtatctggagggatccttggattcctcattgcaaaggtttcgttccgaaaccaaagggtgtggtttttatggataacactagggtgactaaactcttgttatctagtggagagtgggacttacagaagctaaacagtcagtttgaccaagagactatttcgacaatcttaaaaggaggcaatccatcgggccacggtacgtatagatggatttggactttggaaagtaacaggcaattctcgtgcaaatcagcttacttaactcaagctctagagagagcccctcattgtaaggttgccccgtcgctgtggaataagctttggaatagcaatattttggagcgacataaggttctttggtggtgtatgctttcaaatgcgctctctgttagaaatgagattagcaaacgtttttcagatcgaggattctagttgtcctttgtgtggtttgagggaagaatctattgaacacttattcctctcctgtgaggtggtgatgcatttgtggcgatcgtctccttggggaatttaccccgtttgtgatgcttgtattcgtgtctgggactgggtgaaattcatttgggatcttagaaatagggggatccgggttgaggaagt

SEQ ID NO: 87132 - DNA, 573 bp, Cannabis sativa
  modified_base (225)..(225): a, c, t, g, unknown or other
ttaataatttttaaaacattaatataataaacattagaataagatattacaaaataatattacaaacattaattacattaatatatttatgttatagtttaattattgatgatttatattatttaatgattaaaatgtatggtgttatgttgattcaaaaaaaaaaaaggtatggtgtcatgcaagaagttttcaaaatgtataaatttttaaaataattttttnttgcacattttttgtaattatgttatttttgttgtacatttttgaaaaaaactctattagtattatatattttaaaaaaaataaaaaatatagtgaaaaatataaaattttaatgaaaaaagaagaagaagaattttgcaatatataaagaaattggtatatggttttaaattaaaatttgatgaaaaaagaagaagaagaattttgcaatatattttggaaaattgagtagaaaaaaaaatatatgtaaatgtaggcgccgtttggtaacacttttgttttctaattttataattacaaaatgaaagtgaaatttttgttttgaaaaattttgcttttgaaaaacaa

SEQ ID NO: 87133 - DNA, 799 bp, Cannabis sativa
  modified_base (211)..(219): a, c, t, g, unknown or other
tttttgttataatttacatcataaaatgctattgtgcattgcaacacaatagcaaatattgtagcaaatatattatttgttagttttttgtgtcaaatttagcacaatattcactacaaattattcacatatataaaaaaaacttcaataatatatatacaaaaataacaaaaaagttacaaaatatggttgtacaaaattttaaatattnnnnnnnnntttatgattttatttatagaaaatatagtcttttgatgtatttttatgttgtactcttttaagtttaatgttgatttttttgttatttacatgttaattttttattactatttgaatattatttttttgttatttttatgtaatttttttattatttttatagaacatataatatataaaaaatctattaacgtaaaaattgaaaaaaaaaataattaaacttatgtaattatataaaaaaaagtgatgtaaaaataaaaaaaaaaataaaaaattgacgaaaatttaaatgtcatttttttttttataatttttttattatttttatagaataccctaaataatatataaaaaaaaaaattatgaacgtgaaaattaaaaaaaaaaccttatctaattataaaaaaagttatatgaaaatgaaaaaaagaaagttgaagaaaagaatagacgacacgacattcatttaaaacaaaaggctttaagcgctttgtcccgataggttggttgagtcaaatgatgtattcgaacccgactcacagtaacggctaccaccaacagccgcaacaggaccaacacc

SEQ ID NO: 87134 - DNA, 699 bp, Cannabis sativa
ttcaagataaaaaaaattaaaaataaattgcaatagcggcgggattaggttaatatcggcggacagtctgccgctattaatgggatgatattaagtgcaggaaactcccacgtgctacatttaaaactttgtagcagcggaccaataccagtgggtgtctgccactattaattttaataccagcgggggttattattacctgtggatcctgccagtaatagtattctataaaataccctttgaacctgtttttcctttttctttattttccaattttttttttcaatttcaaaaattttctctttttcttccatttcaccaccatttctgaccatttcaccaccatttatcaccatttctctcagacgatgccattgttctactatttctctgcaaatcgattattttttttttttgatatattatactctgttttaatataagttaatctagtagtttttttgttatatttatatatgtgtgtgctaatatataattataatattttttaatttttttttagatttaaaaagtgagagtttaaatttcgggttgtataaaatcacaaatttgcatctgtataaagtatgttttatttttggagtttttaattttcggtatgtaatttaaatataaaatatatattatttttagagtttttttatacacttaaatatgtaagttatttatgtttttatt

SEQ ID NO: 87135 - DNA, 551 bp, Cannabis sativa
attttggtacattttaaagtttaggagaaagaaatcttaattagccttatatatatgttatcgtgcaaatttctcgcctaaaaattcgagagcagcctcatataaaattgacacgtggacccagttcctgatagaaaagatgacgtgttaattgatagctcccatagaattagcctcgcttgatctgaactcgcgagatgatacgaccgagacagggtcaagaggattcgatactgatcgtgcatataccgattatatgcgatgaccaagtaggcctctcatgtgactaaaaaagatcacttctttacctaagattagtctgaatgactaatgtgttcgacaactcgtcaggaactcgcatgttccacattgtcaacgcataggatgtctatttatgcaattaaaggtgaatgaagatttccaaacaaggcctgaaggccaccgtgcaagtacaaacaccctagagcgcatgtgagctcgtgtgttggaatatgaacaggcaactcgcgactcaccgtcacatacgttgctgcactaaatataagaacaga

SEQ ID NO: 87136 - DNA, 610 bp, Cannabis sativa
tcttgtgactgcctattgcttatatgtcttgtctgggcctgtcgtatagcttcttcgagttagataaagccataagctctatcaaggaactcctttatgttgttggttgagatcctcgggatatctttccagaactcactcaatgggagtatgcccccagtatggttgtatatcagccctcctctgtaaggcttttgaccttcgtggcctcggccatgaacctctggatgtaatccttcaaaggttctccttgtcgttgtttaactttgacaaggtcttctagctgtgatggtacgagtatggaggacaagaattgtgtgtaaaattcttgagagaactcggcccaagagttcaaccttcctagggaaagtttgaagtagcattgttgagatgtttctgataaagtggatgggaatatgtgacatcacacatcactagtaattttctggagatcgagctgcatctcaaagtacttgatgtgcgctaatgggtcttctcgtcaggtatacatcttccataacggcatcttaaattttggcaagggcaaggcatttatatatgtcgagaatagtgatccccttgactagtttggttcaagatctgaaggttt

SEQ ID NO: 87137 - DNA, 734 bp, Cannabis sativa
aaaagagttgagagattaaaaaaagagataggaaaatgacaaaattattaataattggtaagaacaaaaacaaaaacaaaacacacataatcctgaatatggcaaataaaaaaaattaaattactaagataatcttattaaatttgagaaaatataaaaaagagaaaggatggcgggaaaataaataaaaaatttagaattatcataatttaaataacaaaatatttttatatatcaatacttattttttttaaagataaaattatatttcttcttaaatatttaagatatttacaagtaatatacatatatctacagaaaatataaaaaaaacactaaaatataattttttttgtactaaagagaatattcattaatcaaagacaaaacaagcaaacaccaaggccacaaccaaccggcccaaccacaaaccaaacagcaactactgaattaggcgtaaaaacatgcctctttcggcttgtataaacttcctatcttttaagctatacaacctatgtttaactatatcttttatatcatttacaatttttaatatagcaaaacaactactattatgcacactattgttcctatttctccaaagcacatgtaattagtaccaacaaagatcaaaataataacaccagaaatcttccatgccacccaacataaccagctattaaactctatcggccaagcaatgtaactcacccaatcgaacacctccttcacaa

SEQ ID NO: 87138 - DNA, 898 bp, Cannabis sativa
  modified_base (789)..(795): a, c, t, g, unknown or other
  modified_base (845)..(867): a, c, t, g, unknown or other
ggtagcggcctaattatttaggccgttacaaaatcactggccgagcccatcgatctcgaggtctatgacaacgagatccaggaacaagttcctcctcaagtcgtttctgacgccaatgctcctcgtcccgaggcaacccccactactacttcttcaagcaaggccatggacaccttatcggccgcaacaggagaggtcgggtctgaatttgctcaagcatatggagttgcttgctggcacaaacttcaaactcttcttcccccagattgggattttctcaatcttaggacttctaaagagatgctttcaaggagcttggactataatttcatggtacattggctttgttattataattatattattcttcctataactctttcatattcatctgtttgcaattctccaggcttcttttgcttgcaatcgactactctctgagcggctcgaatacttggagggcgaggtcataaattactatcccaaggcaaggttgtgagtaagcatcgggacgaggcccgataggaaaatacacgccttaagcaagaagccgagaaagcaaacgaggaagccgagaaggcaaaagaggaaatcgagaaggcaaaagaggaagctgagaagaccgtcaaagcccaagccgatgagtttgagaagaagctcgctgaaaaagaagtcgagaccgtagaacaatgcgacaaggttggtcttcacaccgtgtctcgtgcgtggatggcgaaccctaatatggacaccagtttcttagaggagaatgttgggttttgtgccctnnnnnnnactcattacaatctgattagttattaatctaagaaatttgaagtgatttnnnnnnnnnnnnnnnnnnnnnnnttatggtttaatatatatattaatatatgca

SEQ ID NO: 87139 - DNA, 920 bp, Cannabis sativa
gtttgtcgaaatgacgaaggtgtcatagttgttgggaagtcctttgaagatggttgcaatatggtcacgatcactaagaacttctccgacagacgcaagaagatcaacatgctgctttactttcaacagataatcattaagagacagtgcgcctttctttaagttctggagcttagtcttgaattccaagatcttagatgagactttgagcgtgaaatgtttttccaaaattacccagatttgacgagctgtgttgcacccaaccattcgagtaaggaggctctccgtcatagacgataacaaccacgagactaacaactgatcttacacatcccagtcgagaaactcaggattgtaggttgaggaggcacgatcaacagcactgaggaatagaggtggaggatctccatcttgaatgaacttcagcaaacgatttccccgaatcgcagcaagaacctgctgtttccaaagaagaaaattatggtcattcaattttacggaaagattatgtgtaaagtgaacaggggagaactcatcagcatcgcgatttcgattcctctgcaagtttgagggatttccaaggctcgaagggttggccgagttttgacttgcaacagtcgccatattcgccgtcaatggtggaaaaggctctgataccatattatggttggtattccttcaattcatgatgaaagagatcaaacaacaatcaaagataaagatgaacaaagaacagagaggaagtacagaaagctagagaaagtgaatcaaagggagtcattgtattattgttatttagttacaaagtacaaagtgacttatatagatcacaagagataaagaaagactcaactgatttaacagaaaacagttgagaatcaccactctgcactaactgaaataacaaacataacagaaca

SEQ ID NO: 87140 - DNA, 581 bp, Cannabis sativa
ttttgaatatgttgttgtattgttattatgagtttcatagctggttcatgatatcagccattcttttgctgacatcagattgtttcttcatgattcatacctttcttctttatttcctggatttactgagccattcagttttccaactggttatgtagtttgaattattagctaattaaataattttcatagcactagccattgccaattgttacattcattacctaaatgaaaaatgtatttattaatcaagtttaaattcactgcagatgcttttttattgatttttacatgtgtacacaaattgagtatcgttgatcacgaatttagcaaaagaatatttgttatagattacttattacgtacagtaaatagaaaagaagactgctaggttgtagcgaaagaaaaatagtagaggattacttattaaaatacagaattaaaataaaactaattaccttaaaattaagtatacttgcattgcacctaataataatttagtatctattctatataaagtgtgcctatataactgaatttcttggtttatgagaaattcatgggtaactttttatttatat

SEQ ID NO: 87141 - DNA, 934 bp, Cannabis sativa
cggcctcttcctcctccttcctagtcttctcgtagaaagcaagaatttcctcctcctctccgtccaagaaactcgtgtccatgtctggatttgtcatccaggctcaataaagggtacgaaggccaactttgttgcatcgttcttgggtttcagtctctttcccctcaagttctcctctgagcttctcgcattcatcgattttggcctttgtcaccttctcgacatctttaaggctcttcttcatcctctcggcttctttagtgaggcgagtaatttccagttgagcatcattccatttcttgaccatgacctcatttttgcctagttaaatctggacctcgctctccaagtatttaatcttttctaagcctcgctactgggcggcaaaatagatgaaagaagcctcgagattcacaaacaaaaatgtataaaaaaacatggaggaaggaaaagagaaatacaagaagtgagtagattaggacaaataaacttaccaagaggctatgagacaagctcctcgtaagcattccttccaaatcctcatgattgagtaaatcccaatcatggggaaggagagccttgaactggcgccagcaagcagctccaaactcctgggtgaattctgagcaagtctttcctgcctcggcaggtagtgtttcaatggcttggctcaaagaggcagaggcgtgagtttctttagggagaggctcgccggtacttgcaaagactagaggaggaatcagatcctggattttggcctcagggaccttgaggtaaacgctttgggaggccttcttcttgttacttgtggttttcctcttccttttaaggggctccacttcgacatctgaaggagcctccgaattagtcaccctcttcttccctttcctctacatgaggtcctcaaagtacaaggtaaaagtattagcattaa

SEQ ID NO: 87142 - DNA, 513 bp, Cannabis sativa
attgtgggggcttgtaagcaatgaaactgatgcactgaacttggcgaacgttgtcgaatccaatgatacgaacgtgtgcatctgggtactccttactggcttcctcaacctctttaagcacttgtgttgcgtctgtgcaaccatacataggcaacttccacattgtccagtaacgtccatcgtagtaccctggggacctgttgtgctcacggtacacgaaagcctcctatatatatacatacatacaataaaatcaattattattaattaacataacattattgattgattgattaattcacataataattaatatgattaattacttacaccaacttcaaattccaaacagggaatccagttgttcttgagaaggtattcaatttcctttaacaattgctcagtggtcaaaggtggaaggtaagaaagggtctcgaatttcttcaagtttcttggtggccacacctgtatttatagtaccaaatttagagacagatccacaatcgggacggg

SEQ ID NO: 87143 - DNA, 876 bp, Cannabis sativa
aaaaaaaaaaagagagagagatttaccttgtatccgtttgtggtacaacctcagaggtagctcttctataatgtaggggtaggagctgacatagatcactgcaatcaaccggaagtacataattgttcagttcaaaataaccactagctcgaattagatttgcaaatagctcgctgtaaggcttcaaatatgactccatgttctgctcaggggtggcaccgatatcacaatcatatacaatgatctcccaattatcaatatccacctcaactaccacccagtggtgctctttgggaaggttcaacacaaagtagatataatcttggttctcccaacatggcaagtgtctgtgctccatccccttcacataatgcataatggcctcatcccatttcatcttgctcttgtcaccctcatagtaattccaatacatggagaatatctatggagcagatgtctccaaaattacacctttttgagtgtagacttctggatagaggttctgtcttcttctcattaagtgcgccatggcatcaatttgttgtgttccaaaagaaaacagtaagacagatatcgcacaaatgtcgcacaattatcgcaggaaatcgcacaagagaaattaaaaaactatttcattaatcgcacaaaaatcgcacataagtcgcacaaataatacataaattaaagaagtgaataaatcgcataaaatcgcatataagtcgcataaatgtcacatataaagattcaaaagaaactagttaaatagatttcgcatacaaatggcatataaatcgcattaaactcgcacaaaaattttaaaacacaataaattaattctattaagaaataacttacagcatcatcaagccattctcc

SEQ ID NO: 87144 - DNA, 878 bp, Cannabis sativa
cttgtatgatttctaatatgacaacatttcaatttggaccattttagcttgttggtacatatttccttaatgcaatccacacaagttttaaataaaattagtaaaatcaaatgagtaactccaccatttactaacatttattttatttatggagatatgttatataatttttgatgccataatgtagataattcttattaataacaaattttttattgtcaaattgagcatgcatatcttcatgagtgacattattttataaattaatgtagtaaaatatatctaaattaagtttctaaacaaacttagaacataaaagtctttgagaatattaaaacaaaaccactactatattgcttgttccttaaatttataaatgtgagaacttatcttgtctgtggataagatttactcacaattactaactttcataggtttcttgtaaaccttgcaagaatttatgaatgtggaataacaattcactatgtgttaataatgacattaactacattaaaatgaattcatacaagataaattgaaaatttattggtgataatgaagtgtgatttatttttcttaattgtacagtaaaaaatatacattctaaatgaagtcatcaaaataaattttagataatactgctagctatgtagaaatatatgaatagtgatgtaataaaactacataattattaatgtatagttttaaggtttaattaaatcatgtttttaccaatgtataaatatgctttaacatgaaatcttattaaataaaaattgcttgtggactaaatctttaatttaataagattagatttagatgtaaattatgatagatttaaacaatttatgaagaacttaaagtttaatatttctatc

SEQ ID NO: 87145 - DNA, 854 bp, Cannabis sativa
tgaggatcgtgcccaaaatctgttcaatctatgtaagcaattaaaatcaactggacagcttatgattgttccttgggtccatggctgcgtaaactaaaacttttatcaataattaaatgtaatttatattaaataattatatttttcttttgtagtgggcagtgaaggttaatcatactggcgccatatgcttactatgctgcttattgtgatccttgtaatgttgatttccaaaatcgtgaggaaattgtgcgattgattgttactgttttcaaccgtttttttcaattcaaagaaatgcctcacttaaataaagataaactacaaatcataaaacctactgtaagtaacaaaattttaattattttgtttttttaattcatataatgtttatttttacaacattattaatttaaaccttttaaataactagtgtccacatcaagaagatgatgtggtgtgtggataattcatgttaaggatgatgaaagacttaattgaatgtgaccaaagtccaaaagcttacttcaatcaggtatatataataatttattatttatatattaaattatattatatatatttttataatcaactaataaattaaatttattttgtatttttttttagctaacacttaagtcatatacacaaaagcaaattgatgacatgcgccaacaatgggcagctaatatgcttacttcaattcaaaatcacaaacctaaaggcggttatattacttaaatcttttttcttttgaacttggaaaaaaatattattaattttgtttacaatctttattattgtaacaaatattgataccatttggcacatgtttatttaatgaatatttc

SEQ ID NO: 87146 - DNA, 1845 bp, Cannabis sativa
gtttcaagaaggtccatgtaaggaaagaaggaagacctcctgatcgcttgtcaaggttcgaacaagggccaaaaatgtgcatatttgaggtgttgcccaaaaaaagactcgatgcgacagtctgcccaagaaaggttgcgaaagtgaatgaacacaatcttaaagcacttgacgcactgatatccgtccctaaaagctcaaatcacgccatccaactctctagaggcaagatcaactaccaagatcctcaggctcagatccaccactacatcactatacgtaaatagagtagttcaagaggtactggggccatacgaaggagctatgacccgatgcgatcatgaagactaactcagaaagggtcgtcagatgcaacgactctatccagctagaaactccagtatcagcactggcgagagggctagatctgtctcatgacgactacttcccctgccttttctaggtgtgtgaagtttcccaaaagtagatcctatgatggcggctggtgagaggagaccatcggtaccatcggtggctgctgggttaccagtgaggctcagttatggtctgttggtagaagtaggtgagttttggaaaagttcactctaggttgtccttgtcgcctagtgtagctgcaaccctagagttacatcagagggaagcaactcgagacattataaataaattagggagcccttgcgacatgcttgggccgttggaagtttgagtttctgattttgaccccctcaaataccctgtgctttgatgaaggagacgaactaccggggagatcctaggtgttgacctcgcttttagccaacgataatgagtctgatttgtaagcgacaagtagtttaatacgagtatagtgtaattaaagcaaaataaagagacaagaattttatagaggttcagccccgagcaattcggtaatagcctaatcctcgttatttgtcttgacttaagaacaaggagaatggttcgttttcttagagctcttacaattatatctttgaatatgaattcttagacaaaatgttttgaccctttgcccagtgagtatgaatcactatttataaggctataagcttgggagggaagtatttcccttctggttacaattgatataagtagaaagattacatagtatatacaaaatgcactaatcgtgggatttggatagcttgccatatctctgtaatctgatctcaaatttatagcaatttctttggtgtgttgcacgaattgctcactgctcggttaagatgatttcgtctgagaaaatgtatgtggtaaccttttcggcccgtgtcttgcgagcgagtaccaagacttgaatccacgtgtgaggccacgttagagtgctaaaatttagataacattttccccaaagtctgtacgggacttccaaagttacgtgtagacttcatccgagctatctttgcgtttggatgggtgacaagtgtcaggtgcatctgttggcgatttgatgtgaggctgactaggcgtctcgtcggtttttggctaataaatgctctgacgcaattaatgtttcgaaatctgattttctctcaccacgtttgacggttacacttaattacttttgatttccaatattttcttttaaggggaaccaaggcatctaaggtttttgaaatgattactccttttttgtttttctacctataaatatgactgagcattgttcataaacttattttctccaacttctctattaagcaagttcagaggaaaaaaagagaaattttcatctcgagtttgccgtgaaattttcacaagaaccatccaagcaacttcgcttagagtgaatctagacgtcgatca

SEQ ID NO: 87147 - DNA, 645 bp, Cannabis sativa
ttattttattattttaatttattgctgaagacataaaataacaataatttattttattttgttgtaagttatgttaaaaaatatatattttaaaaaatattaaataattaaatattaacaaataactagtccaaaataattgatctaatttatacttttgtgaattggattagattgaatttaaattattgtatggattggattgaatccaaaatatgaaatttacgcgaattagatatacgatgagcaaaataatgaatgaacagatgaaattacactacatacctcttttaacttgatacctttaatttttactctctctttttaaaatctattatgtttacctcttttttcaatcattctactaattttactcctatgacttcacaataatttttattattctctaattaaaatttttccccaactttcctacaaatctacacattcatctacgaagaacacaaatctattatatttgaaattatgttttaattatctgagtgtgtgaggataatttggatacaatagttatagaaaaggtatatttaaattaacttttttagaggtaaatttggttaattctcacgcctatgatagtgggcttagtctaagatcccggttttagcccaggtctcaaattat

SEQ ID NO: 87148 - DNA, 995 bp, Cannabis sativa
gctaatcaaccttcgccatcttaaaatcaaatggtcgtcactaaaagagatgccgccgaggatttccaacatgaaaaatcttcaagagttaagtgattttgttctgtgtgagaatgatgggtacaggatcaaagagttgggtaagttggataatctccaactccatggacgcttgcgtatttcagggcttgaacatgttagagaagtgagtgatgttttggaagtcttaaagaacaaagagtatctcacagagcttacattggaatgggatggtaaaacaaatgattctattagggacagagaaatacttactgcactccaaccacatccaaatttgaagagcctcaaaatagtcagttatgaaggtacgaaattgccggagtggatagtagatccagtgtactctaatttggaagttttttctctggattgtcaaaattgttgtttgtctttattgtcatttcagcacttgaattcactgaaagagcttgatattgaccttatggcaatcgatatacctcatgaagtttgtaataattcgcacaattcatttcgagttttagaaacaatatctctcgcacatataacttcatcagattggtcttttatcagtacagatgatcaaaaggttgatattttcccttgtttgaagaaattttatttatttgagtgcgggaagctaaatgtggcattacctatgggtaattttccatctttgaaagagatcaatatttgggattgtgatgaattggtgactgtatttccatccactactgatattgatgttgcatatccctcccttagaaaattggaaatagagatgtgttcaaggttggagtcagtttcagaaatgggattactgcccgtttctttggaaagtctacatattgtttcctgcaatacggtgatagaaagtcgtatgcaatggaatttgcagagactctcaaagttgacttatttaagacttgagtattatggaggagtggtggattcat

SEQ ID NO: 87149 - DNA, 1647 bp, Cannabis sativa
tttaaaaacaaaaaactaattaagaaagtattaccaaacgccactataatattttttaattttttttttcatattcaagcttatttacctaaaatatttttaaacaaatttatctatatttttatcttttagttttttcaaattatttattctatttttttgtctaaaatatttttattagtactaattaattagccattgaaatttgtttgatttaaatggttattttttttttttgttcaatataaagtaatgcaaataaacatagtagcgaagtaacgataaaaaaaacatattataatataatatgatagagggatggaaggttgaataattgtttttcgagatacggtaataacattaattttaaataacaaggatatagcaataatgcattaggagaaaaagttggtgttttataaggttattcatctaaaaagaaaatgtatatatgtattttaatttttggaattacatataaaacactatgtgatgtattctaccatatcaattttagtaaaattaaacacataatcttttcatatataattttaaaaatttataaacaacaaacgaagtgcggactgttctagtttctagataaccaaggacaacctaagtaatattcaaatttgtcattctgaataggtactcaatacattttaatttaacaaatactagtttggaaaacgaacataatatggggatgtagctcagatggtagagcgctcgcttagcatgcgagaggtacggggatcgataccccgcatctccagtttgttttatatcattttaaaatgtaacataaatataattgtaattaattaaagtataatatctctagactctaacatcaagtgagcgtgccggagtggttatcgggcatgactagaaatcatgtgggctttgcccgcgcaggttcgaatcctgccgctcacgttaaagtgatataatattattttatgaacaaccttattgatttatcaatatgatcaatataaatagtgaatttggtaagaaattgtgtattcttatttagataagagataatttttttgtggtaaaatttcttatattgatcattttatgaacaacttattgattttttttttttttgagaaacactgtcactttttatgaatacttgatatgaataattgtgtaaaaattatctatatggtcaatgaatattgtgaatttggtaagtaattgttagtcattatttagaaaagggatattggcaacataaatatttatatagttcacttagttgcatttaaatttttatgtaaattatttagtggcaaaatttcttatattgttcatttcgttatactttaatatttatgtaaatttattagcgacaaaaaaaattatataagaatttttgtcacaaaatatttacatataagaattaaaatgcaacaaaataaactatataagaaaatttgtcccaaaatttcccattggaaagtgattatggcctctaaaatgaagtctttgtcggtatatttggcttgtaacttccctctcttctaatcaaatgaaacccctaacaaaataaattatagggaaattctataatacacccccttaaaagggatataccgatacatctctttttgttttagtatccgaaataatttt

SEQ ID NO: 87150 - DNA, 629 bp, Cannabis sativa
tcttcttcttctttcttcttcgtttttctacagttcagagttccagctgccacaacacaatttcttcatctttagctacacaaattcattgcctcatctttaggggctgcaagaagaaccatgaactattagaaacattgcctccccctgacttagcgggctttgatgacggtggaggagtcatttccttcttcggcgcctacaaattgcaaatcaaaaacaaaaccaaaaaaatgaaataaaatcataaacgtcggtgtcttctcccatgaagagagggaaacacgagggagagagagagaatttccaaaagtcttaccttcattttacaggcgtcgagcttgattttgtggtcagattcgaccaccattactgggatttggttcgattcggggtgttgggttctcgaactggaggaaggtgggtcgtcggggttcttggactggaagaaggtgacggttggggttctcggactgtagtgggctttggggttcgaactggaggggcttgggttcggattaatggagggggcttggggttcttgttcgcacgaagtagagagggagagagagaatactggtagactttttttttttttttttttggaatactggtagacttaggttaga

SEQ ID NO: 87151 - DNA, 2242 bp, Cannabis sativa
  modified_base (53)..(70): a, c, t, g, unknown or other
accatacaacataaaatgttatttctgttctttattaactagtaaatctgatnnnnnnnnnnnnnnnnnnatttagggcacaaaatccaataatgacatgccaaaacaacattttttaggagttttgaaagtccatgaagaggaaaaacatgtggattgtcgctgcagcgaaggatggaagcaagcaaaaaagaaaaaaaaaaagatagagttttagctctgctcaccgcgaccacagattggcttgccgcggcgaggctgctcgtggccgcggcaaggaagcaaatactgggaaattacaaaaatttgatctttttttaaagggagatatgtttttttagtaggatattttcaagcactataaatagaacattttaggctacgaatttgaggaccctagtgctaccaaattgagagagaaacttagagagagagcaaggaagagatagagattgcggcttcaaagtgttcttcatcatagttcttttcttctccttaaactcttactatttattataatttttattataatgtctagttccaagtagttttcttttagttaagggtcatttcaaaacccgagacacaagtttttaatttaattagtgaatgttaatttctagtttctattatatcaaattgtttctattcttctatgttcaatgtcatgatttttgttttaatcgtgtgtagatggctactaaattaggttttactttaatctaccatcatcttaggattactattcacctaatagtgtaggattctaagtgtttgtgataaattgcgatttctaatattgttaaaggtatttttaactgtgatgaagaatagaacctaggttaaataaattatatgcttcattaatttattacctagattaatctatctctataaatctcaaagctttatctaagttaaataaattgcatgcttcgtagatttactgcttagataaaagagttaattattgagtactttgccttgagtatatgtaatagggagattgtgataattgacttcttcagcgttatctgtgagattaataatttgattagaaattgaaattacattcattaataggaattaagaatgattgttgagggtggagaataacctttaactatttatctcatatcgtagtctcacttttaatttatttattttttatttttatttatgctattttattctaaacataaacccccctttgctaaccttggttactaaattttaagtaattgaataaacatagttctcgtgggatcgacccttacttaaaattatacttaaaatagttggaggtattagaattaaaatattagtaaatttaatacggtatacgacacacatcaaatttttggcgccattatcggggattattgttttattttattattcatatttaatttttttgtcttactaacttgttttcactttggcaatctcaggtgtacatgtctagtgaagacgatcaagagagactatcaagggtaaaataatatcttgagttattgtctgcttcttgcttatcaaaggatatcaccgaatcctttctttcaacctcttggtcctgtcaaagagccattatcagctgatcacaagtctgatgctgatgactcgatcaagtctcacaagaccatggctcaaaataggacgttgaaagagttggtcgtgccaaatcttggccaacaaccacggtgcatccattatccacccttggatatcaactttgaactgaaatccaacctcatccacttgctaccagcttttcatggatttcttagtgaagaccctaacaatctgaaggagtttcatattgtctgctctagtatgaaacttacatcaataactgaagagcaaatcaagctacaagctttccctttctccttgaaagatgctgctaaggagtgattgtattatctaccacctggtactattgagacatggaatgacatgaagactattttcttggatcgatacttcccagcctctaaagttggaagcatcagagtagaaatttgtggaattcggcaagatactggagagtcactttatgaatattgagaaaagtttaagaggttttgtgatagttttcctcatcaccagatcagtgaacaactcctaatctaatacttttattaagggtgttcatataatctgcaatctgtggtttcaaaccccaaccaatccggaccaaaccatttgagactgaaccaaatgaatctgatgtgaattattt

SEQ ID NO: 87152 - DNA, 1117 bp, Cannabis sativa
aataagatcacaaattttcgtctgtataaggtatgtttttatttttttataaatcatagtaaatattttaaatatagtgtagttgtaattttaatctaaaatacatattatttttagggtttttagatttacttaaatataatatatatatttttatttatatatataatatataaatttatcagtttcatatatatatattatatatattattttatttaaatttttattctgtttatatataatatatttttattatatatatatatatattaatttttgtgtatttatagttatatttgaatttatatatatatatattttgctatgtattgagcaagttttttttatatatatgtatttgttgttttatttaaatatattattgaaatgtatatgattttatttatgtgtatttgttgttttatttttgatgtattaatgattttttgattttaatagatttaactattttttttttgatatgttaaaagatgtaatattatgctcataaaatttatcaacaacaatgattgtaatggattttagtatttttgatgtattaataatttgttatttttaaacaaattaaaaatgaatattttatatatttaaaattaaaaaaattaaataagatttgttatttaagtatttcatattttagtaagattagttttatttacttaattttcttggtcagtttcagcaacaattattaaatttttcgcaacagcaacaatctctaaaattttcgcaacaacaacaatctttgaatttatcaaaacaactacagagtcgacaatttactgagattttatcttcgcagcatccatattacccttcaccgcgactatcgcaagctcaggacaatgcatgcacaagcaaccaatttaaacttgaacaccagcgattcagaatttttagattatgtgcttgatgaagacaataataattagtttaagttaattttaattatgtgtggacaataattatttgtaaaatgtttaattatgtgtgaatttatttaaatttttaattatgtgtggatttatttaagtttttaattatgtgtggatgataattatttaattggtatgttggacaatttttaattcat

SEQ ID NO: 87153 - DNA, 810 bp, Cannabis sativa
aacttaaaaaaaatgcaaatcataactacaccacaaaagatttgaacttacattttttgtgcggtatagacggtttgataaacaccccgaataaaaacttttttctctcatatttttgtaaatagccaaaaaaaaaaagaaataatttcataaatacacaaaaatatcaaaaaagaaaattataaaatagggtcgtatgaaattttaaatatttttacaatttttaagattttatttacataaaatacggtcttttgattatttttatgttgcactattgttattttattattttgatattattttcatattacttttatgtaattttcttgttatttatttttataattttatagaacaacgtaaatatgtaaaaagaaaatactttaaacgtaaaagtgtaaaattttacaaaaaataataatttataatttatgtaattttcccaatattatacatttaacactatgatttgttgactgggtccacttttttaaaaatattacaataaatcccaataaagaattttctcaatagattttatttttaatcataccaaaaaaaaaaatcttcacaaatactgcattataaatttttattattatattccaaaaaaacaatagaaaaaaaaaagcaaataagatttatctcgtgaattattactatttttaaatcatattttgaacttttttatttattaaaaattctcctgaactattcttgttattgaattatacttattttgtcagtttaacatgtcacgtcattactatatctataattcaattaaataattttaataatttattt

SEQ ID NO: 87154 - DNA, 1036 bp, Cannabis sativa
taatattttttttttcttcttcttacagcagccgcactcaaagggttagggtttctttaattctttttctctttttcttctctccaatatcacgtgtacatttagggttcttatggttttaatcttttaaagcttttacattttcaattctaatggcagctagggttctaaagtcttcttttctattctaatggcagtaaggttttttagtgttgaagatttttatttatcttgctcttcctgatctgatttttgctgtaaggaaaatgcttttgcattacaatcagctatcattctaggcaaaggttaaaaataaattaaggaatactattgtgttgattggcaataaaaaaaaaagttcaaaagaataaagaggattaggattactattttttgtaaaataagtcaaacttctataacctaaaaaaataacccctttgttcaaaaataaaaacatataaaacacagtccctaacaagtcaaataccaaactagcaaaactaaaaacaaaccagacaaaacaataaaaatagaaaaactacataaaaatgtattgataaccttcctgttagcacctaaatatcttaagggaattaatagaactttctccattcacaccactctcttctttctcctcagctctcattcacttggctcaactcaatctctaaaactctcatttcgatctcaagctcttaaactctcatctcggtctcaagcttgcatgggtgagtacattattaattttatttgtacaaccttcactgatttctcccctaattataccctctatatttattggacatttcattgattttgatcttgatctgtttatttttagattttatttgtgtcttgtatatattagggattttttctataataggtatttaagacttaaattttacatttttagcttaattagggaaattaaacaaaaaaagaaattcaaaagttttttttttcaaaaatacctattgaatcttcttcctcctccgtcaatgtatataatgtacgtatataaattacatgatga

SEQ ID NO: 87155 - DNA, 643 bp, Cannabis sativa
ctatcatttttcgacgtgtcttcctttgtagcaatacctgctgaatattatttaagcaatataaaaaatatacatattattaaaacaagaagactgaaagtatttacatatggaaaagaaacttacagagtttttagctttgagaagttcatctttttgtgtctcttgtatcttgctctctttattcttcttgacatttttcagcttcatggtcatcttctcttgtagcaaaactccaaaccattacatatgaagtatgcttcgaacaatataaatataaaacaaacaaaaatatcttataataatataaatacaaaagaaacaatgcataaacaaaaaagaggcatcaatataaacattaatagcattatgaaaatatctgaaaaaacaaaactcctaaaagaacagtacaaaagacatcacacgagacaaaaacaacaacattattcaaactatgattccttcacaatccactctcacatattggtgttattcaactacatcatccaacctagcttcaatattattttctaaaatgataggcatatactcatgcctatcataatattctaattcataaaatcctcttgggcgtgccatcattactacatgccaacttgaatcacgttctctagagtagaaa

SEQ ID NO: 87156 - DNA, 759 bp, Cannabis sativa
ccattgttgaaatagaaaataatgactcttagagttagtttgtgaacttgttgagagtggatctaaaaattgaaaactcgaaccattggagcttcatcacaaacaaacaaaaaggtttagaacaagctctaaagggtatgtaagatgaaggggtacctgaggctgagtataggcattgtgctagacatttagtgaagaattttatcaaggtatatagggataagacgttgaaagatcgaatgtggaaggctggtagagaaccaattattcgtagatttgaagtttccatggaagagattaagaaactaaatgaggagacttttaaatggttaatggttgtaggtctgtacactaggctagatcacactttagaactggtcctaagtgtgatatacttgccaacaatatgtgtaagatttttaatggaactccttcaatattaactaccagaaatagaccaatattgtcaattctagagcgtattaggatgtatttcaggcaaatgatgtcaaaaatagaaattttgtattaatgtggaagaccaacattgctcctaagatatcaaccattcttgaaaaaaataagattcaagtaggttcgcatctgcctcagaaatcatcagacatgttttgtcaagttgacaccatatatggtgggatgtactcttttgatttatgtaactgagtatgttcttgcagaatataggagctcactagcatttcttgtagtcatgtagtggctgcaatatagtcaagaaga

SEQ ID NO: 87157 - DNA, 865 bp, Cannabis sativa
aacattgttttctatactgtaaattattccgaatttctcaaaattttgtaggatatcttaaatagctataacgtacatggatatgaaaaaaaattagactaaagttttctttagatgccgaaacaagtagagggtgcatcagtacatccattttaagggaatgcattgtagaatcaccttaaaataattatatgatcaccctaataatagaaaacagttattaatatgtgaaaatgtcttctcattttcataactcccattatttattatttaaataaaattaataaataaaaacagttacatttaaaaaatgaacctaaaagtcaagtattgtatataatatgtaattattactatgaaaattaactcatcatcaaatgtgaagttacaaaaaataaaataacaacattgcattatcattttctctcttaaggaataattatatatatatatatatatgcatgagaagatgagatgaaaatgagggagaatacaaaagttggtgacccttagttaattatttgcttttttttcttggttgattttgcttgtgggctttacatatgttaggctcaatttattcttagactttgtattgagttagtattttctgatgcatttttttagagaatgttttctaatgcatttgatgtctttttttacaggtcattctcgtaaaaaaaaaaaaatctaatctaatgagcatcgcaaaagaaaaaaaaatggagaatgctagcttttttgttgcttatcattcttcaccggttacatcaacttaataatgatcaatctataatcttcaaataacaagacctttagactgtgagtacaacttatttttgttaatctactttagtgttcgact

SEQ ID NO: 87158 - DNA, 1081 bp, Cannabis sativa
tgtaatagtaattattttttgttcgccaatcttaaacaattcgattacaagtagttcttttttgctcactatccattaatcacaagtgactctttttaactctatttttttttatcgattttttgatttttaatgactttttttggcttactatctccgactacaagtgtctttttatttagctttaattacttttgggattgtagcatgcatgcatggatatttaaatttactattccgtgtgcttgatgatctatttattaacttatacacacatggtgaggccaaattgagtttatgatcaaaatcgtgagaagaagaagaaaaaacacttttatacattaatattaagatatccattccaataatataaataaatgtggccaaaagggatctgaggaaaaagtatatatatgaacatgaccctttaaaacgagacaacataaacacaataaccaaaatagagttaattcttgccttctctatcccaaccatactaagtatcactttaaaacatgcactttttactaaagaaactaattaatatgctatatatatagcatatataaatatatatatatatatatatatctgtgtctttggtcatggggagccaaatcatgaagggaaaaccatacccggccggccaagatgtgactaaccagaaagacaacaatacacaattaaacatttatgattaagagtgttgttatatatataagtatatatggcggtggtattattaggtatttgattttaagtgtacaaaattattttattaaattatagtataactctaaaagttgtctaattatcaagtttccttaattaaatttaaattcagaatattaaaaatgtataattttaaattacagaatacttgataaatattattatagaaaactgataataattcgcaagacgtcaaataataatattgtctaataacaattactgtacatcgaaaaatataggctaattaagatttttgctcctaaactttaacatgtactaaattatgcactatgaattttttttgccgttaaaaattctccctaaattattgagatggttagattta

SEQ ID NO: 87159 - DNA, 827 bp, Cannabis sativa
aaaaaaaaaaaaactaaaaaacaacgtgaaatcaacaccaccacgataactataaatcaactataaaataataaaaaaaaatctcatgacaactataatacaactataaataaactataaaagaactaaaaaaaatagtttatgtttattacttgtactgaagatatttttgtaaataaaaaagtttaaaaagtaaaaataacaaaaaaaatttgtgttgatatacttttgtaaattttttcaaagctttagtctattatgtaaatttttcttacaataagtatcttttaattttttgtatggatatattataactagggaactaaaactttctttgtgcaatgttgtccaatttttaaattttttttatatatattatacttataataagcggtataatctaaaatatgagatattttgatgtgtgtattataaacaaattaatagtattgaaattagaaatataatttgctatttttaaaatatataaacttctcctatgtataagacgttgtacttagcatgggtttgttaatcgttctttttttctttttcttcttttgatgttttttcttttaagtcaataacaaggatctatgagttgaaatcaataagtgagattcttcaacaacctttgattttacgcctattcagatgtggctagttttttcacgctactcttcaatagtaattcatcacgcttatactgatgaattggatttatgcttgaatgtaaaaatgcataagcaataacctattgtgcctcgacactggtctatctcactgctagcagatagcttcaacaaacaaaattcaaagcatctcat

SEQ ID NO: 87160 - DNA, 834 bp, Cannabis sativa
aaaatccccaaaagatttcaaatagatcattcaccaaggtactaacatcatccttaagagaatagaaatgtaatgtcaaacaaaaattagaaacagaaaccccaaaatgcaatgacagaaaatgataaatactaaacaaaatgattaacagaagaaaccaaatataacccaaaaccaacacccaatgaattcaaagaactaaacactaagtataatcaattcaacagtatataattacttctttctacacaaaatcaagactcttacccatttcataaatgtgctttttttcttttcttttcttttcttaaatgtttcaaattaccatgatgatacattattcattgatcaaatcagtaaaacaattcataataaaacaagctctaaatcatattcttcagggaaatcatttctacctaaaatcaaactccattttcgctattaagtaagtaaagtaagtaactaagctcagtatataataagaatgtaaagggtttaagggtttttactatgaacaatatatgattgttgaagaaattaattaacggagaggaagagattgcggcaacacaccgggaattttgaagatagacgagaagagctcgacggcgacggcgacggcgaccagaacaggcggcgcgaggagagcacggcgagtgaggtgagttgagtttggtggtgaggtttaaatagtaatgtgactgatccaaacatgggattggaattacttatccttattcttatacttattcttatgtgccaaacatgggattggaattacttattcttattcttatgtgccaaacaggggactagagctaatgacaaaagtct

SEQ ID NO: 87161 - DNA, 867 bp, Cannabis sativa
  modified_base (151)..(152): a, c, t, g, unknown or other
aagatcataccaataaagatcatttaaaggtcgattctatgaactccggtacgcttccgctattccttaatcttattgtttgattctcttgaattaattatggctatattaagagtttacagtattctaacatgtggtatcaagagcatcnnaaattaattcttgagaatttatggtagtattgatcttccattaaattattgtttttgcatttggaatatttagtcaatcatgctatatatatatatatgatatacagtgcgatttgaaatattaaatttggattataatcattttgttgaatttatgtttcattcggtcgttcatggagtatatatatatttgaaggcactgtatactattctcgtttatgagataaagatatatgtatatataaatatgttgaatatttggtttgagtttttgaggttataatcgttgtatatgcgattaattgaaaaaaaaaaaaatctgctattatgtgatttggttgttctctgccgattgaaaattttggtatataaatatgacagttttatatatactgccatgttacagtatttggtcaacgttctagtttttttcgatcaatcgcatatatatacatatatatatatataagaatctacagtattttcaattcatacatatgcgattaatgtatatatgtttcttttttggtttatggctttactgatgcgagtatgcatcgatatcatgtattagagaatgcattgcattctgttatgatttttcttttattttattacgattattattattattttattaaaatatataataattttaaaataataataataattcagtaacaattaattcaaattttggtttaaaaatttatta

SEQ ID NO: 87162 - DNA, 1054 bp, Cannabis sativa
gcacagacatttggcgtcgcgtcatcactgaactctcatcatgaatgaccgtcattactcggttgaactgtgacaggtgattgctagggtctgagctcccggtataagttgccatttcgggcatcttaaaatttttggggagctccgcctccaggatgtcctgcacatggctcttggtcttcatagtcagagtcggagtaatcacctttttatctccgggagacccgagcaatgtctttacgtagtatggcaagctcatccatgatcccttcattcagcgttcccgcggagaccgctggggcatgtttcttctggtctaggtgatcccggaggtcaccatgtttcccgttaatctaatgtcttagatcgacgggagggtatttttggcccattcttcctctccctccgggttcttggtgcacggaaacgctctttcggtcctcttgatcgtgagggccaaaactccctttttggaattttcccctctgcgaacctttccctttcgggaaatctgagcggatcctgcaccttcttcttctttttcccaggagtggaagtagggtttgtctgctggttcccctcaaagggatatcttatagggctaggttccctagactactgcttctgggtgcttggtgaggactcttcgggtgtttctccaggtcctgcagggatggctttgggatgcatgtggatccctgctgcctccatggctttttgcatgtcgagcatcacctcttgcatctttttgttttgctctttttgggctgtgatttcagcctcgtgatcagcagccttttgtcttaagagcactagttctgtgtaactaccttcatcataggcgtcgtactcgtcgaagtttccttcatattcgtcgtcgtgggtttcttctcctacctcagagcccacgttaacccttgaggctacctcctcatcttcgggatcttgggcgtcttgagtaggacggggttgacgcgtgttacgagtttccaccatcgttgttttagtttataaggttgttgtctatttgcagacgcttccttcagctctcaat

SEQ ID NO: 87163 - DNA, 796 bp, Cannabis sativa
  modified_base (49)..(50): a, c, t, g, unknown or other
aaaaaaaaaaaaaaaaaccatcacctaagattttattattattattatnnttattattattattattatgttcaatagactaaaaaagtgtggctttgcacccacgtcaaacgactttgacaaatatagttttttacgttaactttaacagaatattcttcattaattttataatattattatatatatttaaacataaaaattgtgtaaatattttatatcaaaaaaattaatttaatcatatatatttaaaaataaaaattacatctatatataaagtatttatattaaaactttaatgtcatgataactttttattttaaaaattatttatgatatgtatatgcttctaataatttgtaaactttattataatcacactctcctaactacaaattaagaatattgtatctatcactattattatttttttaaaatatatgtttgaacataatatataaaatgtattttgaaagtaattaattctctaatcaaattcaaattttatcaaaatattttttaatatatcaaattttgtcaaatttattcttttacatatataatcaaatctaaagagcacaccaatatagctgcaataactaaataaaattctcaaagatcaaaatctcaaatcctattttaaaaattaaaaaataataatacattacttaattaaaaaaaaatgaacatacatgtattgcacttaacatcacttaattaaacctaattaaaaaaaaactaattatacatgcattccacgtaacatcaacttagtatatttatatgaaaaatattt

SEQ ID NO: 87164 - DNA, 1084 bp, Cannabis sativa
ctatcaaaccgaggggcgggagaaacctagagatatactcagaactctcaggatatgcaacctgaagaaactgagggaaatctagagacacagcttgggatatgcggaacattagatggaaaccaccaaccctctctacaggttcatcaaaaagaaactcacgcaaacccgtatagggagaataagttgaatcaaaccttaagaggcagagcaaggtccgactgcattcacaacaggagtgatctacgaatgcatctgaacttgaagaagcctgatcttcgtcaacaactcggtccaaaaaaagattcactccatttgcgaatggacgagttgtagaataagtttagaagacatcgagtcacaaagcccataagacaactggggcatgatactcttggagaatttggttcggaagcccatggatgaaagagctaaaatgattccaaaagcctgcctaagcataagaaacacaacaaatatatccctctttatgctgaatataccaagctcaatgaaactcgggagaatatctacctcgctcatgtacaggaggtcgtttttagcgagccaaaacctatgaaacatgtgaggcgtaaaagggatccaactaaatagtgtgaatatcatggagatattggtcataacacaaaagagtgtcgccagcggaaagatgagatagaaggtctcatatcgcaaggacactttcgacaatatgtaaaagggcaggatgatgtccgtgataagctccatctgcccaataactcgagcgaccagggattataaccctcccctgtaggaggaatggacacctcagttatcttgatagggagcaagtcacaagagtacaaggggcagttactccggtaaagcaattttgtaagaaaaaaaatttgcgacgtgagtagatatcgactcactatgattgccatatcaagctgccacgaggaaagatggtcatcaaccagtagtagtcaaagacaaaaacaggattacttcacctggaaccccaggatatgtgagggattgaccctggatattgaaacaattgagggagtatgtgagggattgaccctgaacatcaaaa

SEQ ID NO: 87165 - DNA, 1114 bp, Cannabis sativa
aaatattttaaaataagaatctaacagaaaagtgataaaaaaattcttaaaaagccataaatcagtcaatcatcggacctcatcgaacctatattagacccaaaatttgacaaaaaaaccattggaccatacaatcgaaccaccatcagacataacatcggaaccgaccactaaagtcacaaagcaaaatggccatcggaccaccacatcagacctatatcggacctatatcggaccctataaaaccaacctcaacaataaacaatcgaattaacattagacaccctatcagactgatatatacatcatccctaacctcaaatctgaactaatcatcggacccctagtaggcaccatcagactaagcgaaaaaaaccagaaatcagaaaaatgcagaaaacttaaagaacaaccattttcacaccaaaaaatagcataaaatagtcataaccaacagatcaagcatcaaaacaacaatataaactaaatataacaaccaacaaatatgattaaacaaagaaaattcattacccattgaattcgtgtttgatgctccatcacttcctccacaaaaagaccaaccacgtacacctaagcacctattatatgagcttctagtgtaattgtaagaaaattttcgttaaagtataaatataaaatttggagaaaaattagtattttatgtaaattttcttatttttaacttctttattatatatatatataaatatatatattccataaataattttttctaaattcatatttttacttgtataaaaactcataaaatatataataagtagttattttaaaaagggaatttttattttcattgttttttataggcacaagtttataaaaatgtggctttttttaaaaacttcttttatgaaaagaaaaagagctaaaaaaaatatggagaaaatagttaaaaataactagttagtgatgcctgcactaatttttttttttaaatttttaatcgtaacaaatttgtaactaaaaataaataaagttgtgattaattataaatcagcattcttatgttgtaactaaaaggttcgtagctaaaagtattagtcacaaaaaaaataatttattgtggctaaat

SEQ ID NO: 87166 - DNA, 1111 bp, Cannabis sativa
tctgtcaaaattatttcaacagttttgaggatatcaacataagagaaagttcaaaacttccactcaacaaacaaaaagatatatcctagagtttcacagcatttgtttacacacatcttttggtgagattccatatgttaatcttaccaagtagtaacataggaattccataagtcaactgaaaccgcataaaacatatactagtaatgagcattaacacttgccatttctcaatgttatcattttctttcaaaataatgcactaattggatcaactttttttaaaaaataaaaaaaagtaatcgtgaaaacaaccataccttgaagtgaacattaggatgaaaaattttcgttaagaacctcacttgaggaggttgtaaaggatactgctcagggactgcaaaagcaagttgaaatataccaccttcaaatggagtctctgagggtccctgaatcaaaaacgaacatttataaagacatagattatatatccaagcaggaaacatagcataacctttctgtaataattgagcctaccttgacaagggcagtccacttaaatatgttattatcatcacaagaaagttgaatatctggatcagccactttctctcgttgcacctctttgaattccttgaatagccttgctcttgatgccttaacagaaaatagttcagcttaccatccaaaaaattggatactcatatggcccattaagctatagagcactttgctatgaatatataagaaaggctaaagaaaaataataatagaaatgaagagataatccatagtcagtagctaacctgcattgttttgctgcttgataacttcactaagcttcacggcaacaaacttgaatgtcgaaaaaactgtaaattcaacaatcatcattttccttcactttgctactctttcttgctaaccaaacacccttataaaaaggcatcaaattataatttaaccctaatctcaaatcttcccacactttccatgactttctctccaaccaaacaactcaacaaaactcatacaaacaacaaaataatttcaaaaataatccagatctgatctcacccacatcacatccaaacataacattaacaatcaa

SEQ ID NO: 87167 - DNA, 615 bp, Cannabis sativa
  modified_base (525)..(528): a, c, t, g, unknown or other
ttagtgttaactaaattcatgaataggagaatacaattaattgaaatacatacaagcagacccacatggattataatggcatgagaatttacagggcaagaattataatggcaaacctagtagagagaaagtaagctttgatagggatctttccgatgtcttcatcttccttagcttcaaacccataggtttggcccaaataaggagacccggaatcgaagtcgtgggtatcaatggatactcgagatgggagagccgaaaatgttcttggattgaagaaatgggttgaaatggttgaataagttgaggggaaaaagaagggtttgagtggggttgtgtgaagggatttggatatttggtggaagaggagggaaactccactccacctgcccattcaccgagcgaaaccttcgctttgtttgttagtttacaatgcagactcctgttcttacttttcgatgctattataatttataaatgccggaggaaaggtagaggtgcaatttatttatttattttttttannnntattattttttttttttgaggaaataaacttgttattataaatcaaagatgaaagtcatttaaaataacagagtttataggcggagg

SEQ ID NO: 87168 - DNA, 717 bp, Cannabis sativa
  modified_base (676)..(688): a, c, t, g, unknown or other
ttttatgcaaatgtaggacccctaatgacttgggattcataaaataatggataataaattagctaaacttagcctgaaaataagcaaacattattggtatttgattatgaacggacaattaagtcacatgtttaataaaagcaaggaatataagtcagaaacttcaccatgcaccatctctttagtttatgacacatttatctcgtaataattgatattgatgcactttttctatctaagaatatataattcaaaagaggttttgataatcacataaaaaattaatgcttgaattgaccttagagagagttgtctcgcgcccataggtattctctagctacctacctgtgtcggttttgagtacaggtacccttttgttgtaggtcattcgagtttttcctgagagtatggcatgagttattttagcatcgtagcgccttggtactcgaacagtggctcgaggcattttctctaccacttcttaccctgacaaaatagggacacttactttatataccatacattttatataatataaagagaaaattacacctagaaacgaaattttgaaaaatatattacaactaacgttaatgattttaagtgttaaatatacctttagttttgcaattttttggtatacttaggtacgttgctctttttttttttttttttnnnnnnnnnnnnntttttttttttttaaaaattatttttttt

SEQ ID NO: 87169 - DNA, 816 bp, Cannabis sativa
atatattagactattaaaaggaaaagtctttatttatttatttttatgaataaagctgtctagagactcatagagatatctcacttcacttagataagtccactatccaagtaattaaagcttcaaaatgccctagctatttctttcttttttttttttgaaatggaatgccctagctattctatatataaatttttgaggtggcatatattcaacctcacagttagtattttgtggaattagagagagaataatcatcaatttattttgagggttctgagatggaaaaaaatattaggtgggaaaccctaatattatgccacgtcatctatatccaactgtcgtgatcaaattacgaaagaaaaggtttgtgtttattctttccgtaataaaggttttgtgatattttgttattaattataaactattatttattgcttatttcgaatataattagtatattaacattaatgagcacttgatgaattaattaatattatattaaatatgttagtacgtactacgtagtgcgtaatatttacgttcaaattttctcaacaaaatcaagctcacttagttcataggttattacctgtgatatatatatatatatatatatagggacctagggttcaatgaaaattattttgggatatatttataaataattaggttcgaaataagttatactgaattatatatgaggagttttcaatctgataaagattttgcaactaaaattagatgccaagtgtgaggacagcaataatatttagacaacatggtgctaagaattccatattatgacattattta

SEQ ID NO: 87170 - DNA, 696 bp, Cannabis sativa
ataggccaaggtaaatgcgggtgatatatctttagagatactttcatcttttatttatcaattaaatccctattttatttggatttctacatgcaaacaaatttaattatttaggaaatatacaagtttcccattttatttctttattgctttggaaaccaagctgatgtaattcttcccaatgaatagtggagccatttcactattcagggatgcaaaatcaattgactcaatagagcacttaagttgctaaatctttgtaaaagctttaaagaaagatcaaaaacttcttccttctttgctcacaagttaatacaagtaaaaggagagtaggctattacaattatccaagggtcaaacctctctaacaaatttgtgttcttattgcttaattattattatttatttttctaatcgctttaattgactcattgtcgttggataaaagtgaaatcaacaaaaccaaactcttagaaaaaaaaaaaaaaaaggggtattctaaacacatgtcacaactcaatgtcctgaaaaatattaaacactaaaatctaccatggatgagcaatggttgagttcataaaactcaaactttgcccaaacttgcaataggtgcaaatttcctcaaaaatcaaccacaaataacaacaatttatttttttaaaaatagacctaaagttcaatcaaacacatgcaaca

SEQ ID NO: 87171 - DNA, 878 bp, Cannabis sativa
  modified_base (39)..(70): a, c, t, g, unknown or other
  modified_base (807)..(810): a, c, t, g, unknown or other
atgcaacataaaattttatttctgatctttattaactannnnnnnnnnnnnnnnnnnnnnnnnnnnnnnntagggcacaaaacccaacaacattcacctcccttacaatgaaataactgaattattgtataatcataaatgcattgagaatctaataatacatatattgtagcaatagaaaagtcgtctctctttaaattaatgatataactaaattgttacatgatcataggacacttcatatttcgtaggtatgcattaagaatctaataatacatttattagtaatagaatagtcgttcacttacaattaatgatataactaaattattgcatgatcatagggctcttcatatttcctgtgtaacttggatcgatgagtgtgcaattttattgtataacgttcaagtgatattgtttgacgcacaagctctcagacgactttttcgcctattgtttcacgtataattttacataaataacccttctctctcttgaggacccctcaaaatctgacatttctaaacatattactgtcaaaaaatgtaaaacttgtataattttaatgttttaaaagaaaaataatcgatttctcttacctaacacaaccagttacaaataaaaaaataaataatataatcaacgaggcccaccagtaaaccattcatcaaaagtaaggacatcccactattcaaagcctatatataaaaagaaaaataaattatttcacaaatagagaaaaacaaccaaaaaattacaaaaatatggtttcagagaatttgaaacatttttacgattttttttatnnnntttacagaaaatacagtcttttattttgtactcttgttaatttgatgttaattttttgttatctgtat

SEQ ID NO: 87172 - DNA, 765 bp, Cannabis sativa
ggtaaaataattccaacactagggacttcttttattattattaaaaaagtgtgtgtgagagagagagagagtactgcaaataggccttttaaaatgtgggtttttcagccatttagatgtgattttggcaaaattcacaaccgtaggcgttgtaggagttactaaaggggtaaaaaacaaatacctctaaaaaaaatcctacagtggcaattatttggaaataatcacctctgtccctaggggttaattgcaaataaatgccaccttaattgttttttttcatattttttattttaatgacagttcgacaatggagaatgataaatagagagagagcctaatttaaccaagaaatcatatatctaaacataaaataactttttttcttaaaaaagatgcaccataaatctgagttagccacgagaaccccttgcaaacagccaaaataaaatggtaagagaaaatacaaaaagaaaaacatcgcagaatgaaaaaaagagatggaacctttggtggtggttgggctgtcggggttgagtgtcgtcaatgctatagagagacagagagttttttttccgatggtggtgggatctttgtggttaaggcgttgttggtgctagggtcggttgttgggctaagaaacacatagaaagggagaggaaataagaaagaaaaaatacctttcatggtggttggcagtggttggtggttgccgatggtgtttctttaggaactttagggttttgacttttttttttttttttt

SEQ ID NO: 87173 - DNA, 541 bp, Cannabis sativa
  modified_base (394)..(394): a, c, t, g, unknown or other
gtcaaaaattgaaatttccccttttatatatgatgtccccattatagcccttaggttaatgtaaatcatatgctacacttaagtggaaggcgagcgtatattaggtaacccactcacaaaaattgttagattatttttaattaatggatacaaaaaagagacattcctcaacttataccaaaaaaaattggaagagattttttctccttttgtttattaggcctattattatgttgttattttcatattctttaaaatatgatatttttctaaatgccactctcttggagggcccaatccgagcccaaacctggtcaatctacccaaaaaccgaaaattaaaatttcagaaattctaaatattttatgacagattttctttctttctttctttntttcttttttctttttttttgagaaagttttgtgacagattttcgctacaccattcttgcaattcatacctaaaataatatatgatcctagttttgttttgataaattgatgggggtaaaatggtaattgagtaatgtatatcattt

SEQ ID NO: 87174 - DNA, 558 bp, Cannabis sativa
  modified_base (55)..(64): a, c, t, g, unknown or other
aaacaagctaaattgtttttaaaaacaattttcagtttttaaaaacaaaaaacannnnnnnnnntatgatgccaaacatgcactaactttcctgaagacttcacccggaacggacatgatagacttccaagaacgcccttcagacgacatctatcatttcacaagattttttctggatggacaagttagacttccgaaatacaccttttcagataacatctaaatttctaacttttggaaatattttaatttgaaggaactataccacacatttatgtttatataatttgtaatacatgcacattgcatatatacatgattgaattagtttccaaacacataaataatacatgcaacttttgatgtcgaatttgttttccaatttctacaattaaaaaggcatttacatattgatagtcctaaaatcgagatcccccaagcatatgtaatgttgatgctaatcatgagagataacgagggaacaaaaaaaaaaaggaagagaggagtgcaaaaacaatggaacaagtttttaccatttttttaaaaataaatttaatt

SEQ ID NO: 87175 - DNA, 584 bp, Cannabis sativa
atatatatggaacacttcgcaatgagtattacccattgatgagtactaaacaaatttaattataaatatttatttttaaaatattaaaccattaaatttttattcgatgacaaataacaaaaaagaaatttgaatttatatatttaatttagctacttaattaaagaaaatatcaaaaaaatactctttttatactatattaaaaatatgttcgtataaaaaatatttaagttaaactcaacgtttttttttatcatttttattgtcgaaattatttttttattattatttttcagtcaatgaaacaatgagagatttttctaattaaataaaaaaattaagcataaaactcaattttttctactattacccattcatgtgtaatacctattaagagtgcactcatatatatagcgaagagagataagtaataaaacaaaattagtagaaatcattatttatgaattacaaaatattaaactcgaataaaaacttagattaatataagattaaattaaattcaagcattatatagattaataaaaatttgttcataaacaaatgtttattatgatgtacttctt

SEQ ID NO: 87176 - DNA, 559 bp, Cannabis sativa
tgacatatatctatacacaacaaaaatatgtatccaaattaagaatatacaaaataatttatggatgattccatttttcagaattaaaacttgaccctccatattccacaatcactgcaagaaatatggtgtatatcttcggtgttttatggtacaaaatataaaatacaatgataaaaggaaaaaagataaagaaaaaaatttcggatctatgtttttgattatatcaaaatatataatcgatctaaaatataggtcttcactgtcttcactaccgtaacgctgttggaaattattgtgctccaatagaaatataaaaccaacaagattacaactctatgacaaataatacaaataataaaatcatggattaaataatgttacaacatgaaatagaatatacacataaaatagagaatataaagacgaagagaagaattacaactcaaagcaatacgctaaacgtgaaacacaatatataaatagtatatatatacataagagatgtgagagcaatctcaacaccacatacactataagtgtataataggggaatcac

SEQ ID NO: 87177 - DNA, 784 bp, Cannabis sativa
aactaccagattaagtttcaaattgttatttggttttaagattaatattagaaaatacctttccagccaagttttcaagaaactctatcttcttctcaattgacaatccacgggattttgcattctctcctgccaataacaccagtaagagaaaaggccagaaatccaaagttcatttttttttctgggattttctaataggggcatcaacgttatgaactttaacaaaaatgaagataaagatatatttatatgtacatatttatataaatattaattaactaaatcccatcaaccaaagatcaaagctttgaacttttatgcactaatgtgctcaattttcgagctaagaaaagggttaaaatcaagaaatatcgaagtacctcttgtggggtcaataataggaggggaaagacgaaattcttcttctctctgaagaacatcaacggtcgccatgatcgaaagaataagagtagatctgctaattctggggtgaagcttcgtctccacctctgtttatggttctatggatggttgttaagtgttcgacgaaagtcctgtgaaaaaaaaaaaaaaactaataattatacaagagaacacaacacaagccgaatatcctctcctgttatgtgatgctaaattgaaattttataatacagaaaaaaaaaatgaaatattatattattacattaataatgccgtgatgcgcactcatgggaattgtgccacgtgtacctaacaggatttttttttctttacgggactcctcttttttttttttttt

SEQ ID NO: 87178 - DNA, 915 bp, Cannabis sativa
acatttaatccaatctaattcaacccaaccaaatcaattcaatatctaattacaaaaaattaaatatttaattacaattagattagattgaacgttaaaaattaaattctaattaaattagatggattattggataaacaacatccaattcaattacatttatatttaataaaaaaaatatatttatacaataataattatcaaattattattgtaataatttgcaataacaagttggatatataggaatacaaaattagtacttatagcaacaaataattttataaataaataatgcataaaataaaaatttacataagagaattatacaaggtatcaagatttattttgagactcatttagtaagtcgtacaagggttgtattgtattaaataataaataatattatgtttgaataaattaatatactgtattaattattacgaccaaaattttaaatacaatataagttgtattatttaatacatcacaaatagtccatattagcttatattataatatttaaaaaggatccgaggtcaacctcaatctttgacgcagaccctaaccccaacctaagacccaaactcgaaaacaaaactgaacctgagcatgggacctgtgacctaaacccggacccagaccccgccccaaactcgggacccagacccagacgtgaatccaaaccctggacccaaacctgggacctaagatccgggtcctccagacctggacccgaacccgagttgtagtcggtgttggggccgagtttattaaaaatatattataactttattcaatctattaatacaaatcaatatcaaacatagtattgtatgaaataatactaacacaatacaatacaatctaacataatataatacaatacagcaaaacttgtgacttaaagtgaaa

SEQ ID NO: 87179 - DNA, 672 bp, Cannabis sativa
tcaccatttttactataatgccaatgaatcttatcctcaatgtcccaatcaatacataggagtttgagtattaatttagaatgtaaaatattaaagttagcacgaataaaactttcatcccacttcccatttgaatgctttagatcagtcccatacaattgctcaagaaagctaggtgggttgaagaccttgaaggtataatgtcgtggcagccatagatcttcaagaatccgcacactctttccattgccattgccaattcgccattaagaattgtttgttttcctcaaatcaaactcagccacacaaaagaagcagatgcaccacatttttcccccaaaaccgttccattagggaaatagctagcctttaaaaccttgctacataagctctccgggtgtcgaatacaacgccaaatttgctttgctaaaagcacttgttaaataactccaaatctcgaaaccctaacccctatgctccttaggtttacacaagtaagaccatttgcaccaatacatcttttttttcttttactaaggagccccaccaaagccccaccaaaagtgggcgaccaacttatgaatattattatattattaattatagttttaggcaattcaaaacaactcatcataaaagtgagaataacctggttaatagctttaattagca

SEQ ID NO: 87180 - DNA, 963 bp, Cannabis sativa
ttattgttattattattattttggccaaataaataatattaataatattaattggttttttcttttttttttagccgaataaaatttttgagccaaataatgttaattggttcttgatattggtaatttgtagttgtacagtaggaatttatatatatatatatacaatacatgatttactaaaaaaatatagatctggagctataaaagtctaaacaaattttttgataataagataattacaacaatgctataagcattaatattaatttagatatatctaaaaaaaatattaatttagataagaaaaattatataaacaacaatgttgtacattttacagagaaaaaaaaatccaaaaacaaatttcaaaatgaagtaaagaaaaaattgtgcaactaaaatgaaacctagaaaatgcaatcaaatctcaactccatcaacaagctccgaccatatcttggaatgcccattgcaattccattgcatctgtgaaagcccacacccaaacggaatcccaatacgaacctcatgaacctcaactgccgacgacgcaaccatcccagatgaacctaaaccccgatggcgcaagcccgatgcaagcctaaaccccaaccgctacgacctgcacataaaaggaaagatagattgtgataaaaaagatgaaacgaacaaacacaacaaccaacagatggatctcaaagaagatggaatggaccgttgttgatcttcatttgggtattcgggtacaaaaatttccatcgaaagcaggggctcgtgcggaaagagagagatggagattgagagaggaggctgatgcggttaacaatggagagagctccaccggagttgggctaaacaaccgcccgtaagagagaagtgaagggaggagaaatggtcgggttaggctgagaaaatttagggatttcttttgctaaagagaaaaatagagagaagaggaaa

SEQ ID NO: 87181 - DNA, 1054 bp, Cannabis sativa
cacaatcttgttggcgatgggagtctctatgaccagggggttatggtgaggaaaacgcaccatctttgcgtcttcttccgtgaatgtaattggttgatccattagtcgggcctttgagctgggagctgagtaacttcccaaacctcgctgtgtttaacgcccccagcgtagcgctttaatttctttcgagtggtccctccgatatggggccctccagagatcatagctactcttccattgggtctcgatggtaggccgggagtctgctgaggttctcctgggggagcgactggcactaacgctccaggcgtaccccctgacgtcccttggggcaaaggtccccctgccagaaccgggttgagatgggggagacggttgttgatccactcatagagatgacccaatcgaatcaagttctcgatctcatctttaaggtttttgcattcattggtgctgtgtccaatgtcattgtggtactcgcatcttttgttgagattccttcgggagctatctctatacagaggaggcggtctctagtagtgtgtattttgctttgtggcgaaatacacacgctcttgggagtccgtcagctctgtgtactgggtgtattggggagtatacccccttttctggcgcttatcctctgtctgattgttaccttttgaggacctcttgctccgggagccttgagaaggtccggctaggcttgcagcaggagctgagtgagacgggacttgtctgctcattcctgaaggattcccgtagtgcgaagatgcgggagccaatgcctgactctgattatatcctggggtagcagagaattgtatatcgctcatttgtggagtagccgaaggtagggttcccgggagttggactccaggcacgtaccccgccactacggtcggatagtatcctccataagccactatttgggcttcttctaagttgatgtacttttggacccttttagggaaatcttggaggttcgcagctgcttcttgctataattcgttctagaaaggagtccctgtacggatccctgcttgaagaagtg

SEQ ID NO: 87182 - DNA, 586 bp, Cannabis sativa
tttttcattttcttttttcttttcattttaaatctttttaaatgtgttaagcgaatatcagggttggggtttggttatcttctcattctgatcatatcggttcattaactaaaatggcaatcattcaatcgtctatttatccttctcctttacctctctctgattgtggtagagctaaaaatgatttatcaatctgtgtctctggtggattgcgaagaaaaaatgagataagaagaagataggcgagaaaggaaagatttttgaatatgatcgtgttgtcaaaagagttaggaaatgtgctgctctggattctgattctgaggatgagttagatatggtgttgaggtttgacctcttgaatctatttcttactgtcagttttgacagttcgtatctacctaactaacttaactgttctgacagttaagttagttagctgccatctctatataagccttgaagtttcctatgttcagagaggagtttttagacagaaaattcagaggtttgagaaaagattgagagaaataattgagagctgtaattgacctctcttgtgtttgagagagagtcactcgattgacac

SEQ ID NO: 87183 - DNA, 6198 bp, Cannabis sativa
cttaacagctaaatttgaacagaagtgttaaattgttaacagaatagtggttttgggggtttacccgcagaaatttgggttgtaggagttaagtgaaaccaaaattaaaattttaggggttttgccgccatttactcaatatagtaataaatctagaggaaaattataattttactaaaatttagtatttatacggctaaaacagatcattaggtcgaagcttaccaacttagtaccttttttaccatacacgaaaacagttttagtatttaaccgtaaaataaatccaaattttggatattttaacacatttttatgtttggtgaagtttgtaagttttatcattatttgaaaaattgaataagatgaagtagaagggcagtggacactgcacattatcttcaaatgtctggttttagcacaacaagaaaccttcctctttagctcagagagagagagtgtaaaatgccgaccttaaacctcttcacgaatgtcccagtcgacgcagtcgtcgcctccgacattctcaaggacgccaccaaagctgttgccaaaatcattggcaaacctgaatctgtaagcatctctctctcatatatatatatacacgcacatgtatctaaatatatatatctgtattcaatttggtatgtggtttttgttgtgaccacgagctgttcgatgaaatgagcatgcttcgttttaagtttgtctgcaagtttcatttcaatattcctttgttctgaactaaagattttagggatgaaaatgaaataaaacataattctaactgattatagacttagagtggaatctcaattaattgtaaacagtctttttggtttcttttagtttggcaaatttcacttttccttgtgaggcagaacactagagtagaacatattgatagaatgctctcagatgcattattttggagcatagttatttatatcgccagctaaactgtacaatacaatcatattttctaatttttctcaacactgtaatccaaaccagagaagtcagctccaaacaccaaagcattccacatggctgtctagcaatgagggcgctaggctcggttctttacagaggccaatgtttggttatttacttaaaggtcgaagtcgaaccaacagagtcatgtgcagtggtaccattagtagtagtcccattgttcttagtttcccttctcctgctaagtcagtcgacccaacaacattccttcagatcaggtcaatttgcctacctccaaaacagtactccttttcctttctgttcttggttttggttgctactttaacacttagttggtttttgactctctgatctttgtttttcacttttgggttcccgtgaaacagtgttttattgctgtctttatattggttatcgaacttcattgtgccagaactcatctccagatatttccaattcgataaggtggaggaagataagaagcaaagtgttgatgttgatgaagacgtttaagtgtgaaacgacaggaccaagattaatgaagctagcaaaccagacaaacagagcaatgagaatgagaacaatgactacgttactttttatttccttttcacattcaaaggaaaaattgaaatatcgaactaagaatccaattttatgaaaaccacattggaatatatttttagtgcgtttaataagtcttgctgtaatgaaaagaaaacttacaattgattgccaacaaaaccaatcatgatataaactaattaagcccctcccaaaaaaaaaaaaattataaatacactctaaattggtattcatagactgccaagtgtggtactacatttctgctcacaaaacgtctcaagtttgattccccaaagtcaaaaaagaaagaaactctaaatgattgtccaagcattttcatgtaaagtagtaggtttttctgcatggggcatgcttccaggcttaggaggtcttttcgaaaacaacaatgaccttccatcaaataaacttgaaaatgcttgacctcttgccttgtcaccgtcggaggagttcttatgctctttcgaagctggtttcctcaggttcctttctatgccaccaaagttgagatttagcctcttaaacagtctttttggttcaccttcaggactaggagtatcttctgctaccttcactgtgtttagcacttcctcaggattgtctaacattctctccactgtttcgtatacctatacaatcaaataaaacaaatgtaatttcacatatttaagaaccaattctttacatcaaaatcagttttaaacttacgagattttacctgacaaagatcatcgattttctccctcaaagtgctcgattggcaaacagtaattgcatagtctttgcattcataaaacagctttgacaaaccactgtttatagatagagaaggctccgcaataacaaagcctaaacccagctgaatgttataacaacacgttgttagtgacagcctattgtagacaaaattcaaaacctcaaccacgctaataaaaaaaaatgaggaataatcaaacaaaaatactaatgaaagatgaaaatatatagtgaggatttgtcattgaacttgcaattcacagtatctctgcaaagaaagttatcttttagaacttttaaagccctcacttcactactgtctaaaattatgacactaaccagtagttgtcaacttgtcatcatgtcaaatgctcaaaaactattgcttacttatgtctcagataaacagttagtcaagaaattaagccataatttgtcaaatgacattggtttaatacagattttttagcaaagtagaattggacaatattcttcacaaggaaaaagaatgaaagagaaaaggaattagcagtttatgcaaattcactaactaatttactatattcaatacttatcaaaatgacagcgtcaagagataatcaacttactaaagatacaaacaattgctcaaaaagctcaaaaggtggaatttcctccaaagtgtccagaataccttccctacgggagaaccaatagcttagattataatatgataaatgaaaactaataataaacaaaagtggaagcattaataattgcaactcacactgccaaatcctcatcaaacaatggtgtttgtttgactgctggcactggctttgatgtttcccacagctcatgccataaatttcctattgagtaagcacaaacattgttcaaccaaacttcatacaacattcacaagcacgctaatgtatttcataaactcgtttcaattgactagattaagtggaatggctcaaaatattgggatttctcttctggaaaagaaaaaaaaaatggccgccatattcggacaccttaataattgttagaattttcttgattaaaattggaatccaccctttaaacctattatcagtctgaaaaaaaaataggacattaaatcaaagagtttagtttaaattcacacactactatatgtcggtaaatatatggttgtgtttttggtaacaatggagcttttcatgaagaaccacaaattagtttataaacatgtaaattaacctcatatatttgtacgtattcatgttttataccttctttttgcattcgactacttaattgacctctcatagacaatatgtccccatcattagaaggatctttgtcttcaatgattggctctgcttctgtccaatcaggaggagagtgccacctaacaaaatcttccaaaatacaaccaggatttgctgcctaccaaatcaaatcaaaagaaattagttcaaatatacaaataggaaaatatatgagattgcaaagcatatatatgataaactcaaccttgaaagcttgcatgtcagagaggagttgagaacacccagcaccaacactgaccattaataaatttcgattattagaataaatctatagtgattaagacacaaacacagtaataaccacagataaaattggaatacaaggtgcaaaacctgaaaaatatattttagattgttttatcaggtaaaacaggattagcatacccagaacaaaaacctaactttctttaaaactagtgtaagcttacaatatctaatagcaatatgatatattaagtaaaaacaaattatcttaaagtgtgtctaaaatacaaaccttccagttctaagcacgaattcctctgtttctttaataagatcctcagtcagcaagggtccttcctgcagttaagggtgaagaaaatctcaataaaagaagtaagcacaaacagtataaatatatatttcttttgtgggataattgtgtcaaaacttcctgtgttaatccaatttttgttagaaaatttgttacaaatagtttcattgtggtaaggtaaggtcattagtcaaacctgggttataggatagtacattggttctccagtttccaacattgttagatctcccattgggcgatcagcgccaagtcggagaacaagttcaccagtatttaatctagcatataatatggaacttgcatgaacatctttgaacgtagcgaactcttcttcatttatattgccttctttaaggacaaagtctaatgattgagaggcaatttctcgacgtctttttcgtgatacacagcaatttataacttgaagttgctgaaatagaagacatgaattcagatctggattatcatctagaggtatgccaggtatatattgttcctcagaccatagttttctcagctgcaaccacaaaatagagtaaggatctatcgttaaaccataaaattaaggaattgattgtcaaagttttccatgataattttaataaaattgttgatacataaatttccagttaaaagattcaccaatatagagaattatatagtgcccaacgaaggatgaataaccagtataaagagctatagtttgagattaaaaaaaaaaaaacttaaagatagaattggatttgagtgtaattggaattaattacacaatttagtacatttatctcaccgtgcaattacaattaactttgtaatcctgagaaagaattaattacattataattactaaaagctttctatattaaatatttactaaaaacatattattttatttataattaattactattttgccaaacaacattaggaatttatattaattaaataacactattttaaaataatgtgattatactcattactagattactagattgtttctagtagttacataacttattgctcttactaattagatactaacttccaaacacacaccaagagttctaatataacaacaacaaagagtttacgaaactcaaattagtaacaattgacttacttcggcaacaactctgcaccaaaataatgccatgtttcgcagagttctgaagttcccaataacttcagctagttttacaacgaggctttcaggtggtgcaccatgaatatctctagaaaaagatgtaatagtaattccatccgtgcaagatttaatattccgtttgagaaacacttcatctgtaaacattttgcatatatgaaaatataaatggaacatcacattatataagtcataaattagacacaaagttatatccatataatccaacagtgtaattatattcaatgatcatgttactaaaattatgcctacctccaccaaagagcgacctaattaaagacaaaaccttggcattgttaccaaactcagatgtaagcttatcctctttttcacgtagtactagagactttactgctgagagactcagtcctgatctctctttgacaggtgaagaacctcctgatgaagccaacaaatctttcattgatttcgacttctttcccatcctagatatgatgataccaaattgataggtaagagattagtatcatcatcaaaaacactggaaaggcaaattcatgcatcctgctatgtattttagggaatacatttattaacatgacaattataatgaattcaactgccactttgtgcaagacatttacatgaaaatggttattacaatgtctactaatttaaagaagagtactaaggaaactactttttgtcctttttttttttttttggtttggatattatataagagaattttgattttatatacttaaaaaataaaaaaaatttattattaaacctaaaacttaaaacctaaaaaaactataccttttttttcaaaaccc

SEQ ID NO: 87184 - DNA, 669 bp, Cannabis sativa
atatattttattattattaggcagacacaaaattagcattctcatatttcaaagaagccgtaacataacatgattagttcatcttcttggactcatcctccacttagcaatttcaggaaaatattaaataaataaatgaaatttaaacaaacccagataataaatcatgaaactcaagatatcatccattaaagcaacccaaaataacaataataaatatattatatggaatttttacctcaaatgacgcggctcaacattcaattggtcccttttcggctttttaaatattgtttccgaattcaatgagcagaaagatacatggcgtggaactggaaagagatggagagagaaaaaaacgtgcccatcagtggtggttcttcttgctggctataaccaagcagtggagctttcttttcttttcttgttcggttgttcctgctggttcttcttgttcttcttactgtatttgaggaaggagactaggaaaagggcttcttcgaatttgcaatttagggctttagggatttttgaagtgaaatttaattttatttttagttaataatgaattgccgaatcgggtcagccccgatccgaaaaaatctgaccggggcggggcggggcggggcgaaaacccgattagatatccgattgtaccggggcggggct

SEQ ID NO: 87185 - DNA, 804 bp, Cannabis sativa
atatccaaagctttgcagaggtccttttcaagaatatggatatttttgtttatgttattaaaggtgagaaggggaaaattgcagctgcaaagaatagattatgataattaattaaggttcaaagtgtcgtatatacagggttcacatttctgtcctttcctttcatatttctctctctctctgtctctctgtctctctctattatgtttttttttttcttgtcgtgtcagtgtttcttattagaccattagtcctttgttaaatatgtgcttcccgtactaatcaacttcattcattaacatgctttcagaaaaaaaaaaaaaatcattctttaatcaatagcacaaactgttgtttcctttacctctgcttactttagttttatgaatatataatattattagaaaagaaaattgtcaaaaaaaaaaaattattagaaaagaaaatttaggtgtccgtttggcgtttgatggacactgcattggtgtcgggttggactaagatttccactacaaaaaattgctacttttaatggcaactttttagtgacaatataaatttttcgtgactaaaggtgacttttagttaacaaacaattatttatgactaatatctagcatttagacacaagttgtcactaatttagttttagtcacatcaagtattgtgactaaaaatacatttagtcacaacaaattatcactttcttcactaatacctttagccacgaaccttttagtcacaacatatgaataataatttataattagtcacaaattgtattgtgactaaaagtaagatttt

SEQ ID NO: 87186 - DNA, 1063 bp, Cannabis sativa
aggtgggacttttagtttccaaaagcacttctagaacgatgaagtttcagtgttgtgccattgcccttgactctcttgtaatagattgtatgcactccgaacagtgtacccacccgtgacatccttatgccaaatgagatggtcttcagtttgagctagatttgttggaatggccaatatgagcttcctgtcacgctcaaggaatagatcatgtaacaattcgacatcccacccttccccttccatattcataaggttagccactttgacattcataagagcggggtgatccgaaatgactctcggattcaagttgtcttgcaaccatggttcacccaacacagagatattttcgcccgttcctacacaccaccgaacgcccaatgacaccaaatcttgagcttcaagaacacttctccaaacaaagcttggattattgcctaattccgccgataggtacgagccatttgggaagtatcttgccttgaaaacccttgatactaacgagttagggcgagtgagtaatctccacccttgtttccctagtaaagcaaggttaaaatttctgaaatttcgaaagcccatgcctcccaagtctttgtgcttgctcaaccgatcccatgagagccagtgtatccccttacttgatttatttgaagattgccaccagaaccttgttatcatcttctcaatgtctcttgtgatttcaataggtaagaggaaaacactcatagcgtaactaggaagagcctgagccactgatttgaccaacacctctttcccggcctttgacaacaatttcccttcccatccttgaagcctctttctcaccttcttcagaagaaatcccatggctgcagttttgttccttcccaacgtgcttggaagtcccagatacatactagactccgtagctggttgcatatgaagctgattagtaattcttcctcttaagtcttctccaatattattactgaagaaaatagaagacttattaaagttaactttttgccctgacgccatctcaaacttttgcagtacttcttgcactctgtgagcttct

SEQ ID NO: 87187 - DNA, 502 bp, Cannabis sativa
taattcctacactaatgactcttttgaagagcaagacaacggacacattatggaaacaccagcagcatcacctgctgaacatgcttctgctgaacaagaagccgaatctcagactcctctagtgcacccaagagaaacccctcctgttcccaggcgcaccaacagagtcaccaaaagaccaacatacttgcgtgattatgaatgccattctctattacaggacaaaaattctactccccatattcttgataaatttttgtcatatgaaaaattatctgacactcataaagcctttgtttctgtcataacagctctttttgaacctgctaattacagccaagcttctcaacatcgcatatggaatcacgctatgcagcaagaattatttgccttactcaaaaacaagacatggacctatgttcgtttgccttccaacaagaaagccataggatgtcgttgggtgtataaaatcaagcttaatagtgacggttctattgaaaga

SEQ ID NO: 87188 - DNA, 1079 bp, Cannabis sativa
gactaaagaataaaatagttacaactgaaacaattacaaaacagttacaaatatcacgagggctctgccctagatctgaatcacagatcagtataaaagtaaatatttttctcataacaagtgagacacaaccagaagtgaacaacaaaaacaacaacagagaaaaccagtgaacacaaggccagtttgagagagctcctccaagagtgttgttggtgtgttcatgtaaaagaaaagagagagttttgttagtatcaaaaagagagaaaaaaacagagagaaatataaagttgtaaatcaaaagattgtaacctattgatgattaatggattcaagctttgagggcttgacggagacgtagccggtaattttgggcgaactccgagatcaaatttggtgtctccatctttaccatttctatttgtatttctcatctcaaatctctattttgtttatatttatatttgtgtatgtgttgtgttcttgctaatttttggatttggtatgttgagttttggccgagagaaaggagagttttctaggttggtagtttcgggtagaacaagtgagaagagcaagaaaaattaagaaccctaacccgtggctgtgaagaaaagagaaataagaaaaacctagaaaaccctagaacatcattttcgctgctgccattaaaatagaaaaggaagaagcttgaaaagattagaaccataagaaccctaactctaggtgtgcggctgtagcaagaagaagagaagaacataaccccataaccctagctaccattagagtgagaagaagaagaagaaagcttgaagaaaccctaaccctaggtgcggctgtagagaaaataagaagagaaaagaaagctttagaaccctagagaagaacaagagaaagaaatattagaaaccctaaccctagatatttttgtgctaccatgagttgagagagaagaaacatttgaaaaaggtttgatttttggtgaaagaatggtgcctgccgaagctttagtttagggttagtaaagataccttttatattgagtttcttggatattagggtttggcatctatcttgtc

SEQ ID NO: 87189 - DNA, 1346 bp, Cannabis sativa
ggatgaccaagcaatcagagagtctccgagatacacacagtaaccggctatcgactttctatcatctggacagcaggcccagtctgcgtcacagtaccccacaagaggcaatttatcactgtacttgatgtgaattgcatggtaaatagtgcctttcagataacgcagtactcttttcacagcactccagtgtattgtggttggacatcttagaaattgactaagcttattaacaacaaaggcaatgtctggtcgtgtgtgtgtgagatattgtaacgccccaataacacttctatattgtgatgcatcatcaagttcagttccatcttgaattgacagaggttttcctcctgtcattgaagttgaacaaggtttgatactgaacatgtcaagtcgtgtaaggtgttcagtaacatactttccctgggacaagtacataccagtagcatctctaaaaacttctattcccagaaaatagttcaaggctccaagatctttaagtgcaaagcttttatgtaatctgtcaataaacttgtttacctcttgtgtgtcattaccagtgatgacaatgtcatctacataaatgaggatcatgatgacatacttttgagttttgagaaggaacaatgaagtatctgcacgtgagttcacaaactgccacttcaatagagtctgcttcagctggtcataccaggcccgaggggcctgctttagcccataaagagatttgacgagtttacaaacatggttgggctttgttttgtctttgaacccctctggttgactcatataaacagcctcttctagctcaccatttagaaaagcgttgttaatgtcaagctgtctcacttcccatccttttgagatagctatggttaacacaactcggattgttgaagctttaatgactggactgaatgtttccccaaaatcaataccgggcctttgatgaaacccttttgcaactaatcgagctttaagtctttgaaggcttccatctgcattcaacttgattttatacaccctcttattcccaacaatgttcatccattcttctctaggaactagaatccaagtattgtttttgagcaaggcaccattttcctctgacatggctttgttccaccccttgtgagacaaggcttcttgaactgatctcggctcagtcagatagtgttcccacttggcctgactagtgtacactttgggtttaaatactcctacttttgatcttgtaaccataggatggcttggttttggtgctgtctcaggtacctgactgtgatcaggttgtgctgagttatttcgagtttctccagcctgtgcatcagcagtagtggttctag

SEQ ID NO: 87190 - DNA, 640 bp, Cannabis sativa
cacttgccacattttcgtggtatgaccattacaagagtttggtttgacttaattcttccaattgtttgcttcttgggttgccctactggttgcttctcaacaggcactcaaactgtcatgttctttatatcatcaggcacttcccaatcatcctcgtcaccaaatggcataattgtaccttcatatgtgctcctccaatattctgttgtgtaatatggcgggcatggtgcgtaaacgctaatacttctttgctcagttgcagcacatgcatgaggacaaggaaacttcatgcactggaacaagccacaagtgcaagtctgttcttgcaagtccattaaaccaccggtctcaacttttcgtccagggtgaacctcaacgtgtaagatccacatgtggtgtctcaacgttgttcatcaaaaaataccgaggagatttttcaaattgcgaggccaagtcctcttccatttcaggtgctagggtcttcgtccacttgtcagctttttcttctcgtgtagcaaaccactgtttaactttggacctcaggaatgttacagcagcagtgatcaggttgcctcttgcgtccttagttgtgttgttgaagctttcagcccggttcctcgtcattacattgtaacgtacc

SEQ ID NO: 87191 - DNA, 627 bp, Cannabis sativa
  modified_base (47)..(50): a, c, t, g, unknown or other
ggaaattcacctaacactagtgagcactactacaaaatccactattnnnntaggtcaacgcgactgttcatcgcgttgaccgacgttaatagtactatatttaatatatttgtcatttttaaaatgtcacaaaaaataaacaaattgcgtcggttctatgtctatcactaattacccagccgatggtaaaagtcaagaaattaaaaaaattcgttcattattagcgtcgttttaaaagcctcactcaagctttatgtggcgttttaaaaccgatggtaaagagattgtgagtgtgataaaacgacgcaaattctcctatttttcacttacacccaaacagtcgaatgacactttcattttcgagctctcttttccctctctttttctaaacagctctctttctctcttgcaattttgaagaactgaaggtctctatctttcccctctctatctctcttgcgatttcgaaggtctgaagtctctctctttccctctctttttctcttgcgttctctctctctctctcttagtctctctgtgtaggttaagggtgtttgagaggttgattttcccattgattatagttaatttcccagatttcaagtttgtaaggagtgagcaaagaca

SEQ ID NO: 87192 - DNA, 964 bp, Cannabis sativa
gaaaaataatgatactcatgggtggattttaatcttcctttgcttcgacatatacaatagttgaatttttatattttgcacttttcatgtaaaaaaatgacaaaatagatgaatagattgtaaataattaaaagtagttgaatttactgatatataaaaaagacatttattttttttatataaaaataaataaaaacattgcaaaaaatgttaaaccatgaattgtaatgtgaaatgacttatcttgttaaatggaattagtaattgaagaagattcacaaacactaattcaattatttaaataactattataactccaatgactttataactcaaataactaataatttaaattatatttgtagtaatctaatttaattactttagataaaaagatttaataatgaaaaagtatttcaaaagaatatacaatctcaatatttcaaaaagaatatacaatctcaacaaaaatttaaaatgattgataggaaaaatatctatatgattgaaaggaaaaattatttatcattcaaccatttttataaaaaataatattatagtaatattataatattaaaaaaaaattaaattagtagaagcggctatattacttagattttattataatttaagtatttatattataaaaattaatgaaaaagaaaatcaatttacaacattttaaacaatcaataaatatgtattcagtagactttttaatgaatagaaaatccaataagaaactaataataataataaacacattactacaaaatagtctaataaacagattatactataattatggaaataatttaaaaataacataacttgcgctcattaacagccatcacaccagtcattgttgaccgccgatgacgaagtttctcaactctcccgactgacttatatatactcttgacggattaattgttcaacagctattgttcattacttaagaatg

SEQ ID NO: 87193 - DNA, 689 bp, Cannabis sativa
atttctctcgaggagaactcaaatattttgaaagccccagatgttattgaaattaaagagttggcctagtcttttgcatagcttaaaactctaaggtctgatggtatagcgcattgggacatcatcgaccaagacgtcattatactactattcagttctttctaaattgggaatttgtgaagacttccaatcaaaaattcattgttctcaaccctaagaaacctggttctcaaggtcttgatgacttttggcctataagtctttgtaatttcacttataagataatcttgaagatcattgccaacagattgaagattgtcttgccatccttgatctagccttttttaatcagtctttatcttaggttgatggattgccaagaattgtatcattatccatgagactatggactcttttaagaagaatcaaggatcggaagattttttttgggcttaaacttgatatgtccaaagcttattaatgtcggaggaatttagacaacactaattttgtgcgagtattcaagggctgcttggatactaaaaaataaatatgcgagtacacacttagaatagcgagtactcgaagaatatagtgtataatatatgcgagtattgtaaatagtataaaatagacacagattaatataatggttcagcaggagcttcgggctcggcctgcctaattca

SEQ ID NO: 87194 - DNA, 1491 bp, Cannabis sativa
tgcagctaagtctcagccgaataaacctaatgacctagttcctatgtcagatctgtggcataggagacttggtcatccttcaagtcaagttttaaatcaagtgttaaaaatagctgatgtaaaaccgattatgaatgaaagagttttattctgtgatgcttgtcaatttggtaaggctcatgccttgccttttaaacactcaaactctagagcttctactgtcttagaactagtccatagtgacatatgggggcctgcacccgtagcctcacataccaactcaaaattttatattcattttcttgacgactttagtaggcacacatggctttatcctcttaagcacaagtccgatgcactagcagcctttaaacacttcaaagcattggtagaaaatcaatttgataagaaaataaaagccatgagaactgattggggaggtgaatatgaggcattctcggagttgttaaatgaaaatggcatatacttacaacactcatgtcctcacacctcagcccaaaatggtagagccgagagaaaacaccgacacattgtcgaaatgggtttaacacttcttgcacaagcacacatgtcgttaaaatattggtccgatgcttttcacacggctgtctatctaatcaatagactccccacagccgttttagctggaaaatcaccttacgaactgctacattcaaaaaaacctgattacaagtttcttaaggtctttggggctgcatgtttcccatgtcttagaacttaccaatctcacaaatttcaatttcactccatgaagtgtgtgaacttggggtatagtgagacttttaaaggatacaaatgcttaagtcctcatgggagaatatacatttctaaacatgtagtttttaatgagagtgagttccctttcacatcaggtttcttgaacaattaccaaaaagaaaaaactgtaacacttaacactcctcaatcctggtttgttctccctgttgctgcaacttctcaacaacaaaataacatgcctcggccatcttcttcagcactcaatgcagaaccaactacttcgacaccttcagaggcttcacaccaggttagatttcctgatatcacccctggttcaccaattatttactcaccaagtgctactactgctagtgaatccatacagccacctgtagagacatctccaacagcttcagtagaagcaacagcaccgagacaacatccaatgatcactagagcacgtgcgggcatattcaaacccaagctgtatgttcatcaagcagaagctgacacctcctgtcaagaaccgtgttctgtagcagatgcactcaaacacaaggggtggcatggagcgatggatcaagagatggaagctcttcgtagaaatcgcacctgggttttggtgccacgtactgattcacactctgtagtgggctgcaaatgggtgcttaaagaaaaatttaatgcagatggcagttttcaaaggttcaa

SEQ ID NO: 87195 - DNA, 621 bp, Cannabis sativa
agagttaatagcaacaatcataaacttatatcccatgtatcataacaaaaagtggtaatcttgtactcaatcaataatcaaaggcttcacaaattcgacccactcatctcgtactacattgatctcctcgaaacagtaaggagcatctaacttaaattgtaaaacaaaagataaaaaatattaataagaatgaatagaaaagaagaagaaaaagtagagttttaaaaaagatatataagatacctgaatgaaaaaaaaacaatagcaaatatcagttgtttcattctaaaaattgttgtcctctggattaatagccaagaaatatattgcctaccatcaaaaataatttttaatactttactgaactaaagggttcatcatacaatatattcaacctatcaaaacttagactacatatacacttttttacatcattttataaaacatctgttaggtattaattattagtttaagggctcgtttggattcctgtataagggttccgtattgtattaaattataagagtaaaatgtttgggtaggaccttgtattgtaatagatattacaatcttaatttttaatacaatctatcctgtattattctatgctgaataaaaaca

SEQ ID NO: 87196 - DNA, 1394 bp, Cannabis sativa
taccagctttgccaaaacataaaaactagtgatgtcaaaataccacttaggcatcttaaagttcattacttggacatttttccacttacccagcgcccaggttgacgtcatatgtcaacctgggcgttaggaggtcaacttgggcgctggatatcaacctgggtactaggttatgaattgtttttagtaaaacaaccataactcatttgatttgattgacacaattcaacttttgtttcaaagataattcaatgcttaatcaagtcatgtctaacacttcaactgcaattttttaaagctatattgagacccaaatttttcaccccaagagagttatgaaaataagctatgggttactcgtagagggtttcgctgggctccaaaaaatgactatcaccttgagaagctaattttcaccattagatcatcatctacggtcaaaaacatctaagttgtatttttctcctatttttgtgggcctcattcgcctataaaaggatagctcccttagttcatttttcacattcagaaaactacccacaaggtcagagcttatctctctagtttctctctctaggaattggagctttgacacatagcctatttttgtaataccatctcgtgagaaaaatactcaaagtagacgtagctccattactgtccaatacagggagtgaactactataaattattgtgtctctctttaattttacttaacaacgtactatttcattctcgccaatctagcgagcaggtgtggcttagaagtctagtccagatttgtgagtaaatattttggtactttcattgagagccacagctcaagaaagttactagcaagatggttgcaacatgctctacaagtgttgatagagaaatcccaacaactggccaaataattgggggcatgccaattgatggagttggaactaaagccactcctgcgccccaggtgccaagagcagacctcagaaccggctccacaactcatccttcaaggccacaaaacactcatgggacaggcaccaacatccaaatcccacctggggagcctcacgtggagattgatgatcctgaggaagctgatcctcgggttacccagctcagccaaactatggctaacttacaacaacagctgggagactctctagaaaattaacatgaatagttttatagcactagttcgtggaaaactagaggaacattgaaagccaattagttgagcaggaatagcgatgagctaacctatctcagcagattaagagatatattgagattgagagagatagagttaaaaatagtagttacggctcgggctgggctgacgcgcgaagggcagaaagtagggcttcgagtggacaacagacggttagcctttgggcttcgagtggagg

SEQ ID NO: 87197 - DNA, 660 bp, Cannabis sativa
attataagtgaataatctgaaattaattgggtttgaaattgtgtgtgaatgacttaaatgcccttgtttgagtttagaggtgttatttggccctaagggcaaaatggtctttttgacccttattttacaaataataaaagaatgaattttgagagaaaattagagtttattttctagttttgggctccttatactcgaaccctctctctctcaaaccctctttggttttcccaatttgatttggtggaaattgtttggaacttgggtattgattgaagctttgaagttctggatttttgagcttggatttgagctagtaatttcagtttctaattgatttttccttgttcaattttatggttaaagagcatgaaatagttgaaatgttcttgaatttgcatgcttatgaatttggtgtttgatcttggtaaattgggtgtgaattgcatgatgttgttgtaagttatattgttgagtgttgggtgagattcttagggtatttcttatgattgaattcatgttctattttgtttattgctactaaattaactgagttgttttagtttgaagctcaagttcatgagcttgaactttgttggtttggagcttaattttatgcttttgtgcaatctaaaatatggagttttacgttgaattttg

SEQ ID NO: 87198 - DNA, 510 bp, Cannabis sativa
atccccgttattgactaatgaagtctaactttaattgctataataaagtgaaacagaaaaactgtaatagattgataaattgaagtctaacttttgttactatattgttcaaaaaaaaaaaaaaaaaaaaactttagttactataataaagtgaaacagaaaaactgtatttgtttatagggaagggagcaccaaattataaaagtatttgtttattaaaatggtaaaggatattcccttgtacatgtcaaattttgcaaatacgattttattttcaatcgaggttaaactaaattttaagtaatttaaaagattaattgttaaaaataggcaacacttagtctttttcaaagaaaaaaactcaccaaaattatgctttaccattttttttttttttaaattcaacagggttagtaaatattcataaagttgcagtaaaaaaaaatgtacaggaataagtccaataacatctattgtgttgttacagtttttctgttttattttattata

SEQ ID NO: 87199 - DNA, 882 bp, Cannabis sativa
aaagtggtttgtactcacttgaggttgccacacttttcaaattttgaagacaaacattcattcaataggttcttaaaaatttaagagcagctaatttttttttcttattgttgcatgcattagatttttctgtagaataaataatagacacaaagagtatttaataattgataatttgataaaaaaaaataataaaataaaaaatatgaataaaaataataatcacattctcataataaaaatcatattgaaacttattaattctctttttttagtattaagaaactcccacattctacaaactcttgttaagaaaaagaacactaagaatagagaactaaaattaagaaaaattaaatagttaattgaattatgaaattaagataaaattattaggatatatgcaaaatttagaaattgaattaaaaaaaatgatcggtgattattttttaagatgtatagtgtatacacatatttattcttgtaaattttaattttgatttttttttcttttttgaaaaaagaaagagaaaaatgtaatatagattttaggtaattttatttatttaaatacttaataatactaattaaatatttttttttcatataaattttgagtgaataatgggagtgacaaccatttttttaggattcaggatcatagtatatttaggatatacacatattgatatttttttttattgttaagcatttacttttgtttggtattatagattattagggtatgtgtatatatatctacatctatataaatatatctgtaggatttaagattaaggtatatgtacatctatataaatatatatatactaggtgaatgcacgtgtcgagccacgtattgctagtttcatttaagatttt

SEQ ID NO: 87200 - DNA, 1414 bp, Cannabis sativa
ttttataagtttcttttttgtttgtcttttatttgtttttttaatgagataatgtaatgcataatatatataatgtagtgaaaattatatatatgtcaaatttaaactaatattaattttttttttctttctttccttcacgatacaaatgatatacctaagaccaatatgaatataccacaaacttgaactaatatactattaaatgtgatttttttcccaagatatacaatagcatacacaaaatatatactacaatcataaggagaaatactataatgaaaaattaatataataaattaaaaaatattatatataccaaaaaattaaagacaatgttttctagtgaaatataactatacctcaaacttaaactactattctacattttttaattttcgtctttcgttcattatataccataacacattaaaataacataccacaatcttaaactaatatactacctttcagtttttttttaatatactattgcatataaaaacgatatactattgtgcaaaataactataccaaacacttaattattcaagattataattgtaatttcatcatcaaaattttaactgaatgaacattttgttaatttttttataaaaagagacatttattaacttaattgttagatttagggtcatttttcatcttggcccaagattaaaagaaattaattaagatttttttataaaatgtgattaattaaagaaaaatagtttaaaatagttagagtgacaagaaaatgaaaaagagagaaaaagaaatagaataagtgtttgtattttttttaaataataaaataaatttgtgagagagtgcaaaagtgttaaaaaatgagatataaaaatatatgcttattatatatatacttttgtttttcaattttaaaaacagaaaataaaagtgtattatgtaaattttatttttattttttaattttatttaagtctggtataagtctggggttagagtcgggtttagtgttagggccgtgggggggatttgggtccaggtctggtcgaaatccaaaatattaattaagagaaaaaaaatctgttaaaaaaatattaaaactgactttttttgttttcaaaattttgatcttaattaaaaattaaaaagtgaaaataattttatagaacatgtttttgaaaaatatttttatttttctaattttaataacagaaaactaatcaaaaaagtgttatcaaacgccaccttaatactccataaaaataccaccgttgtaagtgtaaggccactaaaagtttgaaataactaaaacaacaacatcgctaagtaatataattgaacaaaatatcatgaaaataaatatacaaaataaccaaatgttacatattcaacacaaaacaaaatccactaaaaatataattaa

SEQ ID NO: 87201 - DNA, 1121 bp, Cannabis sativa
atataatattgttacttttttcagttaaaattgaaaaaaaaaaccctaataaaataataaaaaattaatgagaaggtattatattttatattatattaaaaatattaattaaacattaaattttgtaattgtatattggagcacaacactaaagtttgacgtaaatatatgataaagttactttttgtgaaaaatataatgcaaatttggagtgtacatcagtcggtttggttggattataatgtatttttaccaacctaatataaatgttgggttgcaaatatctaattgtaacccgtccattaaaaataaaaaaaaaaatgtaatctgcccaatgatttttgtcgatttagtcgggttaacccgtttaaatcaatctttatttttatttttcattattgtttatttttggtgttcaaataattgacttgaaaaaataaatatatagtaaatgcctctcaaaaataaaatagttatagtttaaattaattttaaaaaataaatatgaattgaataaacattaaagtattaaacaatatcttttaaaaaatggaataaaaaaaaatactcatatgtaaatttaaaatttcaactttaatattcaaatacaattaaaatacaaattttaaatgtaaaatagtttaactattaaatgtaatttatatattatgttataaataattttagtaaaaaatatgtaaatcgatcagtttattcgagttatttgggcggggttagaacaatattcaacccgcccaatatattcattgggtggtttgagtttttcataaagttattcggattgtattttttgtcggtttattcagtttaatttggccagcttattcagcttgagcggtaatttgttaatttttatgaacaactctaatgcaaattatacatctctcaatgaagatagtctaaaaaattaagtgtaatttagaataattacgagattaacgtgttttgttaaactggttaattacacagtaattatttaattagaggtgttaaatagaattttggccaaatgacgcgggatcaataaaaaatgcaagagctttatttaaatgtaaagaatgaatacgtactgatatttatagaggtttaactccgagtgt

SEQ ID NO: 87202 - DNA, 1072 bp, Cannabis sativa
aaaatctaattatttaatatattttttttcaaaatataaaattacactttttttaattaaattacttagttttaaattatttaataattaaattgtttaaattaaaaattaatttcatgaaatttttaaaataataaattatctaaataataatccattttaaaatttgattttcaataattttactaatttattataaattataaattaacataagttttataattatctcaaaattctactaatatttcggcggcataacaactacatttcagcctatctaaaaacttttaaatttgtcctaaacactccaacaatgttcaaatacattataaattcacattatctccacatacacaaaacttacatataactaaaagaaattaaacaattagtaacacttaaaaaaaattacataaaatttatttattttaaactatattaaatctattttttcaaaaattacactaaacaatttaattatatatacaaaagattaataaattatacaaattacatttatttacacattaaaacaaattaacatataataaacaaatataacaataaaaaatactaactgtttgtggtggctttaatcaagaactctagcaaattttccctaataatgcttagtccaaagttcctcaaaaacaaatatttcattatatcaaataaatatatacatataatataaatatttttttgtgtatatacaaaaatatagtatgtatttaaaaacttaaataagtttaccctaataaacatcccaaaattatttccctaaaaaatttaaataccaattttttttttttcaaaaacaaaaaaaaatcatggtatatataaatattttgagtatgtattacatcaatataaaattcatttggccagaaaaagaatgtgagtgttcactcaaaagaaaaaaaaaagaatgtgagtgttgtttagtttctaatgtgctcaagactcgaccattattaatgattaagagttcgtttggtacgccgtattacaccgaattttattgtatagtattatattgaattatattttatgcaatatttttatgtaa

SEQ ID NO: 87203 - DNA, 746 bp, Cannabis sativa
ccatgtcttgttgacacggtggtcataggtgtcgcataaagcaacttcattgacgatgtagtaaacgcaagcatcattggtacatataactacatatacatcaccttatattcttcattttttattttttgagtgggtttcaataagagattttgagagataaataaagaaagaaataggttcagttttgattttctatctttaaatttttaccaaagctacataacaagaattgaatatggatttatttaaaagaagttatcattgcatggtggaatgcgattctctaacttaaattctcttttatggttaaaataatagattcacttatttcaaaagattaattattaaaataatgttaaactaataaaatcagttatataatcacttttaatatataaatatatataattatttttattttttattaataaaatttcatataactttttattatatttttttacttaatatttaaaatatattttatttttattttataagtatattttctaaaaatatagataggaagaaaaacattatgaaaagtagtataaagtaaagattagatctttttatataaaataaaaattattaaatgggtggttttataattttttgggtgcaaataaaattcttcataagtattagggtaaatattattttgaactctgtgtgttacaaaagttaccaattagactatctattttgttaaataacaaaatagactctgtatttttcaaaat

SEQ ID NO: 87204 - DNA, 1042 bp, Cannabis sativa
  modified_base (44)..(79): a, c, t, g, unknown or other
gtacaatacatataaaaagaagtatgtttcaattaaatataaannnnnnnnnnnnnnnnnnnnnnnnnnnnnnnnnnnnggtatttttcaacttaccccttctaaaaatgccaattttaatattttggaccatactttcatcatctttttatttcttttcataaaaaaacacaaaaattaaatccaaacaaaatattttcaacacaaaaatatatcacactaatttaataaaaatatttatttaaaatctaattaatttataattcttttgataaaaataatatatttttttttatctttttctttctttttttcttaattatgctataaataataattattttatatacacaaagataaattaatcttaaataaaatattttcaatataaaaaatatataacttaatttcatgaaaatattatttaaaatttaattaactttgtctttttttaatatgaaatatgtaatatttttggcatttaacacaatccacaactagcttattgctagtccctagcaattcaagcggataacaaaatattaccaagatgaacaaatcaaaacaaattctaccaaatcgaaacaaaataaaatattagtgtaaactctagaaaatactatataaaaatttacaatagatataatttcagttttgtgtgtgtgtgtgtgtgtttcatatcatattcattgctttaattcataatacaaataatattgaaaaatctttaaagtaaaaagtctcaactccaaatcctcacatgtattgaaattttgaaaagaagaagggttgtcactcttggagtttgaaagatatattaattgatgcttgaatggataaagatttttaggatgacaatgtaaacaatattgacccatagataggctaacaaaaaatagtttgaaattcaaatgataagttaactttcgagattacattacagtacctagagcaaaaaataaagaaataaacaacgatttttttttgtgactaatatttatgaaaagtaaactattttcttttgattaatgattatatatat

SEQ ID NO: 87205 - DNA, 738 bp, Cannabis sativa
tgtcgcgcaacaatacttaggaggcgtaatgagaaaaataatgtttggtaaaagatattttggtgaaggaagggaggatggagggccaggtagagaagaagaagagcatgttgaggctgtgtttgttatgctttcacacatttatgccttttctgtgtcggactatcttccgttgttgcgatggttggacttagatggccatcaaaggattgttcgtaaagccataaaagtggtgaacaagctccatgacccaataatcaaggacagaatccgagaatggagaaagggcgagcctagtattagtaggaaaacctccaatgatttgcttgatgttctcatatcgcttaaagattctgatggaaccccacttttgtccgaggacgaaattcgagcacaaatcatggtaaattaagtcaatacgatatattaatatatatggctatcgagcaccacgagtgtactggtgagccaagtgtgttctcacccattggcacgggacgtccctttagaccctatatatcccaagtgccataacatactctcttatttatcaaaaattcattcactttgcgatgcttataacaagttgttctatatatatatatcgaatagtacataggaaatatttatatatatacatatatctataaaataatatttttatatatgacataataacatagtatattaataattattgctcctgtaattcagtatatataggtgccgtttggtaac

SEQ ID NO: 87206 - DNA, 550 bp, Cannabis sativa
ctttgatagcaagattgagcgccttcataatctcaatgagagttctaaacatgctgctgccccaactgcgaatatggccaacagatctgaaaactcaagcagaggccgtggtaataactctactcacagccccaacccgagtcgcacaaactattctggtaacaaccgaggaaatggtcatcgtgggagaggcagaggtcgatcgaacaacaacaataacaaacccacctgccaagtgtgtggaaagtttgggcactcggcagctgtctgttacaaccgatacaatgaagcattcatggggtctgatcctaatctcagccagaatcaacccaaaaatcctccatcagcattcactgcctcaccagaagttgtggacagcgacatttggtacgcggatagcggagcaagcagccatgttacctctgatgggagcaacatgagtcaaaaatctgactatggtggtaaggacaagttggttgtgggtgatggtcatcaagttgccatctctcacatcggttacagtcacattcccacaaatgacagctttaaa

SEQ ID NO: 87207 - DNA, 1262 bp, Cannabis sativa
ctgaatatgactcagtcgtttctggtattacctcaacaaatgaatcaaaaagtcttgaagaaattcaagctttattgatggctcatgaatgtcgtttggaaaggcatcactcggtttctgatatttccaacaaaatggctgcaaatcttgttgttggaaattcaagatctggttataataacagcagaaatggaaatttcagatccttctttcaacagaacagatcaaatgaagccacaagaaaccccaacaattttccaccaaggtatcccaattcgaactcaaggcctatttgtcaagtctgccttaaagtaggacatactgcctcggtttgccactacagatttgacaaaaactatgtcacaccaaagaacaataaccaatccccaaaggcctatcttgctgaacaggaagcatctgaagcaagtgattctcaagcctattcaacctctactgtacctgactttggtgatgacttaagatggtatgttgatactggggctaccaatcatgttgctcttggcatggaacacttggacagtgcaacaccatatcttggttcagaaacacttgctgtgggagatggtaaacaacttctaatttcacatattggcaaaaaatgcattcatactaattcttcttccccattaaaattaaattctattttaagtgttcctactatcacaaaaaatttaattagtgtatctaaactcactcataacaataatattttcttagaatttcacaaacattgttgttttgtcaaggacaaggacacggggaaggttctagctcgagggaaacttaagagtggcttatatgttcttgatgaaaactcctccaaattctctcaagccagcttacaatgccatcttgccacagtatcaaaatcacataaatcaatacaacattcttccagcagtagtatatgttcttgtaataatgattgtaccctcaatactgtgaacaatagttcacccatcaattgtacatatcattccattaataaagattctattaatgaaaatcttcaatctcaagcactgttatcttctgctggtagtgatgtaaatctgtggcacagaaaactcgggcatcctagctcaaatactctaagacaaatcctatctcacatgtcactgcctaattcattaaaagaactaaaattttgtgatgcatgtcaaaagggtaaaagccataaaatgccttttcctctgtcaaatagccgagccacacagcctctagaacttcttcacactgat

SEQ ID NO: 87208 - DNA, 686 bp, Cannabis sativa
atcccattccagtatgtagcaaaaaatgagaaaattctcaatgtgcctttctcaatcgattgaattttgatttcaatttatccattttatacctttttccaaatttgttaaatctgtcattctctatctttagccatccttttttgtccaaggttgttgtttgtaatccttttttggcctcttcatacaaaaggccaataaaatatgattcaatagactcgggccaagaagcatgatcctcaatgtctgaattctttgtatccatctaatcaaattaacgtgagccactaataatactcataaagttctataaacatgttaccaagtcatattatttcagtaaatatttaaatttaaacatgaaaacaacaaaagtataatatgtatgcataaagtttaatttggataaacaataatattgagagtgtccaaaaaaaggacactaaaatttattcaagcaaaaagcaaaaatatccaagtttcctaattaatcatgttgactttaattttacaaaaactacttagttgaatcacttagatccaaatagggcaacttgaaaaccccccaaaagatgtctaaacctcacccactttcatatcacccctctaaactataatgaagagagagagaaagcaaaacacaaccaaaaatttcaagaaaatgaaggacaagctaccgtgtgtta

SEQ ID NO: 87209 - DNA, 1699 bp, Cannabis sativa
  modified_base (1661)..(1663): a, c, t, g, unknown or other
aatctcattcattaataattcacatatttcaaagtctactacctacaataataatctctctcctttattcaattaatccttattattagtcattcattaccattattgtgctaatcttagttaggccaaacaaaaataaacaattattgttatcgtcaattccgtataaattaacgatacacactttatcaaaatcttaaaaatttacacgcagtaaatattggctatttataattttaagtgagactgtatcacttttaattatatgtttgagattagttacacatcaattatatgtaagaagtgtgtgtaagttgaatgtgtccttcccttatttatccatgagaccaactgttgatttaaggggtgtcttgggttcatgcttcccatgattcatgatttctttgttgtaattgtgtttatggtttattattttttttgtttaatctcttaaataattattttagtaagtacctctcaatttcattgattcatttatatatttaaatgaatttttaaaatatttaaaaataaattatctgaccaatcaaaatgatgtgacacgtaagttctgatgtacttaacggttagtaaaggaaggtacttaaaaaaacactatttgagagatatttggttcattggagtgaatgaaactcaagtttctatttttatttattggaggaagtgaagttagagaactgaaaaaggggcaacctttgctttgttgttttcccgctaattattgctataaattaaaacccccttttttgattcaattgcaaaattcaacttcttcttcttatgcaaaagctcatatttttattccaaagagagagaaagagaaagagaaagtgttgttgatattggtattgggtgtacgagtctactattgtattaccaaacaaataaattgccattgatgaatattaaatgattgacctttctcaatattcataggaccatttccatatccatggtgcttgctcctgctgcttcatcttaaaggtgagtcttttccctttcaattactgcccaactctttatttcttatattgttctcttttcaattaccaagtttcttaattttctcctttttctcatctcatcatctgtaagttgactttcatgcatcaatttctttatataatcttatggatttcctcatcaatttggatctgagaaatgccccttttgcttgattcattgttatgatattaagtttcagtgatcatcacacaagagttaaactcacaatcattgctcaaagacaccaccttttatttgtctctttttctttctgtgtttgtataagttttcttttgttgattctattgtgttgtaagattattaatttagctttttagagcatactcatttagtttaatctgacatagaattttctgagatggttgagtataatgatcttacatggattcaagcttaaaatgtaatttgattgcaaaccacatgtttgagaaaatgcctcaaaagggtccatttttaatttttttagttattttttcatagccatgaaagtgactaaaactgtttattgagttggaggcttcacattcttaccaactttgattgactggaatttgactcatttacctacccactcactccaaatcttaatcctttaggtggcgtttggttggagnnnatgaaatagaaaggaaataattttcattccattctt

SEQ ID NO: 87210 - DNA, 621 bp, Cannabis sativa
acctttaaccctaaatctaaataagcatatcaataatttcataaaatttaaccctaaatcatgcaaaaaaaattatacttacctttgacgatattgtcgatgaagaagttgcggttgatagaaaagtcgttgggttcgtgggtagtttagtctgcggtggtcattgagtttgtggtcgtggtggtcgtggagagatgttgtgggttgtgggcgagtccttagggtgagttcagagagcgagagagagaagggaggaagagagaagatcaggtgtttgaaacgagagaaataaaattgagttttatgaaatgttaacctattctaccaatataggttaacttagatttagagaaccaattttaacctagtaaatgcatagacaatcaaatttttcttgattaaaggcattaaatttatgtattatttttcaaatctttcatacttgatcctataaacatttctggcattgtgaaaaatttaaattgtaaagacttgggagatacaacggaagaatgtattttagaatcaccatagcccaatttgatcactattttgagcaattcattatattattctttcagtttgttccctaaggtcactacgactccaatatatgagtgt

SEQ ID NO: 87211 - DNA, 616 bp, Cannabis sativa
caccatgcccatatgtccccagcgtcatggtcaacacgtccctctcccttccacatgcacatctccctctttcacttgcttacgaaagtcgtcctacaaacataacaaatagaattagaaatggtaaaaatgaaacataataatataaataaaattatattttaaacttacaattcatttaatgatttctacagctgggccttccacctcgccttttgtgttcatgtgaagtctttttcatacttcacatctatcaaaatcgataatttggtggcatgcctttttctccatttattcttgaaccatccttacaccacctcgcctagtgtgatggtggtaaatatgtttttccctgctctgttgggcctttattctcctatccccaaattctagactcagtcttatagccacaaacactctccattgttccaaatcaattatgctttcttacagttttagtggattctagtagttagtgaatcgcatctttgaatttaaaaatatcatctattaggatatttttcgaatccttccacctctctccaccttctgaaatggttggtctcttgtcgttctccggtatatcgaacacagactaaaaaaatgaaaattatag

SEQ ID NO: 87212 - DNA, 686 bp, Cannabis sativa
  modified_base (48)..(51): a, c, t, g, unknown or other
actgtgcaggaaagggtaagactattgctgatcagccatgagtgcagnnnntggacgaagaatgtacatgtccgggccatatcagacaaaacggggtggggtctaccagtgttgtgtttttgaaactctcatttgccgcttaggccggctgaaagaaaaggacttgtaataatattttgtaaatgtttttgagatcccaatatttgtaacttttagtttatatagtttaaagtattacaagtttattttcattcctattgttattaaagtttaaattttgcacctttttttattagtaatctcgtttaggggattaggatttaataagtgacttgggtagcatgcctaattatttagggcattacaaaatccatcctcctaatttgaataggtagcaacttaaaaggtttttccatgatgtgagattctactattgggatgaaccttatttatacaggtagtgtgtggatagaattatgtggcaatgtgtgctggaagaagaagttgcaagcattctaaaacactaccattcagctccttatggtgggcattttgtggacaaagaacggtcgctaaagtttttcaattgaggtattattggcttaccattttcaaggatgctcatgattttacaaagagatgtaattagtacaaaaaaggtttcaatattttagcaaggaataaaa

SEQ ID NO: 87213 - DNA, 913 bp, Cannabis sativa
atcttgtatggtatgcataatggtggaaagtcatcacatataatgccacataaactgatgttaaagcatttatacacaaccacaagcttagtgcagcaatttgatgccagctaagatattctgattaaaaattttattcaccaaggttcatgtattcacctaattatcaatattatttgcctctgaatatactaaattaataatcgatagtaattgaataatgatattacaaaaagaaaataaatatacagtgtgaatttgtgaggaaaagatagagcaaataaaagtaatattctttggcttattctcagcaaataatttgtttggtaggccatttgtttttcttattcacttttgtctcaaccactcaatcagctgtgtttgctattcacttagattatattgcaaaaacaaaatacgaattagagtcattaatgagcaacaatacaacgttacatttttcattcaagcttaagcttttgtttagtttcatggctagagaacttgagcagagtgaagactactaatctaaggagaaaaaccaaaggaatggacaatcaaaaaaaccaaggcattaatgagcattctgaagtgaattatgatatgctcattgagtttataattagtgaaagtattttattttggtcattaaatctggaaacagtagacatttcaacatctgaaatacttcacttaaaaattccaacatagcaaaacaaaccaaattgtaaaatacttgaatctcaatatctcagaaagaacgaccgccaactccttttcctcttcaatttatacatataatgactctcatgtttaatattagttccaatctaaaatgacttgaaaagtttaaaaattgatctacacaatctactgagtttttaacaatcaatgagctgataacttgattaaa

SEQ ID NO: 87214 - DNA, 789 bp, Cannabis sativa
  modified_base (152)..(157): a, c, t, g, unknown or other
catacaacgcaatccttggccgaccgaccttggttgattttggtgcaattacgtccatccgacacttgtgtcttaaattccctacccatgaagctggggtggggaccgtgaggggtagccagggagaggccaggcagtgttataatgtcgcnnnnnntttaccggtgttaatggtccgtgagaatattgagccaaggttggcagaagaagatgagttggatccccttgtggaatccaaaaagattgtagaacccatggaaggcgtcgaggaagtgccagtgtgcgacctcgaccctaccaagaaactccgactgggaaatagcctagaattggaggagaaagacaaaattattaaagcattaagggtagccagggatgtttttgcgtggtgccaaggagatatgaccagcataagtctgcatgtgattagccatgtctttaacgttaatctggatatgccgccagtccaacagaagtggcgtccccttgttccaataaaagcggaggccctagaaaaagaggtggacaagctactagccaatggcctgatccgagatgtgtattacccggagtggctagccaattagatactagtgccaaagccaaatgggacatggcgggtgtgcatagacttcaccgatctcaataaagcctgcccaaaagactgcttccccttaccccagattgaccagatggtggacgcctcctctatgttcaagctattgtccttcatggatgcctactccgactataaccagattaagatgcacattgcagatcaagaatgca

SEQ ID NO: 87215 - DNA, 2352 bp, Cannabis sativa
ttgattattctcgtctttaaaaaacgttatgttttattgtcccaatcttaacaaatatcttatttctattgatgttacttttatggaaaatacatcttatttttcatcttcacctacttctagttgtcaaggggaggatgatgatttgttgctatattttgtcacatcctctgtgccttagacatattctgacgggtctcttgttccttcacctgcctcggtcataactcctgcaccccgcctcccatcaaagtgtactccaggcgtacacctcctccacctcttgtttcatgtcgtgcacctgcatcttcgtcattagattcggaactcaatgatgatcttttcattacactacgtaaaggtaaacgcaagtgtacctatcctatttcttcttttgtttgttataatctttttcctttttctcttgcccttttattgctttttttgattctatcactatttttaaaactgttcgtgaagttatgtctcatcctggttggcttgctgtaatgatagaagagatcaatgcttgcgaatgttatttggacttggttaatttacctttaggaaaacagaccatattgtgcaaatgggtgtttatggttaaagtcaatctagatggaacaggagctcacttaaaggtcggtcttgttgccaagggttatgctaaaacctctagagtggactgttgtgatacttttcttttgtttctaaactgagatctgttcgaatgttcattttcatgacaattattcattattggcctttgcatcaacttgatattaaaattatttttcttcatggagatcttgaggaagaagtgtatatggagcaatctcttgggtttgttaaaaagtaagtcagattattatgtattttataaaagatcaattgctagtatcattttgttagttgagtatgtggatgacatcattattactaaaaatgatactagaggcatctcatcccttaaatctttcattcatactcggtttcatacgaaggatttaggggatgctcaagtatttcttgggagttgaagtcactcagagtaaacaaggtatttttctatctcaaaggaaatatgtacttgatttgttaagtgagacaggaaaattgagaatcaaaccttgcagtacttcaatgaataaaagattgacacaagaatcatggacacacctagattgagtttttctatattgcagatcgggtaggttcctaggtggatagaagttccacttcaggttattgtgtatttgttgggggcaattttatctcttggaagagtaagaagcaaaatgttttatctagattcagtgcaaaatcagaatatagagctatgacgcagtctgtgtgtgagatagtgtggatttatcagcttttgactgaagtccggtttaagacttcaattccagcaaaattgttgtgtgataatcaagttatttttcaaattgcctcaaatctcgtattccatgagcgaactaagcacattgagattcattgttattttattcgcgagaaaattcaacaagaatttccttaggatatgtgaagactagagaacacttaggaggtattttaactaaggctttgaatagggtgctggttgaagctgtgcataattaatatttatgttccagcttgagggaagtgttaaaatatatattagatgtatattaatggtagaattataattacttagtttccaattcttcctagtttcctatttagtcttcctagttttgtatataaatacttgttattctattgaataaaatactctttttgattcactatttacaactaggggtgcacatttagacccgcaaacccgaaaaacccgactacccgacccgacccgccgccaaaaaaaccgatcacccaaaaactcgtgtggtcggtcgggttcaacccgaaaaagactccaacaaatttcaggttcggatttaatcatttgatttttttctggtcgggttaaaacccgtaacctgaaattataaatttttattaattaaaaaattaatacttaattaatatacttaattactaatttaataattaatgtcatttcaaaaagaagcctactcgactattcatatccttcaatatttgacagaagctaagcctattacaactaatctattattgtataaatgtggcgtgcacccctacaatttattattagtatttttttaattaaataaacaataaatatttatagttagcagtaagtaatgcctttccacattccattcttcttcgaaattcaaaatcctacaaagtcaaatttcataactcctgcatatgcactacgattctggacccacgactaattttatattgggataatta

SEQ ID NO: 87216 - DNA, 845 bp, Cannabis sativa
taaattttattttattctattcttattctcattttcattcctatttttatatttttattcctcccaactaaatgccaccttaaaattttttgaatttattaaatattttgccggagggatgttcgaacccatataacctcatgctacaagaaagcaagcattaccactaagccacttaattagtggtcagctagacaaaatttagttgttgatattgggatgacaatttgagttatttttatggggtttttataatgcatattgaaatttttaattgttttacttttcactgtgatgtggattttttttaaaaaaaaaatattaagtaaattttatacttaagtttttactgtttgttctacagttgttcttttaattgttatgtattgttgttttatagttgtttcataaaagtacagtatttttgtaaaaaaaaatccttgtggcagtaaaattataagtttttgaccaaaatttaatatttttgtaaaaatccatattttcatgacactggttttatcgtgtttctgacccgacccgcaacacgtaatttaggatcagatcagaccgacctggttttctatatttttatatataaaaagtggctatctaacattatttgttggtttaacggtgttttattttttatctttatctttatatataaaaagtggctatgtagcgtcatttgttggtttaagaatgtttcattttttattccgttaaattaaacagaaactttactcttcctttaacttaaaaaaaataaattaaacccatataaattaatgcaatatttgttcaaaaaaatctttcaatctcaatatattaaaccctaaaatata

SEQ ID NO: 87217 - DNA, 870 bp, Cannabis sativa
cttgtgtcaagttatttatttttctgtaaatattttatattctgtctgttttgttttgtcactgcaaaatgggtttttgcagtagcagaattactttcggcttctgcagacgcatacaaaattatattttcttatatataattgacatttgcaaaaatacggtttttgaaaaatattatcctgatattggtctatatgaccgtgtgcgaccatgtgtgactatgtgcgaccatagtatattttaaagtatatcctaatattggtctgtgtgaccctgtgagactacgtgcgaccatattatatttcaaattatattctaatattagtctatgtgaccctgtgcgaccatatgggactatgtgcaactaactatattatattttaatataatcatttaaatacattatatacaaatctatcaccaaaaaaatgtacataagatggtgaatcctacaaccatgaagttacaaagcatattattcataaataaaatatagatgacaatgacaataactatattaaagttattgcaaattacttgttggttatattctgtagtcttttctcctccagcaacagaaagttgtttagctacaggttaaaaaatgtgagccaaatcatccaattttgataatagtgtctcatgcctcactctatccaagtaagcatggtaagagatggttgtcattattctttctagttacacgtttaatctcctcataccttgacttgtgcaacttttcttagtcggctatcaaacacttctctgaccccaacaactcattttgagcatcataagaagagggaggctgtgaggagggatgtaagtgcaactgttgagcaatgtaagtgaattagggagggtccaca

SEQ ID NO: 87218 - DNA, 795 bp, Cannabis sativa
ttttaaaaactaatagaggtatttagccaaattttataaaaactgagttttaaaaaactaaaacacagaaatatcataatgttattttttattttcaaaatatttttttgtacatattcttttttacattattgctcacatacccggaccatgctcggactcggaccacagaccttgacctcgaacccggatccagacttaaacccaaatcgtagacccgaacttggacccaaccctagcttaaaatctcaaacctagacctagacccagacctggaccctaaccaagacttagacccggagtcagatcctggaccccagacccagatctagaccacgaccccgactcgaaccctggacccagacccaaacccagaccccagaccccgaacctagacccagaccccagaccccgaacctagacccagaccccaggccccgaccttgactccgaccccgaccccgacccgcggctaaggtcgggggctgggtcgaggttttagcccgaggccaagtccgagttcaagcccagggtccgaggtccaggccccgagtccagggtccgaagtctaaggtccgggtccaggtctagggtctgggtctgagttcaagatcgggtctaggttctggttctaagtctgtgtctgggtctaggtatagcgtctagggtccaggtaagggtccaggtccaggtccaggtccaggtctaaggtcaggttctgagtctaagtctaaggtcggggttcggcttcaggtctaggtatgtggttcagttcgaggtgatgtgtcatatcct

SEQ ID NO: 87219 - DNA, 1059 bp, Cannabis sativa
tggtattatatggtgaggtatctatatatatttctcagttttttgtttgttcctttatttagatttcttaatcttaggtggtttttttttttgtatatataaattttcaattttaatcttttcttctctataaaattttaacactatctcttattaatcttgcttctatggatatgatattgcaatgtttaatttttttattttaacttttgatcttttcatctctactagcacttcattatattatttatttatattattatgtatcgagtaaacttattaggaataacaatggcaatgactacaggtgggatacggtgatggcaataggtgagatattgacaacaactttgaataattgagatataaattattgattgaaagaaagaggtttacttaaataataataatactctaatttttctctatactattttatttattttgttttatattaataaattttaatagttaaattgaaaattttatatatattatttatataaattttaaactttctaataaataaaataatttttttcaagttttattttaaataaataattcaataatataattttaatactattaaatattagattaatttttaagttattatttattattttcataagtaattttttataattattatactaaaataaaattaaaatagctgcgcgaagagcggctatattgcctagtctatatatactagatgaaagttacgtggcgagccacgtaaatattagttttatttaagttctagtggtttttgtttaagaattcggtaactaattgtaaattattttataaacaatgctcctccactgggttagttgagagatgactgaggaagaggaacgacaaaattgtaaacatcattgggttatacagcattaaaatgcttatatagcatttggttcaaatatcttttaataatctaactgcgccaaacaatacaacagtgcttgtaataaacttgccttttgaccttcagatacgccatagccttgtttgccaacaaaatccttgtttccttattgctctcctggtttt

SEQ ID NO: 87220 - DNA, 1067 bp, Cannabis sativa
attaggtctagaatagaagaaggacaaaatctatggtaaaagcacttcttcgcgttttgcaagcattttaatttaaatttggaagtagtcttcacggtgtttgggtccacacaattgccttgaactaaaaagcattgattgaaaaatgctgagttccaaaaaaaaaaaaaaaaaaataaatgctgagcttttatttatttatttatttcttttttgttggagataagaaaaatgctgagttttgattgaaatataatttactttttctttcaattagaagatgttagatagaataaattttattggagagaaaaagtgtctgatatttattttggctaattataatttttatttttaaaatttttacatgtaataaattatgttcttgaatttttttagttgttattatttaatttttctttaaactatagagattgttagatttaaggatatttgtctaattttattaaattttattaattcactttaatgtataccaaattatattccttgaactttgacatgtactaaatcatgtttcatcaactttcatccatattaaacttaccaaattaaaattggacaaaagtccttaatctaacaatctcaatgattcaaggagaatttttaacagttcaggcgtatgatttgatacatgtcaaagtttgaaaagcaaaaatcctaattagcctttacttttcgattctccatagatatattttaaaaacatttatgatttaaatgtataatttttttagccataatttttaagaattatttcataaatattaaaaaaaaaacaaaaatattacaaaaatacatgtatattttttttttcatatttttacgaatttggatatttttttacaaacataaagacatttttcatttcattaattgtttaaataacaacactataccatgttgttttcatgttgcttttatatttgtagtatgttattttaagaggttgttctgtaaaaatataattaaaaaaagggcattttacataaatgtgtacatttttttaaataattacaaaaaatgtgcaaaaaaatacaatttta

SEQ ID NO: 87221 - DNA, 909 bp, Cannabis sativa
agatcataatcttatgtgctatctccaacaatcacttcaggttaatgttttcactcatctttgatcatctttttcttctttaatttagcaaaagttctatagaatatgatttaatgttttctatattaaagtactctttgaaatatgattagatttgtgattatttgcatttcttgaatgttttataaatcctaacatgaatattatgtacaatcaaattctgaaagaaccgacatagctaaaggattaaatccagcacctcttctttctccagcattcttagaaaagataaggattatgcgatgtaatgatgcaacagttgacgatgataatgatgacgaaaaaccttttttggtttaccaaaaaaatttatttgcagcgaatattagttcgcatctcaatcatcttttcatactgttgaaatagattaattctactaatttcttaaacctcaaagaaaaagcaattgtaagtaagaaaagcattgatgtacgagttattagacctaatttggagaaaaaaactttgttactgacatgatagaagtgcgtcgccattaattcttacaatttaatacaaaagtgaagttattttgctcaacggaatgaattgaaggtagggcaaatcgttcaaacttgatttttttagggatatcgatagaatttcatattttattattgttaatcttggatttatataattatttgttttatcagacaagagaatgtgtgttttgtttttagtttaatgtttactataattaatatttattttgaacgaatgttcagtgtttactttataaactaaattatattactattattgtttggattctaataataattattttatttttttattcagtaattttttttaacaagtctcgaagttgttttctctctctcttta

SEQ ID NO: 87222 - DNA, 1018 bp, Cannabis sativa
atattagatatttttaatttttttctaatatatatcgtacataaaaaaaaaatatattaatgtagaaaatagaaaaattattctgtatattatacattaattaatactataattaattaatgataatattattcgtaattaattaatccatcaatatttataaattggataaaaaattaaaaactgaaagaattaagaagagaacaaatagggctatgaagagtaattataaagtgacatgtctctgctttatatctctctttatgtatatagaatatatagatgttttttgagaaaagacctgttattataaattaaatgagtcatttacaacaacagaaaatatggcaaaaggaattacttccaactaagtacaatcattatccaacactaaagcctatttagccatgtcatgtgtagcttggttagcatcccgtctaatatgagatacacaaactgaagagagataggatcattattgtgaacatccatcaccaaatcataaaaacaagaatggttagaggtagagccattcagagaattggcgagagacaatgaatctatttctacaaaatcaatcgacaagcaaagatgtttagcctgacaaagactataaaatatggcttttgcttctattttttgagatttgaaattgcctataacttgttttgcaagagaaaccagaacttgtccatgtgaatcccttataatagcacccaatcctattttattcctcgaagaatcaacaactgcatcgacatttaattttaatttgttctctagaggaggtaaccaagggtgatgttcagcaggaccagttctatttatagtagcaggaattgcaacacttgaatactgctgaaagttttttatgtatgttgtagctttagagaaaacctgaaatggactttgtagcaacttaccatgcaccaaattatttctatctgaccaaatatgccacattatacaaattatcttttccatattagcagtcaaatagattttaaaaaggtgaatt

SEQ ID NO: 87223 - DNA, 955 bp, Cannabis sativa
  modified_base (703)..(709): a, c, t, g, unknown or other
  modified_base (888)..(889): a, c, t, g, unknown or other
gaaacacttgaacccaaaagggtgtgatggtgtaggattccatagaggcattctgaagaacacttggaaggcataagatcatatgttgattatggaagtgccatggttccttagaaagaactctcctaagatcacccttacaaccaaaagtgaccaagtaagaatcagattcatagatagacagtgaaacatcaaacctacctttccattgagaggcaatgaaattgtgaaattgcttaggattatatccttttttagagtaaactcggcaaagcaggcgattgataggggtacaaacagggggtctagccacactagagagatgaacaacttctctttcccgagatgagagtgcattggccatgtcaggatggaaagaatccatggtaaacaagaaggaatagcaatctgagatagtaaaataaaaggaaacaagtgcagaaaaacagggtagaaagagtgtatgaagaagataacgaagaaaaaactgatcagaaaccgcttaaaaacagttaaaaagaaaaaactataacaactgccacagagcaaaagagagggcagacaatgctctcatatggattttattctattatttggttggaatgtgtcattttggtggaaagactatatattgtaaaatagaaggaaatatcattttaatacataatgagaaaagaattaattatttttttatcaatttttnnnnnnnttttaaattttattttattttattcttattcttattctcattcctcccaaccaaacatcaccttatatatatatgactaatacaatagatattgtatttgtagtttatatctattgataggtatagtaatttatagtcattaatttaaggctacttagtaattttttctcccgaacttnnacatgtactaaatcgtgccccctggacttttttagccgttagaaattcccccccgaactattgaga

SEQ ID NO: 87224 - DNA, 669 bp, Cannabis sativa
gattgacacaagatggtgcttggtgggcaaacttctaactggtcgcgtttcggattttaatgtttttcaaaacatgatggcttttctatggcaaccgggaatgggaatgtatgtcaaggaactcaatcctaatctatttctttttcaattctatcatgaagttgatatacaaagagtcatcgatggaagcccgtggacttacgataggaaaccttttatttttacaagattaaaggaaggcgagaaccctcggtttgtggagattaaccatgtcgatatgtggatccaactccataatctaaaatccgggaatatgacactcagtgttgttacggccttaggaaattttattggatcgtttgtggaatcggatccgaataattttgtgggtgtttggagggactatttacgtgttcgggttcgattagatgttagaaaaccaatcaagcgtcgtatgaagatcatcaacgaggattcttcgtggtactgggtgaactttaaatacgagaggttgcctaccttctgcttcatatgcggcatcataggccattcggaaaagttctgcccgaggttgtttctgaagccgctacaccttcatgagaagccttacagcttggaattgaaggcaacaactcaacgacgtcaatctacatttggggcgcagtggct

SEQ ID NO: 87225 - DNA, 658 bp, Cannabis sativa
tcctttggaaggacctatttcccagttttgatgaagctagattcaatacaaaagtcaaatctttgatcagacacttggaaggtgcctagatagatagattgtcaacctcaagttgattcgaattttattctaatgcctcaaatatgtatgtggtatgtctagttgatgtcccaatgtaatttttagccacttgtcactaggacagtcccgaaaactaaaactctagttgaggatgtcaaactgggcgctgattggaaaccctaggtgcccatgttggctttcgggtttcaggtttgtgtaattttagctcttggaccttgtattaggttgcttcacgtcatcatggtaaaaaatactaaaagatagtgggttggattcaagttattgaagtcctaacttcgatcttggagatcctagagtcaatctgggcgtagggctagggtcccctcccaagtcgaatgctatgactcgggtctactaaacttaatgatgtcatccttcatgctacgagtcaaacattgatgtccacatcaccaggttaagtttctaggttaacaaatagtgatatgggtgcgatacacgacttgatcagtttttgaaatagcttctaaatgcaagttgaatcatgtcaattaaatcaatattgagggaagtatgg

SEQ ID NO: 87226 - DNA, 813 bp, Cannabis sativa
tatcacccacatattatgaataccttttttccttcgtgattcaaaaacctgcatgtctcgtcctatgacggaactacagatccgatctcgcatttgaataactttagcacgataattcaagcgagtaacgcgacgaacaatttacgttgtattttgttccccacctcacttgttggagcaacgagtagctggtttaacaagttcacttgtcattcaataatttcctcggagcagctgtccagggatttcaagaagcgatttcatgccgctagggataggcgacccgaagcgacctcgctaaccaatataaagcagcagcctgacgaaacccttaaggcaaacttaagtcattttagcacggctctcgctagggttagaaacttggatgacagcacgcaacttacagcccttcaggcagggatctccacggatccattaaccactgggggcgagttgtgtgggatgacctctgcaggacgtcccggtaagaaacatcactgagttcaaagagagagctcaggtgtttatccggaaggaagaagcctgaaaggaaatgagcttgttgaaaacaagctcgggtggtaaacccaacaatgtttcgacagggactttttctacaaatatgtgccagtgaatactatttataccgagcttaatgaaactcgagaaaatatttacctcgcacatgagcagaaggtagcatttggtaaacccgagcctatgagaaattcgaggagcaaaagagatcctaacaaatattgtaaatttcataaagatattgggcatacaaccgacgaatgtcgccagttgaaa

SEQ ID NO: 87227 - DNA, 916 bp, Cannabis sativa
caagttcaaagcaagactagttgcaaaagggttcactcagcaagaaggagtggatttcaatgaaattttttctcctgttgttaagcaaacctcaataagggtcatgatggcaaaggctactagagaagaactgcacattgagcaaatggatgtaagaactgccttcttacatgggagtcttgatgaagaaatatacatgcagctccaaaatagtttcaactcctctagctcagcattttaagctgtctaacacacagtcaccagttacagatgcagagaaagaaagaatgattaaaattccatatgctagttgtgtatggagtttgatgtactcaatggtgtgtacaaggcctgatttagctcatgcaatgagcatgacaagcaggtttgttgctaatctagaaaatgcttattggattgctttgaagtgggtaatgaggtatataaaaggaacactgaacacagggttaacctatgatggcactagcaaattcaaggaattggtaactggctgtgttgactcggattatgcagggtgtttagacactagaaagtcattaacagggtttgttttcactgtccatgggggctgtgtcatttggaaatccaacctacaaaaggttgttgcactatcttctacagaagcagaatatatggctgcaacagaggctattaaagaggcaatttggctcaagggattgacaagtgaacttaacattaattcagaggatgtaacagtgcactgtgataatcaaaatgcattgcatctcatgaaaaatcccatgtttcatgagagaactaaacacactgacatcaagatgcattttattagagatgtgattcaatcaaaaatagtctttgtaaggaagattgacactcatgagaaccctgctgatgctttcacaaagagcttgac

SEQ ID NO: 87228 - DNA, 1067 bp, Cannabis sativa
atctgacaaatggacatcaaaacggcttttctgaatgataaacttgacaaaactatatatatatggaataacccaaagggtataaaaagaaggatcaagggaaaaatccataaatggattaaaaaaggcatcaagatcttagaccataacctttgataaaattataaaaacatgtggatttggaaaaaaaagttgacaaatcatgtgtttataaatacatcaaagagaaagttgcaatttttttagttctatgcattgatgatatcctactcattgggaataatgtaggaacattatcaaatgtaaagaaatggttggctaacaaattctaaatgaaatatttgggagaatcgagttatgttctgggcattaaaatcctaagagataggaaaaataagctcttggaactttcctaagaaaattatattgataaagtacttgaaagattctctatgcaaaattctaagaaaggctagtttctgatcagacatggaatttgccaagatcagtgtcctaattaagacacctcaagagcaagaggacatgagaaagttccctatgcatcaactgtagggagcctaatttatattctgttatgtactagaactgacatatgttatgcaatagtcattgttagttattagtcattctaggtttggaacactggattgtggtgaaacacattctcaagtatattaggagaacgagagactatatgctagtacattcaggtagtgaccttgaatctactaagtacattgattctaatttttaatcagagaaagatagtagaaattctacttctggattagtgttcactcttggtggtggtgcagttgtctcggggagcattaatcaatccaacatagctgattcatctatggaagctaaatacatagcagctaaatacatggcagcttgtgaagcagctaaagaggtgtagtttgattaaaaaagttctacacagatttagaagttgttccgaaaatagataatccacttgttatttactgtgacaacagtggagcagtggctaattcaaaagaaccaagaagccacaagagaag

SEQ ID NO: 87229 - DNA, 633 bp, Cannabis sativa
actgtagcgtgccttagcattagggtgttacataactaatctatccagttataatatatattaggtggtagataacgtgccaaagacacgtaactcctatcaaagttaataccttaattatatttcttatttttatcaattatatttaaataaggacaaataaaatatctaattaaattggcatattagatgtaaaaaaaattaaaattctaatcgaaattactaaagatatgtacatattaataacaaaaatattaagatagcataccgttattggtacattttaatattagctcccacaaattttaattttataaatgatttagaaaaattctaactaattattgggtaccaaatcagtatggtattgagcactttaaggtgtcacatagtaataatagtacaaaaaattatttaccaaaaaatagtataatgatcattcataataattaaatttaaaaaaaaaaggacaaaaaaaatatactaactaattattgggtaccacatcgatataggattaggtacactaagaataccataacaagtacaaaaaattattgtaaaaaagtaaattaaaaaaaatataaaagataaaaaaaaaggctaattaggattttttttcccccgaacttt

SEQ ID NO: 87230 - DNA, 720 bp, Cannabis sativa
ttgatcttctctaattaattataattttattattattattttgagtcatcaaatcaagtctatatatttatccaatatataattgaggcaacatccaattattttaggattctattttttctaatttttattcatttatattttaagtggtgtttaatatacttataaaaaaaattatacacaacaatatagtataaataatgatataatagaatttaaatatgattcaatataagtaattaatttttatagtaattaataatgatatctaataatagttaaataaagaaataagaaaaattaaggtgatggaatatgaattaaaagattatttcatttctattgaagaatagtaaacgattatgatttataatattttacttatttagtaaaaatgttaacaactacttaaaatatgactttctgaaataaaaaatataaaaaaataatcacaaattaaattttttttcaatgattataataattatgcggagcacgatatgattataacgatcacgaaattgtataaccaatttcatacggtacttattattttaattatcgcaaaataataagataaataaacatttcattatggaaataattagccatatggatcataacttctcttttcatcataacaatttaaggtataaatttcacatccatataatttattaaaattaatttcttatataaacattttatataaaaaatatt

SEQ ID NO: 87231 - DNA, 956 bp, Cannabis sativa
ggtatcaatatgcctatcttcattgatatatttccatttaatcctaatgtcataaagtctacacaaacaaaacaaatacattcggacattcctcttactagaattataaccagtcaaatatgaatctttcatgtacttaagaacaaaaacgattggttttcgaacatttcaaagcataagccaccaagcatttattttaatacaaaacagaatgctggggtattgaaaattcgagtctttcctcatttcccaattcgctctgatcagtatagccatgcacactaatagttcaatcaaataattaataaagaccaccctataaaagcctaaatgcagatcagtggaaatttagaaaaccaaaaagcattcaatttaaggggtatgaaatcaaacagtaacttggaaaggtgagatttcacaaatagccaagaagatgtcttgaattgggattactttacctcatctctgagctgtttagcttcctccggagtgacgccgtctgcaagagttctcaaaacgaaaacgttaggatacaaaacgacaaagaggaacaggaacaggaacaggatgactccaaacttgggtttcggagcttccattgctctcttctgagcttgttttttttcctcaaaacagcgttcgctgggtaagcagaccacccggcgccgttttcaacttttatttagtgtggaagtaaaaaagcttggaaaattctaaaattgcattgatgcattcttgtttaatgtataatatagtttttttttaaaagtattttgtaaaattttaagaaattcacataaatttaatacattgaaattatggatcaaatattgtattgtatatgtatctattttattttactagatgagagttacgtggcgaaccacgtaaatattagttttatataagttctagtggtttttgtttaagaattcagtaattaagcaacggcaaca

SEQ ID NO: 87232 - DNA, 1109 bp, Cannabis sativa
tcctttccattccattccatttcattacctccaaccaaacgccagtgtaaaaggtgtgtacaacaacaaatttcctaaaaatgactcctctctaattaacgactcttttcttgaaacgcaataatatttgtgacaaacggtatatttacaagaacactcttaaaattgtatggcgttacaaacacgactatgaagacacgcttttcatcctttggactcgtcatttaagtggcggttacaaatatgttataaaaccaaaatttattaattttctttcctttttgaaaaaaaaaataataataataatatttccttactcttaccataacatgtgtctttcttcccggtttttgattcaaagagagtgaaaaaactcgtttttggtaaaatgatgatgaaaattaagtcctcacacatgaaacatcatgccatacaataacaattttataacgtaataaaaaaaccccaaaaacgccaatttccatttcctatataaacaccctcaaacaaacactattccataaaaaaaaaatcaaatatcataatttatatttatttttatggctagattgagttcaaatttgatgattttggcgatttgggcggtgacaacaatgttgtttatgagcaaagcgaccgaggggtgtcaaggagaccttcaaggactaataacacattgtgcaatttacgtgcagaaagggacgccgatgataaaaccatcagcgccatgttgcgatgcagtgaggacggtggacattccttgtgcttgtcaacacataacaaaggaaatcgaaggattagtggacatgaacaaggtctttaatcttgcttcttcttgtggtagacctcttcctcatggaaccaagtgtggaagtaagtactaagtaactagttactaaaattatgtattctcgataaaattatatttttgttggttattgtcattgagataaaagattagttgattttgatgaatttgcgttgattatgtgcaggttcaacagttccatgaagtttggtgaagaaattatatatattaataataaataatagaaaaataaaagctctttatgatttcagaaaaaagaaaaacaaagagctctttatat

SEQ ID NO: 87233 - DNA, 1308 bp, Cannabis sativa
tgcgtgcacttgcgtagtatttaataattttcgtaacaaatacaatagtgacgactacaagtgaactacggtaatgacaagggatgcgacatagtgatgacaagggtgagatacggttatgaaaataagtgagatataatgagacaacaagtgaaatacaataataacaatagttttgaatgatcgagatatgaaaataatgcattatgggaaacacagtaatttttttctataccatcttattcatttgcttttataaaaataatttctttaacaaaataatttaaaatactacatataataaattttaaatttattaataaataattctaaataataattaataaaattgcgcatttagtttttactaaataaattatttataataatatgaaataagataatatatttataattttactatatattagaattatatttttatgtaactatttattatactaaaaaaattaaattagccgcgcaaaaattagctatattaccttttatatatatagaaaaaaatttagggttcctatttttagtctttttttttccaccaattcttctcttctcttctttgttctctcttcttcactttctccaccataaacaaccaccatctcaaacttctccaccaaaacaatggagagatgtcctctcgaacaccacagagcggacgaatcgagcggagcaataccagtcgcaaggttagattttttatttattattattattattattattatgtttatttatatattttttttgacaaaatatttctttatatattaagtgtatatattatcactattataaaattggtttttagaggcagtttttaagggctttcagcatcagttttaataaaattcgttaccgacgctgttttaggcgacgctgtaagggtaaaaaataacctgcgacataaggaccctatggagacacttattattaaatatccgacgtcatagggtccctatggcgtcggttattgtagttattatacaataactgacaccataagaccatatggagtcagttattatgaaataaccgacgccataagatcttcctataatattttttttcaattttatacttttgtggtttagtatattttttttcatatatatatattattttattattaatataattaaattatgtataaattttttataataagcataaataaaaagtaaattgaaaagttagataaatacacatttatattactctaagtgtttgtgttatcccaaatttagcactgtgacgtgacatcacgagaatggtgacacgtggact

SEQ ID NO: 87234 - DNA, 3788 bp, Cannabis sativa
ttatcctaattaattatataaatataataaaactcccgtggagtaaaattattatacctatataattaattacaagttatatccattaaggtaaatttttaattaatatataattatatataattaattacaagttatgtccattaaagatgttgtggctactctctaattatataaaattatattttcacaaagacattagatattgaactctacctaaaaacaatttcgttattaacataatagacaatcagtgagattagtgttcctagtgtggtcgtccgaagatcattaaaaattgttctagatatgaacatttgtcccaatttcatactttctaatgccaaactacaaaattgcttacattttattcatattttattcattttatgaatgttttatgaataattttatgaaacttaatgtgataaataaaatattcacctatcttaatgtttgattattttttaaatgtatctagcactattatgaaattaatatatgacatttaagtcatataaatcttaattaattgcactaataataaatttttaaaaataaatacaaaatagcataattattaaatgcatattccataatatgatacttaatgacagaattaattaaaaaattcatgctaaataagacaataaatctttatggaattaatctagcatttaacttatataaaatcttaattttttttgaaaataagcgtattcatgcattaatcaaggaaactgttagacctctatgtcattacaaagtagttcctcgggtaaggaggagatcaaaatagacacgtacaactggtgggtgaaagcccacttagccacattatgggcaacaaaattataagttctgctaacattagaaaaattacaactaataataaaagagggagatgacttaatacaaaaggagacatagttatcaagggcccaatggaacaccttcctattgagcgcattgataactagtctcgagtcactctccacaataacatacttgtaccctaactccaaagccaatgagacagccaaacagcaggccgcagcttctccgccataacgcatatgagaaatccaatcgagacgtgtgaatccaaatcaccttacccagatgattccttgctacaacagctgtgcacatactctctaatcccactctaacatcacaatttatttttatccaatcctggggaggtggagtccaagtctcccgtacgatcggtgtaggattgggcaaaagagaagcatgtaactctggaaaagaagtgcaaatattataaatacatttcaacacctcgggatgagtattattgtgaaccttttcattgcgcatcctccatatagtgtcaacaacaattgaagcataaagaaagacttcctcaattcggatccccctatttctaagatcccagatgaatttcacccagtcccaaacacgaataccagtatcacaaacagggtagattccccaaggtgaagatcgccacaaatgcagtgccacctcacaagtaagaaataaatgttcaatagattcatccctcaacccacacaaaggacaacttgtatcctcaatttgaaaacgtcttctaatctcggatctaatagggagcacattagataggatacaccaccaaaggaccttatgccgctctaaaattttgatattccgaagcttattccaaagcgacggggcaacctcacagtgagggctctttccaaagcctgtgtcaagtaagttgatttgcacgagaactgcctgttgctttccaaggtccaaatccatctatcagtaccctgacccgatggattgctaccttttaagattgcagaaatagtctcttgatcaaaaagaccgtttagcttctgaacatcccaacctccactagataacaagagatcggccaccctagtgagatccgataaaacaacatcatttggtttcggaacgaaacctttacaatgaggaatccagggatccctccaaatactagtatccctaccattagcgaccactttacaggccccttttctcagaattgcattggttttcacaatatttttccaaaaccaagaatcagaatctctgtaactacagttgagaaaatcctttcctttaagatacttggcctccaagatcttgcaacacaaagactgacacccattcaaaattttccacccccacttggccaaaaaagcaaggttcatctctttagttttccgaaacctaaaccccccaagaacttagggagacaaagtttatcccatgctcttaggtgaaggccatggttccctttctcaaaaccccaccaaaaatctcagaccaaaccgtctatcctattaacaaggcagttagagagtttagtggtctgcatggcatagataggcagagacaaacccacagacataataagtgtagcccggcccgccttggataaagtttttaccttccatccctgtaatttggaagtaagattgtccaggatgaagttgaagtcagcatccttttgtctatatttgaaaagggggaggccaggaacttaataacaccatccgaagaattaataccctaaatatccttgatacctcttctcatggaattcgtggtatttttgctgaagaagatagaggttttgagcttattaactttttggccggaccaatcgaaaaatttctcaaggaaattccagtaacttttaacttttctcaaattggcccgtcccaccaaaataagatcgtctacaaagaaaatatgggataggaccggcccacccctacttatcctaatgccttgtatattcccctttccaagggcctcctctaagactcttgataaaacttcaggatcacatatgaagagataggggaaagagggtcgccatgtcgaataccacagttgggcacaatcttaccaacctgacccccattaaggcatattttgagagtggtggtggatatacactgagaaatccaatggcgaaacttctgtgggaatccaaaatagtcaaggacacgatcaatgaatttccaactcaatctatcataggctttgacgagatctattttaattgtaaagtatccctccttgcctttttttcggttgaaagagtggataatctcttgcacaatcacattattatcttgaatattcctgcccgggacgaaagcagcctgagttggagttgggcagatgagagagggaaggataggtttaattctatttgcaactattttggaaatgactttgtacatcacattgtaaagagaaatgagcctgaaattattaggtcttttcgggtttaagcttttagggatgagcactacgttcctagtatttatacccttgtgcatattgccttgaacaaaacaatcagaaactgcatcacaaaaatcatctccaacagactcccaacagtgcttaaaaaagagcactgacatcccattcggccccggagccttatggttcctcatggcaaaaagagtagatcttatttcatcatgagaggggcataaaatgatcccctcgtggtcctcctgagagatcctcttatggaataactgagtccaatcaattacctgtccgcaatcagatcctgagaagatactcttgaagaagtctaagaattcaaggccaattaattctctatcattaatccaaacgttatctttgctcaaaatactttcaatggcatttctccttcctctgattgcaggcgagaggaaaaaaaatttagagcatttatcgccatccttcagccaagtgttgttgggttttatgcc

SEQ ID NO: 87235 - DNA, 1611 bp, Cannabis sativa
  modified_base (82)..(92): a, c, t, g, unknown or other
atttaaactcttatgcggatcggattggatccaaaatatgaaatccgcacttagtgcgaattggatgttgtttgaccaaaannnnnnnnnnnggatcggatgaacacccctaggtggctccaccactgcacatgtatcatataaatatttatatatatgtatagccaagatatactgtcattgtcaccctccaaaaaaaaaaaaaaggttgcccaatttgactaagtatgtgagaagtaatagatctgcttagcttaatgctctgcttgtttttgagccattctcttactaccgactgtgttaaacaagattgttttattcataattattttattatatatcagcaatagtatcactcaaatatataaattggatcaacttagactattggagtccatggtttatgattattataaggttcaaattggtaaaagccaagatgcccttcatctaaattattggttatgattcgtacacactatattgattaattctttgtttttcttcttcagatatacatataaccccaaatgaatgtatagtttttccaatcctcaaacacacacacacacaaaaaaaggtaaaaaattatggcccatttcctgaaatattctcatccctttggtaagacaaatctgctaccacaaaaacagtacttgagttcaacctttcgatttctttcacttgcacttaccataacactactctgcctattatcacctcaattgttcagtttcttctcttcatcatcatcatcacttccatggctcaaatctcacatgttcagctttagtagttttcgaaacaagtgcagcatttttagaggaaattgggtttataatcctgacaagaggcctttctacactaacttcacttgccctgagatctatgatcagcagaattgtatgaagtttggaagaccagattctgagttcttgaaatggagttggaaaccagcaggttctacttgtgatgatcttcctagttttgatgctgctcagttcttggagcttgttaaaggcaagtcaattgcctttgtaggagactctgtggccagaaatcaaatgcagtcattgttgtgcctcttagccacagtaagtactattacatatactgtttgtttaactttatatcattattatgagtaatatatatatttatcatcacacacatgtggctgtttgttgtatccataattggagtagtatcaaatcaaatagctgtaaaccatcactttgaaccccaattagtttttcttgcttttgtaaattgtactaactaaactatactactttacactattgccacatacacagttgtgatgatgttacaagataagatatattggagttagtgccactaccccttatatttatttgcatatacatatatatatgagaaatatgtgttctataaccccactttggttgaggacaaaacaaaccacattttggctaatcatagtcacattcacatacatataaaagcagtaaaatgtggtccactcgaaaaggacacgcatggtgatcatgaagctatcttataataatgcttaaactatatatatatatagaatccaattagtttcaccttttttctttttactatgaa

SEQ ID NO: 87236 - DNA, 755 bp, Cannabis sativa
ccgaagctccacgtcacttctctctcttgatctgccccaaccattaatgtttgccctaatttaatttttatttttctttgatttagaaaacagtggcgatggtggtaatggtggttttgtggtggtgatggtaatagtggttttgtggtggtgatgatgataagggatgaataacacagaaaaaaaaaaaaagaagggaaaatgagataggggaggcagtcgggatggataagaagatgtagggttttttttttgttctctccagaagaagaaaaaaggaaaaagaaaaaagaaacataaaataaaataaaataatttttatataattattttttttatatttaaattttttaattattttaaattattttttaataataaatattgtgtagaccactaaaaatttgtcaagcgtacacgtaggcatgccactgtggcacttaactgaggttttttaacagaagtgtaaagagtaaaacgaaataggggttcagtaggttttgccgtaaaaattttaatttttttggtaagtgttaaaaaatttaaaatttaagtagtttagccaccaatatctctatataaatattaagattataactagaatagatactattttgaagtgtgtgtataatttagactttgtattttttaaaatagtacaaaatagacattgaactcaattttttgtcaattttttttaatgtaaccaacctaaaactagtttctactataaataaatacaaaaaaatataatc

SEQ ID NO: 87237 - DNA, 676 bp, Cannabis sativa
ctcgtcaagttcatgcaaaccctgagatcgtgcaacattactcaatcatgtgtgatcacgtcttggggtatccatgaactagcagtcgtggtattttcattactatattttagcattggagccaagagagctctcactttttttcaatcaaaaaatataatagaaacaataacaacaaccggatgaattatataataataaaaagagaaggaaaattgagagctcccttcaccccaaaccaacaaagtaaagaaaacctcgtctccaagttcatgcaaaccctgagaccgtgcagcattactcaatcatatttgtgcacgccttggggtatccatgaaccagcagtcgtggtcttttcattactatcttttggtgttggagccaagagagctctcactttttttaatcataaaatataataacaacaacaataatcataataagaaaaagatgaggaaaattgagagctcccttcaccccaaactaaaaagaaaaagaaaatctcgtctccaagtgcatgcaaaccctgagaccgtgcaacattgctcaatcgtgtgtgtgcacgccttgaggtatccatgaactagcagtcgtgatttttcattactatcttttggtgttggagccaagagagctctcaactttttttaataaaaaataataataaaaacaacaa

SEQ ID NO: 87238 - DNA, 1420 bp, Cannabis sativa
atatatatttgttggaaagaatatgaaaaacttaatcaaagtctactaatgaaatgtgggagctgatattatggactacatatctgaattaatgggacttcatgtaaattcaactttcatcgactatttgaagtgtttttttccaagtcgatgcatcaaatagtagggggagactcgaacaccacacattattgcattgaattcttctacacacgtcttggacgttatagattaatcttacaaaatatcatgagaagtgaatgtataccaaacacgtaatttaaaagtgctatattattactactataatttaatattgaaagcttagaaagcctttgaaaaaaaaaaaaacagagtaggaaaacagagaaatgaaaacctcagaaccaagaaaatgcagcttggtttagactgaggaggcaagactttatttataccccaaatgttttacaaagcaaagaattctgttaaaacagaatcagttacaaaagtttaacagaaaacagatagactaactaattaaccaataacaaacacgtgtgattattggttatcatcccccctcaaacgaaaaggagtacaagtgagtttgagtttgcctttaagatagtgaaacctgtccttaggtaaggatttagtaaggatgtctgcaacttgatcaacacttggaacatgtcgaactgaaacttctttcctcagtatttgctcacgaacaaagtgtaaatcaatctctatatgttttttgcagcgagcatgaaaaaaaatgatggggttagctgcaagggcagcaacaccttgattatcaacccagataatgggaatgtcaggtgatgtaatctgcaactcagacagcaacgagccaagccattttatttctgctgcagcattggccagcgctcggaactcagattcagtcgagcaacaacttgttgctttttggcggaccaagagatcaaatttggtccaagaaaggctgcataaccacctgtagagcgtctgtcatcgatggaacttgcccaatcggcatcggaataaacttggagagagagccgagatgcaggttgaagaaataacccctcatgaatcgtgcctttcaagtatctaagcaaacgcttacatgcttcccagtgcacactcgtgggagcatgaataaattgtgacaacttgtttatgataaacgctacatccggcctggtaagagtcaggtattgtaaagcacctaaagtgcttctgtataaggtgtgatcgtcaaaagctgtaccttcatacagagaaagcttatgagcagtgcttgtaggattggcacatggtttagctccatcaagatgcaactttacaagcagatttgaaatatatttgctttgagacaaataaattcctctgttgttcgaaatacttcaacaccaagaaaataatgaat

SEQ ID NO: 87239 - DNA, 1428 bp, Cannabis sativa
taatatgatttttgttttagaaaaatatgaataagttcataccatatttaaattttacatgggtataaatatatagtcatattttatacattgacaaactcaaattttaaattgagggagaatataatttttttataagcgagggggcatactttttttttcgacatatgatatagcatattaaaaatgaagttttttcaatattatacttaaaattaattttatttataaaaatacttttaaaaaaaattatttgcacacatatcaatgtgccacttcagcacacatattgaaattcaaaaacttaccgaaaatagaaaaagttggaaaatctcgtttctaagaatttttgttttttgggagttttaaaaaaagaaaccatttagttacttttaatgtgaataaaatatcaattaattacttttccattaaaaaaattatttcagaattttacacataaaaaaataataaaataactattttaatatgtgaggaacatatctaaaaaagtacgactaatattaaaagtaacttttgtttttttacacatttttatgctgtatcatgttattttattgtttaagataccttgacgttaccttttttttaatgtaactcatatgatgtttagatactattcaatttatttataaattataaacctattaaaatagttttatttttatttaatcttataatgtgtaaatatataaataaaaaaaaaattagtaacttattaacttgtttgataaattaaaatttatttaattttaaatattatttatttattaacaaaatatataaaaaaaaaaccttaaatatttaattaaaaaaaaaagaagaaaaaagagaatgtttgacaaatttatcattattattaaaaaaataactttgctgtatatatcataagacacataaagataaaaaaaaaaatgtgtaggcgctgaagtttagaagagagccactaaagtatattggtatatgtgttagcctattcaataaaactaccaatttttcaaaacaacttatcagtattaaaatagacgataatgtatctgtaaataatttaattgtaatgtgtgctggtgtaaatattaaactgatcaccttaaagagtatatcaataatataatttttgaaaccaaacaattaataatgtagctaaaaaagtatgaaagaaaaatatatttttaatatataaatttagtattgtatatgtaaaaaaaccaaagtcagaagaattaaattggagcacatggaatgaaaattcaataaataaaataaaaaataaaaaggcttctcactaagcttaccacatgtatgctccgtggagtgatgggaattcgattacttcagaagacttatcccaaatctatttagaatagaccggtatttaaaatagcgaacaaatccgtaaataccttaata

SEQ ID NO: 87240 - DNA, 514 bp, Cannabis sativa
aagcactattggaattcggttggttctaatttttgtgaggcggtggaagattttttcatatctggctacatgcacagagtagttaatgctactaatatcatcctcatttcgaaagttgctaacccaaagaatgtccctcagtttaggcctatttctctttgtaatgtggtttacaaggtcatttctaagatcattgcaaatagaattcgttcggtgcttcctagattaatttgccttacacaggcagcttttgttcctgttcgaagtatcaatgacaataatgtcttagtccaagagattattcactcgtttaaacataaaaagggtaaggaaggacacttcgccatcaaaattgatctggtgaaggcttatgataaattgagttggagttttatcgatcacgtgctcagcagcgtcaaggcccccgacctttatcagaaatgggttagccaatgtattactactacaacctttaacattcaccttaatgggggaaaggttagcagtcttgtcc

SEQ ID NO: 87241 - DNA, 560 bp, Cannabis sativa
agcaacaataacatttaaaattgactcccattcggtttgataatcatactacttctctccttatgaaatgtgttacttcagctaaatatcagattgctcatgctggttgtctgtttggttctattatccctgagagaggcttacgacaaggtgatccactgtcatcctatctattcattatttgtacagaaggtttctcagctttattaaaacactatgagcaaagtcagcaggtacaaggtattcaaattgctcgaagggctccaattgtatctcacatgttcttcgcagatgatagctacattttctgcagagccaatgagagagaagcttccaatgtcctatcccttctgaatgtgtttgagcaagcttctggccagaagataaatcaggacaagtcatctatcttttttagtagaaatactgatgtccaaactagagatgccatctgtggtgatatgggaatccatgaggctgatgaaaatggtacttacctaggtcttccaaacataataggcaaaaagaagtcagttattctgggatttttgaaggaaaaggtg

SEQ ID NO: 87242 - DNA, 733 bp, Cannabis sativa
gtcaatactaaatatagtattgtaagaaagtaacatatacaaactaatataataaatgtcatataaaccataggaaataaatcactaatcactgataaaagctataacttttttggtattagacaccttaatacatagagcattattattgggcacctgtagtcctagtaccttctagacgtgtcttcttgtgattggtcaataatactccataaaaattattatattaacattatatttgttaggaagaatgaagagttaatgaaggatgtagaattggaaggagagagaggagagtagcaattagttgtttggtagaaatgatggagtgatagaaaaataaagagtatttatttataaaattattatattatctttatgtgtaattttttaataattattaaaagagtatatatttgtaattttcaataaatgaagagggagtgtgaatccttctataaattggggattgcaaaggattactcaccatccaattagtccttccctcctccaatctctcttgccaaacaagtgaatttattatctccttctacttctcttcctcctctcctttccatctctcctttttattcacccacttctatctcctctaccaaacgtaatatacattatatgagactcgatacttaacaatataataccgatgagacccgatacttaacaatataataccgatgaaaatactaaatactattaataccttttaacattt

SEQ ID NO: 87243 - DNA, 597 bp, Cannabis sativa
attcattggcaaagtcttccttaaagagaggaattatatgggacttgtgggcaatccaagacaaaaggggaatttggttatatatcttcatcttcatctccatattaaatatttgggcttaagctccaacaagattataaacttggatatgagctacaagaagaagattatatgaagaaaagaaaaaaagaagagagaaatttaattttatttatctctttaactagattatgttattaatgcttttggtttttttttttttttgtgctaatttgaagtcttgcaaaacagatataaaatccaaacaaagggagacaaagctatattgactatattttaataagtatgtttatttaattaattagttcttaaaattagaaaaaataaataaaaattctcatttttttttctatttctccactattccatgattcaaaattcttatgataaggcatgttttgtttgcttattaaaaagaaaccaataattttatgataaagcttgttcaaaaagaaatgatgatgattttatgataaagccatagaccttttctatagaaaaagtaaaaagcttataagatgacttatattggaaaaa

SEQ ID NO: 87244 - DNA, 621 bp, Cannabis sativa
aacccgtaacccgaaacttttatttttttttttaaaaaaaacaatattaataatacttaattatttattaatcattcagtaatgacattcagaaaaaaaaaaaaaaaagactattcattactaagtctaaaaactattggttagcattcattaattaagttgtattgtatttcgtgtagtgactcacacgactcttcattcatttttttaatcagattaaaaaaaaaagactcttcaatactattgtattgtatttcgtgtgactcacacgacttctcagcccataaactaatgttaaaaataaaaaaaaatagtattttaaaaattaaactttatttcagcccataaattaaacattcgagcttagcccaataggacccgaacccgaccacacccaacccaaaaaacctgacccgaaacccggcgcacccgtacacccaaaaatcgggttcggttgtgcatttccaagacccgaagcccgaaaacccgaacctgaaaccctaaaaactcgaaaacccgacccgtgtgcacccctagcttccagaaccttacaataaaaggattggtttccaggcaaaagatttcagccccatttagtgagaaaggctagattcatttctt

SEQ ID NO: 87245 - DNA, 974 bp, Cannabis sativa
tcaaacacatagcctaccaccctctatggtgtcatatcgctattagtacaattaagtatcagatcctacataataacattttaagaatatcgctaactaatcgtgtaaaacgccagctctaagtggtgcctagcaccacttgtgcccaataatagcaatgctctaaccaaaactctatcatctagctcaaaaatagaaaaagaatagtcctgcttttcattggtaatatgggcagtgcttttacatgaacaaataacaaattaaacatgttgatataaagcactatagaaacatagaagaattaaaagatagcaatagattgaaaacatgcaattatattctcatcagtcatcaacaaaattgtgaaccaaaataattttcagtgaaatctcaaagaaaggaaaatctggcaacttgaaattaagttcgttcttacaaataaaatattacagaggtttgtttaatcttcctcctcaccctcgttctcagcaatattgaaatacctcagttcataaacattgcggtccttgtttgatgagattacccggagccaatcgcgaacattgtgcttcttcaaatacttcttggtcaagtatttcaaatacctgaacaaaaacaacagcatcatcagacatctcaattcataaatgaaccaaatccacacacaaacttaaaatcattttaacacaacaaatccaatggttttcacttcttaaaggtatgtatatccattagaaatgcattactcaaacaatgcatgtaaagggtcctctttgagacaggacaaatctcccaaatgaaccgaagttctattttcgctagacaattacacatttaataacaacaacacatcaactttcaacaatggcagaacaaatgaatgatacctcttggaaaaattactgtcagatgtaacagtaatcttgctcttttcgcgggtaacagtgacagagtcaccgagagcgcctgccttg

SEQ ID NO: 87246 - DNA, 654 bp, Cannabis sativa
aaaggagtacaccgtgccgtatggcattgttctcaccctagtccctgtggacgaagagaggcaaatgctccgcatcgccaaacataactacgccctggacgagttcagccggggacatgctaaggtggaagccttgaagaagatcctgcgggaggagcaacaaaacaccttgcgtgaggacgccttcaggaatccttgggacctgaacatggatcccctgacggactggttcaaccgcttcgtcagtcctactcttgctccctttgcctcagagatgaccagccagtttgtctcccatctgactcaattccctgtcaagagatacgctgattgatcataggttcgtcatgtccgaatttgggggtatggacgaggccgtgaagattctgcgggacttatcagctgagaggagggcattccgggaggaggcccagcagagggaggctcaggcggaggtgaggcaccaggaggagctgaaggctcagggcgaagctgtggccaaggccaagccagagctgcgggaagccaaggaagctatggatgagatggccgccaagttaaaatccatggaggagctggaccaagcagacttgctgtcgacgaccaaccttactgtggaggtgaaggagttaagggactttaaagatcaagcct

SEQ ID NO: 87247 - DNA, 621 bp, Cannabis sativa
tgatgtttgccaacaaaaactattaaataaaacgattttgatgaacatttaattttaagaaatgggggttacgagctactgggcgtgattaaagttgtgacaagtcaagaataccaaatatgtttctattttagtgtttggattggttgtgttttgaagtacttgtttgtttatttttctagttataattatggttttattttcatgcagggtgttgcaatcaacttcgttaaaagcgatgatattaagattttgagagacattgaacagtactatagtactcagattgacgaaatgccgatgaatgttgctgatctaatatgagacatgcttggcaatattgtgtgcgtgtgcgagtgaattggtttcttgtgatttggatgagggatcttgtgtgcagtacttgcaactgtttattttttcgatattatgagatggcatcatccactgtaggagttaaactgagaaaaagaagaaaacaaaactctattaatttttttgttcttgtttttgccttttaatgctgaccgaaaaattagaatagattatctttgttgataagattttgtgttccatccatggctgtatttgattctgacttttttttcttaaaaaaaaaaa

SEQ ID NO: 87248 - DNA, 796 bp, Cannabis sativa
tttaacatagtattatataaaaatataatatataatccaatacattaaatgatacaatatgacttaatacgacgttccaaatgaaccctaatagtggttatatagtttagtagttctacacttctctacacaaagacaaaagagaaaattataagtttgaatccccctcccccaatagaaaaagagtttttagtggctaaactctcaactatcgtttcatttgtacttaatccttcaagcttaaattttagctgtaagtaaaactttcaaaactactaaactgttagtaaatataagatatcatccagtaaactgccaccatggactgtttatgtgtacactcttgtacacgtgagacgtttatgttggtacatttaatattattatttcaaacctaaataaaattataaaaataaaaaataaaatatttaaaaaattaaaaatatcataaattttaaaatatttttttataatttttaaataataataataatattaggtgtactaatataaacgtgccacatgtacaaagtgtacacataaacagtgacagttaactatgaaaaataaatgaaatcttaaatttgctagcagtttaaaagtttggaaggttttactatattaaaatttgactttataaaattaagtgcaaataaaataatagttgagataatttaattgaaaaaactctaatatatatataggtacatgattttgtttcgtgattgtactttcacggaatgtattccgtgatgtacgacaaccgttaaatgagagttatttgatctaagggctg

SEQ ID NO: 87249 - DNA, 514 bp, Cannabis sativa
aaaaagtattttaaatctaaatatcttttatgtatatctaatgttaaaaaaaagtcagaaaaatgtgcattacaaagagataataaggtgtcaggcacgtggactgcaaaaaacacactagacctcgtagtgtgaggtaactctgcaacttatgaaccaaaaaaacctaattagtataaaaacggtacaactaaaccaataattttgataatttaaaagctagctcatttatgtaattgagatgtattttaggggtctagatgtaaattttcctaaaactttttataatttcattccttatgcaaaaaaaagacaaggataaattagatattcgtaatttatcttctatatatactttgtaatttaggtgacgtttagttagaggtaataaaatagaatataataaaaaagaaacaatcttcattctattcacttatttagttatatattaaagtattggaatgtcattctaatagaataacttttttaatattttggtagaatgattatttta

SEQ ID NO: 87250 - DNA, 934 bp, Cannabis sativa
aaaatatgagattggataataagtttataaaaatatgacatatcaaatactataaaaaagcttaaatgtgaaaaaatgccatagaagagtgataaacgtataaatgccatatttttctaacttttttatgaaatcccatatttcgtaattttaacttaatcaatatgaggtgattatagtctagttcgctctagtatattaaaataataataataattattataataatgtgaagataaaccattgtacaactaaaacccaccaagatttgatttatgacaactgaacacttctgggaattccactaaagatctgatagttgatttttttttttttttttttgaaaaagaagatcaaaaccaaaagcaagagcagggctaagatcttcaaggagaggaactgaaaaggttctgaattatctctttgttcgttccgagggctgatctggcaaggtcgtgagctgtggtgttggtagacctgggaatgtggtggacaacagcacctggaaaagacgacaaagaggagactatgagggctactagacccgagagggctgagcgatctggagagaacttctggatacggtgcaccagagtctggcagtcggaggtgataacagcaattggaaaacggactgcttgacaccaaaggagcgctcggtggagggcttcagcctcggcaaaaatagggggaagagctgtatgtgaagtagccatgagagttgcaatgactgtccctttagaatcagttactaccgccccgtatccatgcttgttagttgattgagaaagagctgcatccacagaaagttgatatgttgcatctggaacttgaacattcggggaaggacgatgggaggtgtgacatgatatggatatccgattctgcgcatccctgtattcctgcaaataataactgacagaattctccacac

SEQ ID NO: 87251 - DNA, 576 bp, Cannabis sativa
  modified_base (292)..(299): a, c, t, g, unknown or other
ttcccaatcaccaacaatcctatgaccactaaaacaaattattttagtgacaaacttaaaattttgtgagttttagtctcaacaaaaatttacttgtgactaaaacataacgtttgttacttatttagttttagtcacaacaaatattgtgattaaaaatacacttagttacaacaaattatgatttttgtaactaatacatacatttaatcacaaacgttttagtcacaatatagaaatgataatttatatataattaaccaaaacatttttatttttagtcacaaatttnnnnnnnnctaaaagtaaaaaaaattatagtagacttcacgaattcagtactagtttttcatagagatcgctacaagaaaaaaaaaagctatagacacaaaaaaatcagtgcctataagttcaatttttagtgcccatggatctgttggcaagacaagtcgtgcccaaaaaatgatcaatgatcaatggacgctaattaaatgttagctactcatgtttatggaagcacaatcacacatattaactttaagaaaagagaagaaaatagagaaaaaaagaatgttg

SEQ ID NO: 87252 - DNA, 810 bp, Cannabis sativa
gggttttgattgagggtttgttgatggaaaatagaatgggaaccttagatgttaccgaagagggtggctgagaatgggtgttggtcagttgaataggggtgagggtgtggttgaagatgaagacgacgaagatggtcagagatgactggagatgggattttttagttttgtttttttgatttaaattattttttggagttttgggattttttatttgtgcatgggaaattttgtaatgcattaaaaattatttgaaggtggtggtggtgctggtttggggttaaggttggggattgatggtgatggcagtgagaagaaggagaagaagacgaagaagaaaagaaagaaaaagaaaaaggaaaaagaaaaaagaaattaattttaaataagaaaataaaaaataatattaaagtttttatttatttattctttaattatttttttataaatttggaccaataatacttcaacacgtggcattcttaccaatacttaacggggctgtcaaactgggtatcgacggataaataaaaagtgtgaccttgaagactattgccgctatttttagaagttggggactaatatgcatcaacgtgaactttttgagaacttttgccacaaattttccaaaaaaaaaaatacagtaaaattatatatatccataaaaatataaaaaatttatataattttagttttttttcctttcctgctagaaaatgtaggtgtgcagttaatgattcagaatttttaaaataataataactatgactcctgctattacctttgctatctcaatttggagtagttgaa

SEQ ID NO: 87253 - DNA, 556 bp, Cannabis sativa
tggtaaaataatttccaacaatgactatatctaaaatgtggggtttcgaagcctcacctaagcggtacacattaacaatcggtggcagtaaaaattggtgtaccgaaaacgttgccgaaaataggggtagtgtatatcaaaatgatcacctcgatgagtagatcacacccatgccaactgttgtcaaaacgatacatgatgtcaccggaaaggggcggagctacaaaaatgtcaccagaaaaattagcgaactaggaaaaatggtttagtgtaggttgttcttcttgacaatttaagcctagtggtgaaaacgtcttgtcaaatggattccggaggtgaccggaaaatccgttcaaagtttgaatcaccaaactttttcttgcgatcccaagctaatgacggcaaaagaagcggcaccgcttgggggtgaggtcaccggcacgtgggagttctagtggttcggtgcgtggggctggtcagtggccggaggtgggtcgccggagggtggtggtgatggtggttgtgggttttatttgaagcttgaagagagagaaag

SEQ ID NO: 87254 - DNA, 652 bp, Cannabis sativa
  modified_base (125)..(127): a, c, t, g, unknown or other
aaacattttactttttctcacaacaaaacttctaaataaaagtaaaaaaattgtgactaattataattgatcatcaatcttatgttatgatttaaaggtgtgtagctaaaagtattagtcacaannntcacaatttgttgtgactaaattagtttttagtcatagtaattgttatgacaactaaaaataaattattgacaattttgtatctaaatactatattatattttagtcacaagtaattttttattgtgattaaaagtcacatttaattccaataaatttatgtggtatttaatcacaaaaaaattatgttataattaaaaaattctcacttaagttagttattttttagtaaatattgtgtattttttttttaaaaaaaaaataaacattaattgatgtgtaatttagtgatgttttatattattgtttgggccgagtacattgttaacatcttgtctgttctttattttcatgaagttatgtattttttaatttatataagtgcattgttattaagtacattaagctgtttaatattatattaaggttaaatagtgatataagtacccaaagttttaagttggtataatctcaatatttatttttagcggcttaagtacctaatgtttgtaaaactgtaaatttt

SEQ ID NO: 87255 - DNA, 1174 bp, Cannabis sativa
tgttggaatactcatggacattgttgggacgaccctgtagtgcatctaaaaatgttgccaaaggttagcaggtacgtttctattggcttaccggtatgctgcctacacggtacgtggcctaaacctccaagagacgttgtggtgcacattggccacgtgtcgcaacacgagatgacacaggtagtcatttgtgggctagtttgcgtacgaacatatgaaccatggtggaaagagatagaggtctaacatttgctactagtttggtggcttatctcgagggcctgccaacatgcatggaggcatcgtgcctcgaggattggaccatggatgtatgggagtccttgggtgataaggaagactattcggacagtatagaatgggtcataattagaagcgttggcacgtcagcttagtgttggcatcttgccacacatgctaccttggtcacgactgacaaggtgagcgacggcgttgggatttgccttatcatagtgggaacctatggacagtgcaagtatctgttgagtattattttaccatgacactactacaaaaaggagtattttcgtcagttttttagtgacatttaaagattttgcgtcggttcacaaaattgacgtaaaaactatagacgcaaatagtattttatttgcgtcgtttctaaaaagacgcaaaaaataattttcttcattttaaaaccgacgcaaaaaataaaatattctttataacatactgtgtcaatttggaattgacacaaaaagctttgtgccatttcaaaaccgatacaaaatatttataccgtcggttcttaaatgacgcataacttattgtaaaatatttgtttttcacctattgcgtcagttataaaatgaagcaaaggtataggtaaggtgaaattgcaaatttccatacaatttttcctgcatgtattttcagattttataatcattaactataaaactaactataactaaatatataatccaaaaaaaattaaaaaattataattaaatgaaacatgtaatcactaaataagttagaaaaattatctgcaaaaaaaaataaccacctaaattttacattaatacataaaattatatagtaacttgattacacaaaggtattgtcataattaaaatgttaattccaagaaaataaacctacataacaaagt

SEQ ID NO: 87256 - DNA, 728 bp, Cannabis sativa
cataggattgttggtgattgggaatacactttaaataggaatccatccattccttcaattagagttgattagctgtttttagtgttattcgatgcgtgagcatgttgcaaatattttctctcctatacgtggaaaaattataattcaatatatgcgttttaagttttttcccttgaaccctaatgttttcactagtcagtatgtagtcattattctgcatttagaaaagcaaaatataactttgtaaaagttaatagtaataccatttatgattattacaaagtatatatataggccacgatgtggtttggtagctagtggatgattttgtgttgtaattacaaagtatatatagttaataccggtcttctcaggaatggttatctttcttcggatatcatgtggcttgataattaaataccccagtcaatgactactacttcgagcatgctattgattatattcgaatttctctctttattcgaattatgcctacgattttcgatcggtatagtactaataataattaattgcttcattatttctttaaaaataattagtattagtaataatcctttagccacaatataaattgtgattaaatattcttttagtccttttccacttgagttacttgctacgacaaatattctatacgggtgattctcccacatgttatagcgtcataatatttatgttaataactgcatatttattttgatggatat

SEQ ID NO: 87257 - DNA, 524 bp, Cannabis sativa
ggcataaaacctaacagtcattacattcattttagtgttgaatagttcactttgattatcagttttgattgtatgggggattgtaataaaatgaatttcactcaagatttgaactaaattattgacacttgtttttgtagtgttaaatagatcactcaaaaatttatgttaaacaaattttactatatttgtttgagacaaggtattatatgatatttttttgcttgtgtttttgtacgtatttttcgattataccgatatatataatgtttgattcaattataaaacaactattatgcaacctaactaattattttctttttgatcaatcaatcatgaattttattactccaaataacaatttacaacctgttaggactttcaaatgaagcctgaatatcaatctatacattttctttgtgaacttttcaaacacctatattagttacaaaattatttctataatctcaaaaacaaatcttcatccgccggctgcactttgtttggccaagtgcaggatattc

SEQ ID NO: 87258 - DNA, 1113 bp, Cannabis sativa
tttgacatgcaacaaaaaatacacagcacaagcacttttgctacaaaaatagagttgatggcatcataacaccaagtaagaaaacatttatgtcgttggattttattaaagtataatcaattaatagaattacatcctcctcttgctatatcaatttttttaaaattattaaatagtgagacaccacattaaaattttacttgagaatagcttcacacttgtatagatttagcgtttaacacaacaattgttcggtgtacagtatactacagtattttacattatgtaaccataaaatctatccgagttaagtaaaccatggatttataaaacaatatcactagagtttagtctacataacctacaaataactttaatctatataaggtttcaatcgaatctcacaccttctggcatttgtgcaaacaaaataagattgactaaatcatacgaatatgtatagctcgaccttcttcgctatatcaacttttaaaatttattttttaagagaagactaaatgtattgaaaatattttcaataaattattgtaagctaagtactagacactacaaatttacactgattaaaagaaaatgaagactcaaaagtacaaaaatttcaatgcgtactatattaaaagaagcaaaataagaggaagttgctaaatcttcatcttaaattataaattacatataactaatattttaaaaaacaaaataacaaacttatcttatggtgtaatagttttaattgattaaacctcttatgttatcaaatatgtagtaaaagttataaatgagacttttgtttaaacatcatattattaaatcaaagtttttaaattaaaaaaattaacaaaaaaaaacatctaacgtgctttgcacgtagttgccttctagtacttatataagtgcaaaattttaaagacagaagtataaataaataaataaaataaggaggcggtgcctaccatattataggtgtagaaattttaaattggtatttaaatatttaacaaaaatataaatattaatattaattacaattaacaatatataaattttattatatataataataattatataatttatatatataataatataata

SEQ ID NO: 87259 - DNA, 593 bp, Cannabis sativa
cccacattgctaatgtgtggaaatgaattgtgatatataagatgaatgggctactcctcccattgccaattggttttgggatggaacctcattcatcttatcctcaaattctaacagatattacattcataaagaaaagaaactattgatttatgagtacatgtccaacaaaagtcttgactatttcatttttggcaagactcttttcacctcttttaatacatgtgaggctctataaatatataagttgccaattttgttctaataaaagtagatgccaacatttgcagattaaaggcaaagcatactattagaatggcctaagcgttacaaaattatatgtgggattgctaaagggcttctctatcttcatcatgattcgagattgagaattatacatcgagatctcaaagccagtgatgtgctacttcatgaagacatgaaccccaagatttcagattttggtttggctagaacttttggtggagaccaaatggaaggaactacaaagaaagttgtaggaacttagtaagtcaccttgaaaaatattttagttgctttaacataaatatattgcatactaataaatagta

SEQ ID NO: 87260 - DNA, 525 bp, Cannabis sativa
aacttaattatctctccttaattctcttactttttaattttatattaaactaaaatcatttaaatacatctaataattttatccttaattttctcattgttttaataaatttttaacatttaaatatatatatatataaaagttatatatctatctctaaaatttatatataacatatcattttatatatatttatcattttttaatacgggttgggatgtttaaaaaatacgagtcggtacgagcaaagcacgacacgaaaatactggacctacagggcatgcagaacctaccctttaattgttatatgacacggcacgacatgaccgattttaaaaaaaatataaataaatataagtcagaccagtacaatacacacaaacataccacactaattttaaatacatggataagttaaaaaaaaattattgttatgttaaaatgtataatatagttacaaagtgacttctaatgaattttcattttttttttaaaaaaaattctgaataatataaaatatcgtac

SEQ ID NO: 87261 - DNA, 711 bp, Cannabis sativa
caagtctccaatcttcaaaatttcaaactatactaaaacacactcaaatcatattctatctggtaaatctctaataagaccaatttacaatctaaacattactctatgatgaaacagataaaaactcacttggcaattaaattaaaagtgacaaatattacatcaaagtgatcgtttaaagacattcatcttagaagatgacatggatagtgttgggatgacttattgactaaagactattatgattggctttcctatctccagttgaatgttgctttattgagttgcaaatcatgacatcaaagctctgtttttgtcttgaaagtgaattgctgtcagttttatatgttcccgaagtcatcccattttgacatcctgttaattaataatgaccattgctaagtgtaaatttattgtaatatctgtacaggttaaagggttttcaagagaagatatagaaggtcataatgatctagttcttgcactactggagaggattgaatacctgatgcgacactaaatgttgccaaacaaactggaattggaaaacttctggatctcacaaaaatattaagtttgactcatcaggtgataatttttcgatgaatttctgaaaatcaaatatacaatgattgtaccttttttattctaaataagaacttttcattccttatgttaaacgagaattttgacgatgagtttttccaacaa

SEQ ID NO: 87262 - DNA, 846 bp, Cannabis sativa
aaaaaaaaaaaaaaaagtacacggtatgcactataaaattcgggttttctcttacttagagtttgaggtacaaaacactgatttatcactagtagaagtgcactgtgtaaagtgttatgtttatgtgtatttcatatttccattaattacttaaaaaataagagctacgtttcaactctttctcaaattatgttgtttgggttattttgcatgatcaactaataaagaacatgggatattacgtgaaagattcttttttcctttgcagaaaaatatgcattggtttcttcatggacttgtccttgctttgttcacctacaagttttttccgtaaccttttttttctatcatattattaaacttgggatatatgtatcgtagatattagtatattcaatgtgcaattccatcagaatcacaattcgagttattgaaaattataaggaactaaataaatgagtgctaaacaattgcaacagattaaggaaaatcagcaaggagtaagtagtacaagccctagatccagagagaggaaagtaagaaacatacggaaacggaagtatcgtgacggggacgatgaggcgttgaagaagaacgagaagtgaatgaattgcaatgggagacacgaggtccgctctcggaagggatggagtcccaagaagtggcgggaaggcatggatgttctaggttgagattctgaaatagagatgcagtgaaatcggagttgagaaccgccattgttggatactagagatgaagttagtaatgaagtggaaatggcatggctaagggaggagtgcgagggagagtgaaggtaggcagcccagaaatttagagcagactgtt

SEQ ID NO: 87263 - DNA, 798 bp, Cannabis sativa
gcaggactcactcttggagtaaaaattttccgtctaattataaaatggaacggggatggtagagatgtccactgttcaaatagagaaaataactaaggcaaggaataaccgcaccacacatatgtgagtctggtgtgggtatgatagtagcatatatgtctccttacctgtcccgatatatacatatattaaatatttttttaagtatatatttaatttattctatttttatgttatcatattatattttcgatttactttcaaatttatgattaatattgtgattttttttcttaatgttttgatgtgtttacttaatattttttaacaataaataaatatgtaggttggaaagcatttagaatgttgtttaattagattttatcaaaatttaattaaattattatagtgaattattttttttaaaaaaaattactactattaactattacgagtaactatgatttttctccaatgatcattggtaattacccgtaccattaccaatggttattcagagagatatgattatataattaacttaaggggatggggatggtaatttaaaaatcgtccccatctgaaccataaccatttgtaagggatgaggatcattttttgtctctgaaatattaaacagagcgaaaaaggaggtgatacttcctgccctgatggagaccagtttaatattttatttaacttctaataatatttcgtattttataatttatgcttgtatttttttttatataaactcgtaaacatcatggacacaaccggaaaaaaaaaaaaaaaaaa

SEQ ID NO: 87264 - DNA, 970 bp, Cannabis sativa
  modified_base (701)..(707): a, c, t, g, unknown or other
  modified_base (733)..(749): a, c, t, g, unknown or other
  modified_base (889)..(896): a, c, t, g, unknown or other
aatctctcaagatttgggagaaaaacaagagccagagaagacgcaagagcaagagcaagacaactcaacctagaaggtgcattgaccacctgcctgatggaggcgtggtcctcaggacaactgggggtaatggatgtacgaggcaataaaggtcagttgtaaagcttctaacaatgaggttaaatatgaagctccgattgctggcctcaagctaccacacgaagcacgggctaaatatctagacatacactacgactcttaactagtcgtaggtcatgtcctaggtgaatacgcaactaaaagcaaaaagatgatagcctatttgagctaatttcaagacttgttaagttagctcaagggttgtactaaaaggcaagtccccaaagacgatgcaacaaccgactcgctcgactagccagtagtgccttgatagccaaggcaaacttggcacccactcagttctttaaagaactaagcatccctatttcaaaagaaatagacatgctatacaaccatccaatatggatgacacccacagcagcatacctccaaacaaaaccttgttagaaagcagggataaggggaatagctgctgggtatccaatcctggacaacgtaactcactgacgtgctatcctaattgttggaaatattttactaggatctagatttactaataagtatgttgaattaacatcctnnnnnnnaatatctctaaaataatgaaattaannnnnnnnnnnnnnnnnaaaccttacattgattgcagcagatctttagcccttgtttctttgtgtcacagagtattatcaagatctgagcctagatcactttctctcttttgggttggttaccaccgtcttacccactatgattgagtacttgactnnnnnnnngtgggcatggcactctatcactataggctcgagtatgaagaacaatgaatgaggcttgaaaatcactatagaag

SEQ ID NO: 87265 - DNA, 788 bp, Cannabis sativa
  modified_base (26)..(51): a, c, t, g, unknown or other
ctctttctctcttcatcttcttcttnnnnnnnnnnnnnnnnnnnnnnnnnntttatattattttataacaagttggataatttctccattatactttaggacttctattaataaatgtgaggaattttcttagaaaacaatatatttatgtaatatatagctaattaattgtatgaatgatatatttgtgttattcaactcgattttataaaattagtatttatggtctacacaatgaaaatgacatattatgtgtttatataaatatttaaaatataggatttaaattatttattttctttatatagagcacctttttataaaatatatatatatatatatatttagtgtttgacattagtactatatagcgaatatacttatatatattagaaggctacaaagaaaatgataatacataaatgagtaatgatatgtggacataatcgttaaaaaaaaaaaaatctttatgctgttagaaaatagatctaaaatatttatagatcttaaactcatgttagattctcaaaattaatttatgaatcaataagaaagacataaatgatttataatatttgatgtgagatgagattatgagtatgagccagtttggtatagttgtgctgtgtgaaaaagcatagtagttgtgctgtgaaaaaaaaaacaacggcagaaaaactgtaaaaaaaactgaattgagtgtggtaaattataaatttcaaagtactgtgagttgttaagatctattataatgataataataatgttataatctagtttattataat

SEQ ID NO: 87266 - DNA, 695 bp, Cannabis sativa
aaaataacaacaaaaaataacttatagataataaaaaattaataacaaattaacaagagtacaccataaaaaaaccgtaatttctataaataaaatcgtaaaaatatttaaaattctgtacaactgtatttctataatttttttgatgttttatgtagagtaaattacggtacaaacacttaagtttaactctcagttgtaaataaatacatatgtttaattttttgcaataataatacctaagctataattttggaacttctgtaggtgcctgacctttaagtgttgagtaaattatcacgtgacaattcttaattggtcaaagtcattaaattattattagttctcaaaaaaaaaaattactttaaatatatcaataagaaaatgacacatggataatgatttaacatttaacggttagttatttgcagttttaaaaatataacttaggtattattacccctgaaaattaaacttaaatatttatttggaactgatagttaaacttaaatatttatattggaactgataattaaacttaaatatttatgtcacaaattaatattttatgtatttgtaaaataatagctttttttatggacctaaaatccttttcttgcttctccattttgttgagaaattaagacaacctttaatttaaaaaggtaaaacaaatcgaagtactattataatta

SEQ ID NO: 87267 - DNA, 562 bp, Cannabis sativa
tttcatttcaaaatggaatagtctaggcctggcaaaacgggtcagacacgataacacgactcgaaatccacacgagagttagcgagtttgggtttgccttaaatgggttcgggtcgtgtttgtgttgactcgtctaacccgcttaataaccgggttgtgttcgggttgacacggctaacacgaaacttacctgttaatggtctatttaaagttattttagtactttaacatatcataaacggattataaacgtgttgaatacttaataaacgtgttattggttgacatgtgttaaacaaaatatgcatataaataggttacacgggtcgtgtcatgtcaacccgtttataaacgggtcgtgttcgggtttcattttctgatacgattattaaatgggtcgtattcgggtcgagcatatacctattatagggctgtacataaatttttgtaaaccgcccaacccgaacaacctgtgtaaaccaaattgagataacccgacgaaaaatgtaaaccgaaaaactcgatgaaaatataacccgctcaatctttatattgggcgggt

SEQ ID NO: 87268 - DNA, 4409 bp, Cannabis sativa
ctaagagttcttttattggatttactgtatacttgtaagtttgactaagaatggaaattctttcttattaacaagttaaggaataaaattcaagataaaatttatttacaaaatacccctttacttatggaaataaggtatataacaaaaatgagtcttaaattagttacttctgattattcagattatttattctgaaatataaatcactaaatagggaacttgactcccaccttgtatccagattttaagttcccaaacacaaaaactaaattttttatgattttgtggtggttctgcaggaatctaattcctattgtacaagacaatggggaaggaaaaaagaaacaccacacgagtcaatgtgacacagagacaccaccatagttatgagttacaaacatcactatcgctccagtcattctcttatcatctacctttgaacccatttttgtattcattttattacacccagaaatccctcatgctcacttaaggggcccaagttcaaaactgggttttcttaactctacaatatatggagagcaagagccatagcaattgtcatgtaagtacctcagacttgtggaattaaccacctgatagtcctgactattttagttagcttttttgatgcattcttattttcactgagaagcaaagaaaagattcgtagggaaaaaaaataaaagaaactattagttaagaatttcaccagtgcagcattttcaaaatagtctgtcaatccaggtagttgcctcaaccctccagctgcagtgagagcaacttctccagtcacacctttgaaaacattgctctgaacctgtagtgcaacagtaataaccaaggatgataatacacacagactacacctagttcctaattaggaggcttcaaaattgaatgatacaatgtaagagagcattatctagataggagatcaaatgaaaactttattacacaaatcaaatcttagccctttttgattcttcagtacaagtaggccacatttctagtttatatacatatgttcttggcaataattatcctatttcaaggctgatgaagaagttgacacccttagtatccatgcctttcactaatatgttccattattataatttataatttataattgcaacatattatcattattattactatttgcaagaatttgcaaaaatattatttaagtcgattaatattgggaaatttgaccctttattggaaaatttgaagttggcacattttaaagcacccctagttttaaaatgtgccaacttcaaagaatatgattggaaaacaagcctactttgaaatactaaggccatcattttcttttaatttattaatgattgaacagccaatccaacactaaactaataaaaatattcatttaagacgttagtttataaatttcgaacgctaacgcacaagattttttaaattttctttgctctatcttttttaaagatttggaactcttataattacaatttttttagcaaaaaaagtgacaaatcaatgatttacaatgattccataaaaacatgatttttaaaccaaaaacgatatcaaatcgatagtcgcataaaaacttgattgtagacaaaaacaatactaaaacaatggtcttgcaatagttaattttattaaaatgaaaattagtgaggcataacttttcacccaatcattaatttgttcctaaaattttgggttttttttaaaactcaaaaaaaaaaataacctcaaactaaaaatcgaggggaaagttagctttatcaaattacatcgcaaatcgtcacagaaccatcacaaaccatcgttatagcatcgtttttgcctagtaatcaactttgtatggactatcgcaaaccatcaatttgatatcgtttctagcctaaaaatcatatttttatggaaccatcgcaaaccatcaatttagcatcgtttttactttaaatctacatttccaaagttccaaatctgaaagacacaaaagatcttgtacgttcgaaatctataaattagtatcttaagtgaataatttcttcagtttatattttggataactttttaatcattaagacattaaaaagaaaataatgatgggtgcttcagtgatggtgataatggcttttttttcccttatatggttgcaagtagagaaagagaaagacaaaagagaagagggagtagagaaagagaaagacgagagagaagagggctttgaatggtagaagcaattctgtagaaagagaaagacgagagcgaagagggctttgaatggtagaagcaattttgtctaatttttttttaaaggtcaaatttcccctatgtttagtttgcctagtaagaaattctgtttattccacagcaaaggaggcaaggataaactctttcgcaaaggatcttaaataaatatagtaagatgaatggataagaagttacccaaaaccattttctaggaaatgcaccaccccaatttttttctgaatatgaaggagcattttcaaactcaaacctttcaccatcccattctatccagcctgaaatatagatttaaatgtgagggaacttttccaaggataacagcaggtttaaacacaataccactgatacattttgtataaagggggcataattgtcccagaaaaataatggtttctttctaggtatgtgaaaagcttgacattatgaaagtaaacatgaggaaaggagctcaagcttgcactaatgatctcaaagtctctttcccacttccaattcaataatttagtttcagtccaaaaatcagatatccaacaaatattatttcaatattgttttctccatattttcaatttgtgtttgcatccctctctctttttctctttagataagaaacattttgtttgcccttggtccaaactcacactctctcacccaagcacgtgagctagccaccaaataaaacttacattttggcttttgcatccattttggactaatagttatattgtccctgtgcctaaatatcaagcccagaaccagcaacaaaaaatatataacataagtaccgtttatctttctgaaaagggaaaatgattaatataatcagttagctttggattttcactagataagacttgggaataaagcttgtacctgttgagagtccacctgccatgcatatttgccaatgaggttcaaatacaggaaatgctgcaagccatcctgctgtagacttctgcttagaggcaacatcaccccaaccaaaaactgggcgggtactgtactcccaacgtgcagtcttcacagtctctacataatttgacctgtgacaaacttaaccacgtcaaaatgtaaacaagcagcagcaaataaagttcagcatagtttacagcagaaattccttttccaaacatagcactggttagtcgaatgatggaaacatgctttaacaatacaaaacaaatagagtaacagagtcgtacctgccatcatcacaaatggaaccttgatgccaaagtggtgtgacttgaaaaccttctaacaccctcctgttgaattcctgtgaataataaccgatcatagagagcccaaatagtaacttttctacaaaaaaataaaagaaagaaacaatgcaaagccaatgacaagcagagtacaacatccttgcaaaacaataaataataacgccctggtatacaaaataacaacttggcaaaaacaaatttgttttaggatagaaatcagataaaccaataggtggttagtgaattattaaagccatatgaataatctgcagcatacataaaatatgattgaagttgacaaaacatgtgtaaatagatattctaccattcagtgtagaaatttcctttggctgcatcaagcttgcaaaagacaatataaactaggaaaatatgtaacaggacaatcttgtgctacccttactaaaacaaagaatacagcactaattcaagaatatgttcattatatgcagatagctagttaaacagataaaaacataaaaggaatatcaacctgaggaggaacctctttgtctggaggtggctgtccttttcctgccgtaaaagtactccctaacatcagttcatgcctacctatgcatgaagattttaagtaaagttagactcaatagaatgaaactaagactagtagattttgtgatggagatcataaatataatttacatcataatcttcgatgtaaatataaggattaattattacattgtcatgactttatattaagatctctcttaagtctttacaattaggataaacatacatgcaacaaattcgaaacaaatgacttaagttactaaaatcactgtgaaagtttactatttacacagaagaaatgggttcgggtgctcatggaataatcgcaaaaaaaaaaag

SEQ ID NO: 87269 - DNA, 691 bp, Cannabis sativa
ttttatactgtatactgtgttaaagttttatggtagtttcatagttattttttagttgttccgttgttttttagttgttctgttttgttgtttaacaattatttaaaaaaatagtacttttataaaaaaaacattgtatgacagtaaaattataaacttttacctaaaatataatatttttttcaaaaactcaaaaatattaaaatgactaggctcaatttttatgagagttattttaagaaattcaacaccatatctacatagattataaatggttaataatttttcatattattaatttaataaaaatatgtaaaagttaataataaattattttgtaatgattgaaacttacagcaaaacatttttcaaattttatcacaaaagtataagattaaattaaatgaatagatttcgtgatcacaaacatggctcattgatcacatcaaagaaagtgtagaactgtagattattcagatttgtatgtgaaacaaagtaaaaatatagattggaagaaagaacttttgtataagataacagatcatattctaattcttatcatacatttacattattataatatattatctacagcagtgacacatatctatacatcaaacaaaaattgggcaccccaaccctgtcgacatttagaaattaaataaaatagaaaaagaaatatgttgaatcc

SEQ ID NO: 87270 - DNA, 1010 bp, Cannabis sativa
atatccagctttaagagattcagattgcaactgtttccgaaaatctaattctaagcaaagagagcaagctttcaaaccagtggccaaagtgaactcatttggtcttatgacatctcggataatagaagaacaccatcaattccatacccttcagctacagacccctgtatcaaagcgaagcgtaggttgttattaacttctctatttttttattttattttttttttttgcatatcaaacgttttcttaagtatttttttcatttaatatatattaaaagttaatatattcattgacaatcctattcctatatagtttttatttcctttcaaaagttaatgtcaataataaactcttagtagtattgtttatttgtttgatgtacaacaaacttattggatagatatatagttacaactactagtgagataagatgataatactaccactaagatatagtgatgacaataatttttaaatcatatgataagttttttttatagatttatcgattatttttttctatagatctctatttttgtgtgaaaattttttaattcctaatattttcttaactttaattactttgaatgtagtggtgactaaaagtcacatacagtgatgacatcagttttaaaatcatctcacaagttttttttttcttagattaattatcaattgtatttatttatcaaatgcgatacggtgatgatctgtcttctaattttttttctttcactatgattttttttttaaatcaaattcattttcactatgatgtttgtagatatctctttcactaaataattattaaatattaaataaattaattaaaattatctaaatcatatactatttaaatttaaatttgattagatttaattctatatctactttttcattattaacggactttatgctaatttgggccttaggtaaaaataaaaattggggtccaataaaaaagtaaggttgttggaatttaaattttgaacctcttagttgttaaa

SEQ ID NO: 87271 - DNA, 909 bp, Cannabis sativa
gctgaaaacctattttcttgtagttacgttcatccttttagcaagtctattttgttgcgatcgatgtgtccctaactgtcagatgattcgcaatcccttcctagtcacaaaatgccttgaattagttgaagcaaaattctaatccattattctcagctttttaattttctcgccagtttcgttttcaagtagctttctccacttgacaaaggtgttgaaagcttcatcctttgacttcagtaggtacacccaaacttttcttgaaaaattatcaatgatactcaaaaaataatgagcaccactaagggttgggatcctagatggccctcacaaatttgagtgaacatagctaggcaagttgttccttggtgttgtgcctgccaggggtgaatttttgcctgcaactcttgccatagacacattcttcacaaaatccaagcttgcctgttatttttcctttcaagattccttgcttcttgatttcggcaatccccttttcactcacatggcctagcctcaaatgccatagcttggttaaatcaccatcatctgcatttgaaacatttgacactaaactagtaactgttttcccatttagaaagtataggctatttttatatcttccttccattacaattttagtgcccttaataattctaagcatgttttcatcaattttaattgaacaccctttagatgctaatgtaccaattgacaagagatttcttttaaggttggggatatactttacttctgtaatggtcttttgtgatccatcatctatctgcagcatcacacagccaatcccttgtattgtacaagccttgttgtctcctagtaaaacagttcgacctataaaagtcatgagcatgtagtgctggtaacacttgggacttccaaaaggtgtag

SEQ ID NO: 87272 - DNA, 925 bp, Cannabis sativa
taatttctaagtcatagtactgattgattattatcatttaaatacaatattccttgtttccttattctcccacccccattattagtcttgagtcttagcagaaatttcaacaactaatcatcttgtcttttctttggtatttatttcttatttctatctaaattgatcccttcttacaagttaattaagttggtacaatgtatttattattagatttttttttcttatacgtagttagtagatcttacctgttatcattatctgatcaatcattttctcaagagattagttcacatatcagtgaatggattatttatgaaatctaaaaatatgcatgattttgttgcacaaaaatattggtggtgttatttctgaggctgattttatgcaataaaggctttttacatgaatttttaaaaagaagtttgtttgattttggggtaagaatatttggagtacgaaaattgatgccaatagttttaattaatatactgaaagaagtttttgagaatcaattataatcttcttcgtgttacaaaatgttaaacatgttccgtacaaattctaactttaacatctactattactattctatattattgttacagcaacacatatggtttggccttaaagtaagtatagcacattcatgtatgttttaataatagtagttgtaggatgagcctcaaagtaagtatatagctcattcatgtatgttttaataatagtagtagtagttggatgagacctcaaagtaagtatatagtgttagaatattttatgtagtaacaagtattatttatttagtgtcagtattagtatataaagataactatataaatcggtaatgtatggtattattattaggctatattagaatgcatgtaacatactaacacgttcgggactcatagacatgctctaa

SEQ ID NO: 87273 - DNA, 558 bp, Cannabis sativa
  modified_base (32)..(72): a, c, t, g, unknown or other
ttattaaacaattagttttggcatttaaatgnnnnnnnnnnnnnnnnnnnnnnnnnnnnnnnnnnnnnnnnnaaaattgtgaaaactgcaaaatcaaagagttactaaatcaactcaaaggctacacaatcaagcagatctctagagagcagaatgttgcaacagatgcacttgcttgtctggcgtgtagcaccactaccgacaaggcaaatttagtgccaatataattccttgaggaacccaacattaccatcccagaagaagctaacatgttggatgacactccaacttggatgaatcctatagcagcttacctcaaaactggagcctttctagaaggcaagattgaagcaaagaagctaagaagaaaaacttctaagtatctaatcctagacagagtaatgtatagacagagcttctccatgcctctcttgaggtgtgtcaccaaagctgaagtcaagcggctaaagatagaagtgcatgaaggcttctacgacaaccatgccatggtgtaaagcctatccaagaagatactctgatgttggaaattattttacc

SEQ ID NO: 87274 - DNA, 5504 bp, Cannabis sativa
aaatatggttcaggaggtatggtaggtttgtctcgtagatcaactgacataattttaagaaataaatataaacagagcaaaaacaatatcaaccagcaaatagaacaaacaaagaaactgtagatctcatacaaatgtatgaatttcataattaagtaaggccaaacaaaagtataactgcctcagtgccttgtaaaattaggtatcatgcaagctggcctttcaagttcaaactaaatcaaaaaagacacaccttcccatgcatgacatcatctctccaagaaccctggaatacatccccgttactaaagtagaatgtgcccgaacctgacctcttgccgtatctccacattccatcatatatgcttccgtcttcaagaaccaaacggccctgtataaattttatagaacagctcttaattctttttataaatttcagaaaaggaaaaaaaaaaaataagaaagaaacatccaggattcaaagtctgcctaattactaaggttatgaattaaaagtacctttccttcaggaatacctccttggcatcgtcctctgtaaattcctcctctatatttcatcttcacagtaggactccaattttttggtgaatcacgttctgcttcctgttttaaacaaaacaacgagaactaaatcctcaactactggcaactgggcactcgaagaaaccaatatatcatttaaaagcctaagttgatacaaaatgtaattaataaggtatataaccaggcagaacacatacaagaacagtcacccaaatatgagccaattacagattttaataatagagaatcatagagatagaatactgaagttgaaaaatcatggaaaacaaataaaattattgaaaagcggagaccaataggaaagggtaggctattaggcagcaatagtacccatcaccaccacaaactggcaccttgagaaagattagggattttcaataattacattaaaatatgtggcacttgatatttaattagaccaatggtggtatgatacctcgtggtggtcctaggcacctcactggtgcccttaaacatttctacttaggaatttggcacaaccaaatggaaaatgctccaatggttttgataggagataaattatatgaatcatactcaacctctacttatactcgataaaatgtcattggaaactgcagcacataagaagcattaatgctttggtgaactgcagctttagttaactagtagtctagtactgtctggattaattagtcaattcaaaactaaataaagtaaaaggaatgggacatgacaaaagctaaggaaacgcctttattccaaataaggccttctttcttattctacaaaataacaagaaaaaaaatcctattttaggaatgggttattataggacaacagtcatgagtagaatgactggtttgttagcatgggtaattgggtggttagagtattatataaatatagagaagggacgagaggaaggacaagacaggtgttcgtgaattgtggtaagatttgagctctcaggaggcctctggccccctgaagaaccagggttatcaatttgtgtattttcctagtatttccattcaatttcagcaatagatgtataaaaagagacagctaaccggcaaaaaatgacaagtataccatgcaacttcaacatagcaaattaaagaaagaaggtgacatgcagtaccagcatagatgctgcacgaacagaaagaagtctttgttttttaggaggatcagaagagttcccttttaggagtgttgaagctgtattatataaatccttcattgcttcaaggcctgtgtcagtcaactcattccaaggagctatacttgaattggcacctggatttgatttcagaataccctcagcatttggcattgggttttttgatgagatatcaaatgtatctttcaacacttctggtttcacaccaactggaagacagaagatgcttagcttatcaagcgttgaagtagctcccgcttcagctgctctttctttggcccactcctgtgcaatttgatgccccgtccccacattccaactaacaagctcctctctttggaaagtgggaatttctagtcaaataaaaaaaatatttttcactttttgaatttaaggatgaagctagcagaaagaaattacaactccataaaactgaaaactagtaattttaaacttgaatagaaaacctaatagataccttcagtgagtggtggatcagaataactgaaagaatccgtacaagcctcagagaacccatcctcagcttgttcggattcactgttacagttccaaatacaaaacacatttatattgattgtacgcataaatcataaattaattcaaatgtagaaaattagttacgcattaaagaaaactcattgtagttgctcaatattttctgaatgttttcagagtaccttacaaaaccttcagcagcctctacattttccatcacttctggcgaatctatctcatcagaagaaaatgctccctcaggtaaactatttccctgggtttcacttgattggcttctcctcagaagcctaaagatgaatggaaaacgctgggcaagtctagtcaatataccagtttcctgagaaacctgttgttcagtaaacctggtaattgcataaagtaaactcagcaagtaaaagaattacataaactaatcaaaattattaaatagccaaaaataagtgaggagcacaaacatgttactaaaaacacaaagcatataacaatgcaaagaaagacctaggctcctagcaggctagcaccactttgtatgacaaccaatgagaatgaagcagaaagaaacaacaaagaagaaaaattggtagggaggagaagaacaaaagagaacatcaggtttcaagtttttaataatttttaatgcaaaaataaatttataaatcaaattcaaaaacataaaaatgtcaatttagaaaaagtaatcttaaagaaagtaacttaaatgaccaaaagagaaattcaacaaaattagagtccttgaccctacaccataagcaggttcatttataagctttcacctttcaataagtgttatcatactaaacatgaatcttacccaataacaagaatcgttgttacaatcaggtcaggctccagactgggttcataaatagtggatatcaatatttcctttgtatattctgtggtctggcgaaaactatgcacaaatgcatctgtatcatttttgccaatgatacttgaacttgcaactatgcaaataaccacgccattcaagtcctatgcaccaaagaattttaattaacttacagcaataacaaatcaaagcattggtgtaaacccatcaagtacatacaatttttaccttgacacctacaccgaggaaaggacaatcatacatggactgtaaaattgaactcttaatgttgtaaccagctccaaatccaatctttgcttctttatatctttccaggatctacatataaaagcattccccataagtaagaggaccaggaaaaccaaagatataggagtgttgaactgattccactattttctgaagtctagttttcttttgttttattcaataataaagatacaagttttcactgatcttgaatgtagttattcacaaggagaattaaaacagcattagaacttggatgtagttattacctaattaaaaaaaataaaaaaaaataacaacaacaataataagaaatattagaatatatgatatcatattacactgttttattttatacttttttaaagtagtgttcgcattacagaaattgcaatatttctggaaccaaaataggtaaagatggttgtggttctagagacttacactaaaaatttctggaactttgatctctcgcaaatcattacatgatgaaccaataagctttgtcagcatatcctacaaaatttcagcaatatccaagttcagcaaagtcagcaagggtattacgaacttccaaggcaaaaagatggtaaagaagtaaacttacagatttgagaacagatacagaagtaatggcaagcaagacagcattatttgcagtctttacagcctcatctagtgtaaccaaatcctttttcagtaacttgttggtgtcaagatctgcaagtacaaaaataccacaatctagtcagcatggcaagtagcatatcacccagtttctatgtaaagtttttcagtttttaataataataataataatagcaaaaaggacttcagattttcttccaattttctcttcttttttgttctactctcagcgagtgtagaactctcatgcaataggtgcagaatcatgaattaccatgaaagtcattttactctacatacaaatatcatcaaaactttaccaaaaaaaaaaatgcatatcgggatatgcaaggatggattagatgatgaaagacataagctgcacattctaacatatgctctacccaaaaactatttacattgatgaaaagaaaatattagctaacaacaagatcaataagacattgctcaccaattaataaattagtatgctccttaattttttccatcaaacttttgacctgaaaaccaaattataaagaaagtgaataaaagatattatattcggatacaataccaacaatgcactactgtaaaaattgtcaccaagataatacatcaaaagaaaagattatattcacagatacaatacaaatataatttcaataatgcatttccttagcaagcaacttatttctaacttcattcatacaacctcatcaagccgcctctgtccttcaaagttgaatggctccaagacaatagcaacagtaaacccatttgcggatcttattttctttagaatatcaactgctagcatgtgatctacaccataaccagcgcttgccacctaaaccaaaagaaacagaacaacatgagtaaaatataatcataactacacgaacaacatctctctaacaagccctctatgatcagtgaaatatactctggaaaatagcatcaggaataaaagattaatggctaagaaatgtacaaacaaggattatgatctttgacgatgatgttaaagatggcgggacttcaagatttatcgaatctgaatctgaatctgcaacaaagtaaggcaacaacaaaattgatcagtcaacatattgcttgagaaaataaagaataaaaatgcttaaataagaaaatcacagatgcaactatgacagaggaggtcccaaattcgattcggatacccccaatgtcaaagaagagaaaaaaaaaaaaaactatggccaaactcaaacataacatacattatactcttttggttatgacttatgagtgtataattgatacattaattgctatatgattttccattatagtttgaatttaacatacaattagctagagcattttaagtggctccctgaaacattcattcaagcttagagttcactaacttcttcactgttcaat

SEQ ID NO: 87275 - DNA, 1331 bp, Cannabis sativa
gtgacttttagtcacagcaaaaaattacttgtgactaaaacataatatttagacaaaagttgttattaatttagttttaattgcagcaagtattgtaagtaaaaacacatttagttacaataaattgtaatttttgtgactaatacattatcttttaatcacaacacaagaataatgatttataattagtcacaactattttacttttagttacaagttttgttgtgactaaaagtaaaaatttttatagtaccagaatataatattagatacatatgatacatttaaagaaccatacaattgtaataattaagataatacgtacttatagagttaaaaagaggacttagttagaaacgcttcacttaactagaaaattctacacactccacacaaatactaagatcactaactatatgggctaaaatgacaaaaaaaaaatatccattaaacaatatttttattaatgaagggattatttaatatttaaccaaaaattaaaaaaaaatatatatacaaaatacagttgtacgaaattttaattactttactgtttatgagtttttttttttttttttttgttttttttacaaaatacagactattgatgttttcttgttatttatctgttatttttacgttgttatttgtatgttatttttatgttgtttttataacactgcaaaactgtaattaaaaaaattaaaagattttaaaattaaaaaaaataaagattttgtaaaaatataaagaaaaacatttgaaagtatatgcaacgcgtccgtttcacctttgaagtctcatacctacaatacacctgtacgttacttttgactgcttcctggaatgacgactagccctggaaactactctggaggtcaatcatcttaagattgcttcaagtcaagtgatgggctaaaaataaaatgcatcttgttgatatagatgaatacccatcaatctatttaaactcgcttcaattgtatagtctaatacctacacagtcttaaaatcatatcacacttgacctttcttacgtgataagggattgcatatcttaccccagctttctccttacggataacgaaacttttttaactatcacagtatagatgttaaatttttactaaaaataatattttgtataaatttccctttaataaaacaagtaaaacattaatataaacccaaaataaaaatctacacctatattcccatagtaatatgtgtatcattgtaacgtctccgcttcaagcttttattgggcccatacactcacggaataatgcatcttatacacgagtacaccactctggctgcttcctagattg

SEQ ID NO: 87276 - DNA, 597 bp, Cannabis sativa
gtattagcggctatttattagcagcagacttttagcgggggatttccgccgtcaatagcctattgcgaccgaatcaggggttattagcggcggagtggtccaccgtaaaattcatgtgtttattgtgtttggttaattctattttgctattgactatttgttgctgtcacatcccttgcacaattctaactggtttcgttgtgaaattcttgtgttgaatgttcttgctgaggtgttgttttcactacatggctcttgggtcatgagtaagtgagacaaacaaagagctagctagcaaaatctaatttaactagttaaatccatttgtttattccaatctaagcacagtactatacatgtgtttgcttctatgggtttgagggttccaagaaagagatgatttcatctgtttccccaaaagagatgaaccgtagaattaaatcaattaaataaagtaattaaagtaaaagtaatgaaaaaatctcccacacttgtttcacaaaaaaattcagtatactctattttcttaaagatgtgagtggttcaatttattttcctagtacagggaccaaacaaacactgctacactagaattcc

SEQ ID NO: 87277 - DNA, 920 bp, Cannabis sativa
ggcacaatcgtcttaatcgacgagaaaggggaagaggaggaggaggaggagggcgagattgtggcttcccttgatcacaagcgtaagggtaaaatggttgagactgagtcttccaagaggccaaagaggaaggacaccccgaccgttagctcagactctgggattcctcccgaggcagaggagtacaccatgcctcttggcattactcttactccggtccccgcagatgaggagaggcagcaactccaaatcgccaaatataactatgccatggacgagtatagccgaggaaatgttgaggtggaagccctgaagaaggttttgcgggaagcccaaaaaaattctctacgcgaggaggccttaaaaaacgcttgggatctgaacatggatcccctgacagattggttcaactgcttcgtcagttcggctttcgcttcctttgcttccgagctaactagccaatttgtctcccatctgacccaactcccggccaaaagatatgcaacctgtgcctccacgaactctatttgccaggtttaggatatcagtgcttccctggctgtggtaagattttgtgattcattcctctctctttgcttgtattttgtcttaagtcatttgacctgattcttgttttcttttttagattaacgcatgagaccgaccgcctctcaaagactctgatagaccaagggtacgtcatgtccgaatttgagggcatggacgaggccatgaagagtctgcgagacttgtcggctgagaggaaagcatttcgggaggaggcccagcacagggaaactcaggcggaggcgaggcactacgaggagctaaaggtttaggacgaggctgtggccaaggtcaagtgcgagttgcgggaagccaaggaagctatggacgagctgactgccaagctgaaatcc

SEQ ID NO: 87278 - DNA, 661 bp, Cannabis sativa
atcataatatcttacccaacaacaagaatattggaaatgaccaaactgaagatactaagtatgcctacattatatagttgcagcttatagatttgtgccagtgtaattgttttcctagtcatgaagatgtagtcaaggttttctctaaagtagtccattatgcattttacttctaagaagtgattgtaaatgtcaactaattttcacatagaatttggcgaatatgttcaagaaaacaagagaaaaatattatcataggatagatgaaagagcttataaataaaggatgccaattgccaaaaataatatgtcagtgctactcaaaataagcagtccggagaaacaaaagacttggaattggcttgtgtgcatttatatcataataatgatattttgaaaaacataattgaaactgaagacaaaagaacaccagaaaccaatttggaaactacaattattgaaatcaaacatgaagttctcaaatatgaatctttcacttcatatatgtaatagtaacagtatatgacatgagttgttcaagtctatcttgttgagtagatattaacattatgtgtaagatactctaacatgcaatgctagttgcttcaacattgaggagagctacaaactacaagactgaacgaaaatcataccataaagc

SEQ ID NO: 87279 - DNA, 838 bp, Cannabis sativa
tgttaattttctctaagtgggagtttattccccacaattttttattgtttattttgaacaagtgttggcttatttcttttctcgcagatatggacctcgatcttgaagacatgatcaacagtcccactctcacaaccaagaagtccaagaagcgagtgacttcaacaaatgaggcctcaggatctaccaaggagacctcaaaaagagccaaaactaccgcaaataaaaagtgatcttcaaatcaacttactatcgaatctgcaaagtctccagagaaggttgtgccgactgctgcgagtgctagtgaacaggcccttgggtctattcaccaagtaaaattttttggctctcccccaaagatggcattgctagaaccttcttgccccttgcatgtccatgctgttatggaaggcttgtagctttgctcgctgcatgctaccaataactggcgacactacaaaacttttgaaccttgcgactaggatttaatcaacaaagggagttttgagagtctggtgaagaggagctacgatcttatgcagtcggttagtttttactttccttctttccttttcatcgttcctcttttatactttttcttatattctttttagtttcattccttaaaggcatctcttttgtcttttgttgcccaacaaagaggtctccaaagagttgagatgcttgaaataaagcttcgctagactagagaacatcgtgaggtcttggcaagcaatggactaactcacagtctgaggtctctagagttaaaaaggaagtcgatgagtagcagaagaccctcaagaccgaccttgaaaatgcccaaaagaaaatcaaa

SEQ ID NO: 87280 - DNA, 1894 bp, Cannabis sativa
  modified_base (1289)..(1292): a, c, t, g, unknown or other
taaatatattatacatacattttaaaaaagtatatacatattgaaaaaaatataactttttagactactgtataatttttttttttgtgaaatatataaatatgtatactcctaatcaatatatacacatataatttatatttaatcaaaaaatatacacctcaaaataattaaataatatatcagtttctaaaaaaaattatatatatactcatctttacatatatacctcatttattaataaaaattaaaaaaataattataaaaaagagagaggaaactggcccaaaaacattggtttcctcttgatttcctttgttgcagtgctctagcatttccacacagagaaaatgactaaaaaagagagaaagcgagaccaattattaaatatataattagatatttctcaagtaaataattacaaaaaaaaaaatcagaaaacatacttacccataagattatcattaaggtggtgatatgtaggggtaaatttaaaggagcaagaggagagggattgatggtggtaggggcggagacgaagagacgaagagacgaagagggggagatagaaattaatgaagagtgaagatgaagatgatatatatatataaaattattaggggcggagatccgccggtaatcataaaaatgtaatttttaaaatattatttaatattatttgcagcggactaccgccggtaatagtccgccgctaataaatttgaaatttaataccgggataattcccacacaaaccaattttttttatttttttaaaaaattaaccctattattagcggcggatttagtccgcccctaataattccactggtaatgtaacattttcttgtagtgtgcaagtgattggaaaatttaaaagttgtgtcagttcaagagaaattgatgcaagttaaaataagtagaaatgaacaagattcaagttgacaataagatggaaattcctcaagtttaagtgaacaaaaccgatgaggaattgtaagaggtcaatgaagggagtgatgggacttgattttttttacgaaagaataaaagcaagaaatacaattaggaacgacaatgaagcatctactttctgataacccaccatgagcttacattggatttaagcatacttaacttaggtaatctcaagatggaaaatctttcggggagtcatctcagaaagtgtacgagtgaggacaaagtacactaaaaagattcatattaggatgcagaattgatagtcgttccagagattttcaagaggaaagaatgtgttaacaagtaannnnttacaaggtatcaagatgagttcaagttagtgggtggaaataagaaatgctctaattgaatacctattagaaatgaatacttaacttgttattaagctaagtcagttggttatcttaggaggtcccatacaaggaatggaaagacataattataaattatgtattgtgggatcttatgatttcgaccgaatagtaataattggacatattgagttgatatgctatctatcagtatagataatttatacaataaatgaggatatggaattcatccgaaggaatagtgtaatcttgtaaaatttcaagattgatatccttaactatgatgttaagaattaaagaaggttattgagaaccgtagagattaaagcaaaaatagtatgatgttttattcttgaaaggtgggtaacctgagaagatcaataataaattagaaacatgttgtgagcatatttgatgaaggttagattatcttagaatctcttccctgacgatgtgtttatttaaaagtgataattaaatgtaccactagttaggcatcttaataagtgtggtacgagagaaatattagatacttatttactggggtaaataggctaggt

SEQ ID NO: 87281 - DNA, 781 bp, Cannabis sativa
gccaatgagcaataactaataatatcatgcacttccctaccatataagagctcgtttagaacgttgtattaaatcatattgtattgtattatattgaactgaattatatatcatatttttatataatactgttaaactttaatttatactaaaatattatatatttaagtgtctataaaaattaataccacatatagttttacataaaaatattacataaaatacaattctatataatacaataatataatataatatgacctaatacaatgttccaaacgagctctaatactattaaataccgttaatcatttttaaagtattactttatagtggtattagacccatactaatgtttattatagtaatgctcttaaaataactagtagttaaattatttagcaatgagtgaaagataataatgaaaaatattgctccatcaaataaaatagtatagcgctacaaaaattaactttttttaagtaactgtatcagaggaaataaagacaaatacagttacgtacaaaacaaagaggagaagctatattctccaaaccgaatccaaatcatgtcttaatgcatccatgtgcgttgtggtgggctgcttcattaatacttcttgagatgtggtagagagatgtattaggaagaagagatagggatccttgaattaattagctgaataaagttggacaaagccgagttgtccttccaagtgcttcaaatcttagtgactagctacaagtaatcagtctcgatacagctgagagaaataattttg

SEQ ID NO: 87282 - DNA, 1871 bp, Cannabis sativa
  modified_base (99)..(103): a, c, t, g, unknown or other
  modified_base (129)..(138): a, c, t, g, unknown or other
  modified_base (253)..(255): a, c, t, g, unknown or other
tgtaagcgataagtagtataatatagatataatataatgaaatagataaagacacaaagtttctatagaggttcgaccccgagcagttcggtaatagcnnnnnccccttgatttgtattgacttaagannnnnnnnnncaatgattcctcttcttagagctcttacaataatatctttgaatatgtattcttagataactttttcgaccctttgcccagtgagaatagatctctatttatagggctataagcnnngagggaaaagtttcccttctgtttacaatagatataattgccaggattacacattaaacacagaatacactgatcaagggatttagatagcttgccatatctctgttatgtgatcctaaaattataggggtttcttctgtgattcacgatgggagtgctaaaaatgctaagtgttggcgtgctgttcggactgctcactgctcggttaagaaggcttcgtccgtgcgaatatatgtggtgctctgttcggcatatctcttcccagtaggtacgtgaagttaattccacgtgtcaacatcgtgtgatgccacgttagagtgcacaatttgggataacatttgcccccaagtctgtactggacttccaaagttgcgtgtagacttcatccgagctgcctttgcatttgagtgagtgacatgtgttaggcgcgtcagtgcgcgactcgatgtgaggctgatcaggcgtctcttcagtttttcggctaattaatgctctaacttaattagtgcctcgaaactcggtatttctcatcacgttttgacggttacagttgattacatttgatttcccaatatttacttttgggagggaatcgaagcatctaaaggcattttgaaatgattgcctttttcacctctctgcctataaataaagctgagtcttcctcacaagtttacttttaccaatttctccactaaataaactcatagcaaaaatggtttttacttcaagtctgtcatgagattcccaccaaaagcatccgagcagctccgcttggactaagcttagacatcgaacaatgagtaagttttcagggttttgacttatttttgtacatcttttaaccttttaatctgttgagtactcctggtcggcatatttgcctatttactgttcgatatcccgaccaaacactcatctcatgtgttgtcttttgtagatgaaccttggtgagttttggggaagtgaacaccgaatcgattaggacttgcttcaacttctgtacgaggatcaacctcgtcttcgtgccagtccgtcctcttcgagtgatagactttttgattcaagctttgaagattgggaggtgagtagtgatcgctctcccactccagaactcatagtgcaacaccatcattactccgagccaatcgccggagaggggtacagtcgcttcatttaggaattgaagaaaggttggaggcattatctgccgtccaactggacatatattgtctggccaggtgttgctgacactcttcctattggccgtccaagtttgggtaactttggcatcccaattgttgttcctggtgttacggttgctcgacattctcaccagtgtccgttcagaagtaggatgattgcctgaacaaagcaaacgatgcggaagatcaacacatctaaccctcatgtggcccagctcaccacattaacaagtgccaaacaagatctgcccgtcatggagaagggagatcacgaaggggacattgagatctaagaaattgaggagcaggacaatgtctgtcctggcagcccctccgaggctgaggaggaaagaagtggttgaacctccaaactttggaaggtataaagaggtcggggagccggtgtctgcg

SEQ ID NO: 87283 - DNA, 718 bp, Cannabis sativa
gcggtgatgtggctgtctaaaatcacttcaaatagcactatttcttctctccttaattctctcattttttaatttttttattaagtttataaatataaattaattaattaatcaaataaaataaaatattgggaaattattatatataccgtaacttcttgtatttttttcaattttacgtttttatatttatgttttcattttaataaaatatttcaatacattcacggttttaacatttttctttttagtgtttcttactaatccacacaatctctctctcatgcactctgatatatttgcacacaaacgtctatactttatatcttataaaagaaacgtcagtactttatttttatatatgttttttgtaaatctctttacgagtcattgttataacacaataaaacaaaaaattgatatttttgtgatgaagattgcacatttgagctattatggaaattactatcattaaaataaggggacttttcacttatatacgtaaatctaataataatggcactaataaccaaaatcaaattaattatatatacacggcgcaaaacataccaaaacggaaaaagtattaccattctatgtgttcaggtttttacttatttatcttgtcttattcatagacatttatgtttttaataaagaaaataataagtctcccctaaaaagacacatacatttctctccccatcgattttctata

SEQ ID NO: 87284 - DNA, 596 bp, Cannabis sativa
  modified_base (106)..(107): a, c, t, g, unknown or other
ataaattataggaatacatttaatcacacaatattgattactttctaatgtcttaacatcagaataaacaagaatatcagtgcgataaggatttggatgaatttannaatcaaataaataaataaatgatcatatgcaccaaataacacaataaataagtaatgaaattaaatctgtttcattattgataattgaatagaaaagattacattaaaatagagttttatttagggcacaaagcctaacagcgtaagttttagaaacaaacacgcttttccactttttttataattataatgcttgtgatattaaggagtttcttttgaatggttttgatttgtttcaaaaagatgagctgactattttctttggtatactttgggatatttgggatattttctttgtacgaatatatggaggcttttataacttcttacttgcatgaatacaacgaagctcgagttcaagaaatttcttatccttttagccctcctctagacaacaactctgaccccttgagaaagaaccctctggtcccttcccttgaaaagtataaattgagcgtggatgctgcgcttaagagccaagataacaat

SEQ ID NO: 87285 - DNA, 549 bp, Cannabis sativa
ctaacaaaatttaaataaatataattttcataaatataaatttgaagatattatatacttatataaaaatactaatatttattagaacaagtataatattttgattttaaatctttttacgcaaaacaagatctcaattttattttaaaaatactacacataattaattttgttatatttatgccactaaggactttacaattaaaattctaattgaatagttttacaatactaaaaatacatattttaaactatatgtataaaagaagcagtgaagtgtgtaataaaatatttgaatcttattcagaattttttaaaaatttaaagataattttaaatagctataacatacatgatcatttaaataatagaataaaatatttttcttaataccaaaatagatgaaagaattactagaacaacttttttaaagtgttctattatgagattaggtaggcacattaactgtaaataaaaaataataaaaaaaatgagatagttaataaaagcaccaggttgaatatagaaaaacaaaaatgcaaaatgaga

SEQ ID NO: 87286 - DNA, 919 bp, Cannabis sativa
tcaacacagtaatactcttacaatccccaatctgatcaaccacatcaacctactttcacagcaactcatgcacaaaaataattcacccctcaactagccatggtacaatccccttgtatatataattcacacttccatataatcaagatttcaacatttcaaccaaacacacacaataaacagccccttgttcaacaaccacactaacaatcagcaactagtaaacacagcaaacccaccaactgatcaccaatggacattcaaaactttaacacaacttatcgacacccataaatcacgatgtccttcaatcacaccaagggaacattcaaaaacttttcaaagctactccaacatttcaatgtcctcccaacaattccacaatatcaacaatactcaaatcaaagactacactacctcttgaaccacttcaaccaatccaaattcaattttattcaaaataaacatccacaaataatcactcggcaaccaagaaattgttcaaatacacattaaaaattaaaaacatcaatcttgacaaaccagggagttcgttcgtgttcaatgtggtgttcggttgctgaatgtggtggtgattctgatgcgtgaaggttactctggtcgtgtgctttgagtgaggttcgctgttcgaagttgaagttgggttcggttgctgcttggtgaacggaggttgattctcgatttctgggcagtgattcgtgcatgtgtgacggtggtggagtcgaccaggcgaagtgaagctgagttgaacggttgaaggggaaatcgtggtgcagttcgaatggtgagtggaagcttggtctgtcgaatttaggagagctgggctgagttagcaatggatcgggttgagtggggttcgactggaattggtgcggctgggagatgtagttgctggtgg

SEQ ID NO: 87287 - DNA, 642 bp, Cannabis sativa
cagatttcattgttatcatgatatattcctgctctaagtcatttatatatatttatataaagagtaccaatatagtagtgatgtttttaattatagatgagttgcgactctgttatgttttacacgaaggtgtgtaacattacaagaacctcccacaattttttatgaaatagccaatagtttaagatgccggaatgaggattcaaacaacttgttgcatacgtgttaactttaggaggtcccttgcaactatattattcactgtcatttatccaagtaccaaaaatactaaaatttatcaatagatagtgattagaaacattcaggttttatatattaatatatatcttatgtttatatatttgtttttcattataagaaacgaaactagcctttataatgataaactaaagtaaaacatttttctcttcatagatatgtttaaaaaatgataaaatattgtcagttctcattcattatttagctttctctatattcaaccaattttggcattgttttatggtgctttctctctctgtgtaggagctttttattatgttttttatatgaagaacattaatattacaaattgcttttaagtagttgtagcttctttgtcacattgtttgatagttttctact

SEQ ID NO: 87288 - DNA, 1221 bp, Cannabis sativa
  modified_base (39)..(40): a, c, t, g, unknown or other
tttgagattgggacatgtgagtgaaagaggcttgatggnnttgaagaaacaaggaattctcaaagggaaggtgtcattgcaaaatggatttctgtgaagagtgtgtatatggcaaaagctacagacagaaatttacacctgccaagcacactaccaaggagcaattggcatatgtacattcagatctttggggtcctttaaggattcccacacttggaggtgcttactatttcatgagtatcattgatgattactcaagaaaggtgtgggtatatctcttgaaaaccaaagatgaagctttcaacgcatttgtcaattggaagaaactccttgagaatcaagcaggcaagaagctcaagaagattagaatagacaatggatgggaattttgttcaaaccagttcaaagaattctacagcaaggagggaatagcaagacacttgactgttagagacacacctcaacaaaatggcctgacagagaggatgaataggagactacttgagagggttagatgcatgcttaaaggagctggtttagagagaaaattctggggtgaagcattgaatactgcatgctatctaataaatagttgtccctctactagtataaatttcatgacaccacaaggaaagtggactggagaagctcaaacctatgaacatttaaaggtttttgggtgcactgcctatgctcatgtgaggcaagataaattgaagcctagagcagtgaaatgcaagttcttggggtatcctaaaggtgccaagggatacaagctttggtgtcttaaaccaggattcaaaaagtgtatcatcagtagagatgtcactttcagggaagaagaaatggccatgaaacccctaccaaacccaacactacatacagaagaatctcacaccagaattaatcttgaggtggataagtcacactccccagttgaaggttcagatgcagtaagaacactgatcatgaacatgaaaattaacctcaagaatcacaagaagaactaagtgactatctcctggccagagatagggtaagaagagaaacaagaccacagcaaagcttggttatgcagatttctcaacatttgctcttgctgctgctagtgatctcgaaaactcagaacccacaacatacaaggaggcactgaaatgcagcaacaaggaacatttgttgagagcgatcaatgaagaaaaagtgtcactgattaggaacaaa

SEQ ID NO: 87289 - DNA, 618 bp, Cannabis sativa
atacactaaaatatgcatgacgtttacgtaaagtactgaacagtcaacgtaccttttttcttgatgagtcaaattttaccaataaaattataattaattaagaaaaatataattaaattaaataaatatgatggaatcgatggagtgataggtatggagtagagtagaagtctacaatttccaaaaacaataattattaccatatgatgataatgatatgatgcaatatctacatctactgacctctctgcctatagcttgtcctttcttacatgcaatttccgacgagtattgtcattttcacttttcagtaaatttgttaagtcatcccatgcatgcagtaattaaaaactccaccacgtaaccaattattattattattaggctaattagaatttctttactcttaacatgtaccagatcatacttcttgaattttttttgccgttaaaaattccccttaaattattgagattgttagattatttaaggacttttgtctaatttcatttaattactgtttcagtaattgttaacatactaaaccatactccccaaactttgatatctaccaaatcatgcccctcaaactttgatatgtactaaatcatgccccct

SEQ ID NO: 87290 - DNA, 507 bp, Cannabis sativa
gatcaatatttcttgcattcttttgttttgttctttcttttcttctaacttagtctcatggttagcagcttattgcctcaatgccactagttttgtacagatatcttcgtcatacgtttcaaaatcatcttttgtacactcacggtcgttggtatctccttttccttcaacatccatcggagaagtcacatcttcttcttctagtccctttgggtcgttatgttggggtggtggatgtgaagtgtttcttgttaaataccattatatcacgagacttcttatgatttcatcttttaaaaagcttcctacaactctcaataaaaacactaaaatgtcgaccgaagttttcggcaagtaataattaaagatgtatgtagcaattaatagagttaaagaaaagaattttttacgtgattgagacattaataagtcttagtacacgagtcgcttttattaataagtatttttttcgtggagagtccgaaaaaccaaatctcatcttctata

SEQ ID NO: 87291 - DNA, 705 bp, Cannabis sativa
aaaatattttataataatttctaagccctaaagttttataataatataaaaatatatagtacaaattaaaatatatagttagatctaaaattataatttgtctaatgtgaaacatagagacgatatccagtaagggaaaagtggtccctttcccttctgtagagtttttctatattttttatatttttataaattatttttgcttacatataaattttacctatttttaattaaaataaactttaattttaaaagtgataaaatattttataataatatataaaatataatcatataatactattattattgatattttataacatatattaaaaattttaaattaaaataattgggtaatactaagttaatttatcacctatataaaaagagaaaaaaagtaataataattttgatataaaagtgaataattgaatgtgttatttataaagtataacataaaatataacatattaactaatcaatgtgagagttttttttaaacatatattatggagcgtatcatcgtaaaatttgaaaatatatacaaaagtaagaaaaaaaattaatatagaaagataaaatcatagaatgccacatcatttcttttaattttagaattacacagatatatagattacaatttacaaccccattctattagaatatttttatttatggaaattattttctaattaaggaaat

SEQ ID NO: 87292 - DNA, 1820 bp, Cannabis sativa
tttgtaacccctgactgtataaagtcttatcttaggcgttaggcgaggaatcaatgtacgaactggtacttagagaattaacgagaaaccatatgtggcgaaaagagaatagcgaggcaccagagaagaataacacatacctcaacttacaataaataaactaagtatggaagtcgaatcggctcgaagtacaagaatgcgagatgaccatctcactaccaggaaacttcctatggtttcatccaactaatggaagcgagacttataaccttggtaagtcagtagatttccttatatccgcaatcgacgcaagatacatcttgtcgactttgaaatgaagaatgattccagctcgccattgggatcacaacagtctagtttctgctgagacatctccagaatcaacaattaaagacgtgtttaatacacgatatttctgacccagtaaaagcgggaaaatcacagctgtatgactttcaaaatcatgcactgcgtttacattttgtaatatgtaattagatcccacgaattaaggaataataactgtaattacattttggttagccttgtaattaactgccactatgcaattataaatggtggcagacaacctcaaaaaagggacgaaaaaaaactcttatacaagaggccctaaaaaaagactcagaaatctgaataagaatgactcgtggactatgtagaattttaactgcaaaaccacgtaaaaaatccagtgttcatatttttacttttctatagtttttctgtgttgaatcatattcgttaggctcaaatttggttaacaaaaatctgcgttaacactaacccctcgtgatactttccctttgatcttttcaagcgaagtctaagcttgaatttttatgcaactttagtcttccttcctgaaagccaaatcttgcttcataaaaatttaacgtgactcttacatgcacgttgtttttcatacaagaatgatcacggggggtaatatacaccttaaaccctcctttccagaatagaaagactgcttgaagtttgtcttactcctcgtgatgctttccctttgatctattcaagtgaagtctaagctttaatttttatgcaaattcagccttccctcccgaaagctgaagcttgcttcataaaaattcaatgtgactctcgtatgcacgatgtttttcgtgcaagaaagatcactaggggtacgatgcatcttcaaccctcctaaccagaatggaaggactgtttaaagtctatcttactcctcgtgatgctttccctttgatcttttcaagtaaagtctaagcttaatttttatgaaactttagccttcctttccgaaacctgaagctgacttcttaaaaattcaacatgactctcacatgcacattttttttgtgtaagaaagatcactaggggtacaatgcgtcttcaaccctcgttcccaaaatggaaggacttcttgaagtctgtcttactccttgttattctttcccttttatcttttcaagcgaattttaaacttgatcttttatgaaactttagccttccttcctggaagccgaagcttgcttcaaaaaaattcaacaggactctcgcatgcacgttgattttcgtgcaagaaagatcaatgagggtacgatacatcttcaaccctccttcccagaatggaaagactgcttgaagtcagtcctaccccccgtggtgcttttcctttgatcttttctagcgaagtctaagcttgaatttttatgcaacttcagccttccttcctagaagctgaagcttgcttcataaaaattcaataggactcttgcatg

SEQ ID NO: 87293 - DNA, 742 bp, Cannabis sativa
ttttctattctcacctccatcccacggagcttgtcccacctctgttcggcaaaacccaaattcggtgtccatctgagctgtgcgtgggtcccatgcaccacctccatccgctaagactttctccgcgcgccagcgcgtggatgtgcgtggcagtctccaacggcatttttcgcatcatctctctctcaagtttcttcatctctggctcttctccgactccaacgatgttttttcgacgttgtgtctctctgttggtcttctctgggattctatacttgttttgtcttgttgtctctctctctccatggcagaacaaaactcattaagagccgtctctttagtcacaagacaatgcaatactcatgcacttcaagttattcaaactcctcaatcctcatgatccttggattgtggattctggtgcttctgaccatatgacaggtgatagatcactattttcttttctaagtaagtactctcatgaaagtatcgttcgcataacaaatggttcgtgtttaagaattgatggaattggaactataacaatctcaccaagtcttgtcttaaattctgtcttttacgttccaaagcttgattgcaatttactttttgtaagaaaattgagtactgatcttaattgtgaagttaagtttattgctaagttttgtgtttttcaagatgtggaatcggggaagatgattggctatgttgagttcagtaagggcttgtatctgctaaaaat

SEQ ID NO: 87294 - DNA, 725 bp, Cannabis sativa
  modified_base (672)..(675): a, c, t, g, unknown or other
tgagaaaattatattatttttttaaaaatatttaatatagtggcactttttgtgtgtcactatacctctaaaaaaaataataaagaaaaaaaaaatatagtgacaatttttgtgtgtaatgttacttcttcagtctgacaaaacttgattttaaaggcctatagtgacgcacagtaagtgagtgtaaaagggttaagtgacacgcgtgaagtgtcactaaaaattgtctttccagtcaccctcattagtgaggcgcggtgaagtgtcactaaagaattttaaagtcactgaatgtgtatcactaaaagccattagtcacatttagtcacaaaaaatttatgttttgactaaaaatttgtcactaaaagtaactatttttttttgtaatgttggtctgcttagttcactgttgcaaggatttcaacttagtttatttgatttagatcactcctttatttagaaactcctttatatagaaagcaagtgtcctttaggacactaccttgatggtctgaacataaaatttgtagaaatcaaaatatgaataaattagcatcgtcaacaaaaggaaaattaaagggaaaaaaacataagaataaaaaaaaattggtccaaaaacatcaattgggaggacttgcgttggtatgaccctgcatgactccaagagcagcnnnnaggttctggatttcagtgtcatctccaatagttgtttgaacattagtagc

SEQ ID NO: 87295 - DNA, 888 bp, Cannabis sativa
  modified_base (53)..(60): a, c, t, g, unknown or other
acgggggtgatgttatacttgatgcagtaatggtaagttggagtttatggaannnnnnnnatgaggtgttatggcagaaaaaatctgctacagctttgagactagtgaagttggctagacaggtccttaatcaatggacggttgctagatcccagcagtcttttatttcagactagtgtttctttcaccattggcgtaaaccagagaactttcaggttaaggtaaatgtcgatggagctatttttgaagcgtatcaaaggtttgggtttggttgtgtggctcgtgattcaaatggaagattacttgaagctatttcagcgagtaggaatggggttgtttttcctgaaattgctgaagtgattggaatgaaagaagcgttgagttgggttaaagataaaggttgggaagatgtgatcattgagtcagacgcgttgatggtagtttaagcaataaacagttcagtctctatgccatcacagtttggtttgttggtggctgactgtcgttcaattttattatctttacgaaatgtctcgatttttttttgtttatcgatctgccaataaggctgcccattatgttactagggggtcttgttttacgtcaatttgtgttttcaatgagctgaatgccccttttgttttgcaaaacattgttatggttgaagcctgtttaatgcataattttcctttgttcaaaatatatatatatatatatatatatatatgtgacaccaataggcaatagcaatattacacagcaatatgaatatccttaaatattttttctacaaccacttagttactcttttaattcttttaattttttttcaacttcaatttatttatttaataagctaataacaaattgcttttatttgagaaatca

SEQ ID NO: 87296 - DNA, 610 bp, Cannabis sativa
aaaaaaaaaaaaaaagtcaagctccctcagaaaatgaaacaacctcaaactcaaatagaaaaactcatacttagttcttccggttataaaaaaataatttaatatcatttaaatatacttaattatttaaaaatttcttatacaatgatagaattcttatttgtgtaaaaggaagtctaatttttgtaaaaaaaaaaaataaagtttaattataaatatcataattaaatggcttaactgtcaaaataattacagcaagaatttatataaaaaattatttataattattaattgctgaaagaagtcttgctaaatatttaattattttaagaaaataattaattgattctaaaaaaattttttacctactggtcgaccattttataaaaaacgggctagcccgtttagacccgacacgagtccgacccaacacgaataatttgtggggacaagttgaagaatgtccctttttttttaattaattaaccaaatctacctttatattagatttaattgaaacatacccacttttatgaatattgtacccaaaatacccttaaataaatggagacacgatttccctcaaaatcaagcatcgattttccacttc

SEQ ID NO: 87297 - DNA, 895 bp, Cannabis sativa
ggattggtatattagcaatatttttgttattaaatcacttgtttccttccgaataaattttgaggggatttatcgttcgatccaccttttttgttatttttatctttgttgtccttgctcttctctttcttttacctctccttcctgtctttatcatcgtccttctttcgatgaaagaggtgctgaggactatgagaagccgttttgcttttaactaatttacaataacaataagctagaagaagtatacatgtaaaaggttaattaattcaccgttaagaatttgtgtgcttgtgattatggagtctatctgtctttatatacaaatgttatgaatgtttttcgtgtataccttggctgttttttttttgtagtaattatgatgttgaagtgaattaacttgtatcaataaactatacaatatgaattactagtaaattctcacatattttcatcaaaataacgtacgtattatgattcagaatcattcaaagaaattataaaatgagaaccccaaccagcgctgatcattttcttgagattttctatatcaagcaaaaaaaaaaaaaaaatatggttagcatcattacagttcagacctatctaatattgttatttgttttttttttttttgttttgctataacaaaaaaaaggtgctatacttaactccttaatacatgtcattctaatttattatgtttgtccagccatgagaccgcttggattattctaggaaactatactgttgattaattggagttttaatatttatatatttgtgtttgatgtgaaataataggtgccttcccgtttatgtgtgtggctttagcatatatacgcggtgtgatgacttggtctgctacgtaaacttctcataacattaataaattata

SEQ ID NO: 87298 - DNA, 624 bp, Cannabis sativa
atctttacaacaattatctcctgaaatcgtggggtttgattacataccacgtaaaataaatacggttaatatttgaaaatcacacagctgtgataggcctgcttttaccagatcaaggtaatcgtgtattaaacataatgtaaatcgtaatgttctgtgatgtctcggtaggaacacgctatcaataaccttgataacgagctagagtttttcccacatctttttcgaggttaataatgttagccttgtcacttctgcgagcttggtgacaagatgaacttcaacagccaacgttagttgaatgtcaccttctgttcgagagaactgactcgctgatactatgaatctcattgaaagatgtctgaagttgattagtaaaagtaccgaaagcattctttcctatagcgagatggacgtctcgctatccgtcactgaagttcttctagctgttgtacttagttaatataatgtgtattatacgctaagtgtcttaacagtcattatatctcgccttcatctattcatgcgtaatgaggttgatgcctcgccttacacatccaatggcatatgacttctcgttaacgtatgagacaaccgtttgtatatttttatctcgcttaagac

SEQ ID NO: 87299 - DNA, 611 bp, Cannabis sativa
  modified_base (559)..(563): a, c, t, g, unknown or other
aagagactcattcatctcagaggtaacagttgtgggaatggttgcaaggatgtgactcaatgcctccaaattgactgttgtagcagaaaaaagctcaccaaaataagatataatgattgatgtcataccaggctttgaacttacaacattaccatctctgtccagcaaagatttgatggtgttatgttgtttacgcgaggatgcataggcatgaaaaaatttagtattttgatcaccgttttgcagccaatcaattcgcgaacgttgctgccagtacataatataaaaattaaatttggactaataacataatataccattacaaagaaataaaacatagtttacattggagaattaattaactaattaactaatcatttataattagtggaatgaaattaattgtgtaaatatgtaataatatccctccgcaagtgtgagtattaatagtattttattttatttgatttctttcttttttttttttttttggaatgtgttttattttaggagaattaccttttatattatttttttaactttttttttttcaaatttnnnnnttgggtttctaaagtggttgcagaactagttgcaataggggtttctat

SEQ ID NO: 87300 - DNA, 897 bp, Cannabis sativa
tcgaccaatgtgccaactttgtggtcgtgttggccacattgcattaaaatgctatcaccgttttgatattactttcacaggaaacacaagtgcttctacatctgctacttcttcaaatgacaaccctcatgcacatttaactgagatgaattctgcacaagatatctccacagcatggtatttggacagtggtgctactcaccacatgaccaatgatgctgacaatatcaatacagcagccgattacaaaggaaaggccaaggttgttgtaggtaatggttccactctttcaattcatcacttaggcaacagttctgttcccaccactcatcccaatcactctcttgttttacaagatatacttcatgttccaaatgttacaaaaaatatgcttagtatttccaagtttactaaagataataatgtcactcttgaatttgaccatctttgttgtcttattaaggacaagaaaaccagccaagttcttctgcagggacatcttagtgagggtctctacaaactccaagtttccccttcaaaatctcaagatcctttacagcaagaccatgcttctttcacacatctacctagtgcttataatcacacaactacaagcaatccggttcatgacaagtcacaactcaccaatatttggcattgtcgacttggtcatccatctcaagccattttagacaaagtgttaccccaaattgttcccaatatcaagtgtaagaaacttgacttttgtactgcctgtcaagtaggcaaattacattagttttctttcaaatctacttctaataaaactgttaagccatttcaacttcttttaactgatgtatggggtccctccttctatccttctaatgatgacttcaaatattatgttagcttcat

SEQ ID NO: 87301 - DNA, 1000 bp, Cannabis sativa
acttattcactgattttgacaaagttgttaatgtaatccttttgattttataattttaactttatagtagttattttttggtgttttcgagctataataattttagtttttcatcaatgaattatatgattgcaataggaagatctcctagttatatttggaaaagcatcatttggggaagagaacttcttataaaagggttacgtaaaaaggttggaactggtgacaccattctcgtgtttaaagatcctttgctgccccgacctttttcatttaagcctacctctttcaatcattcacattctaatttgttagtcaaagaacttttggcagagacaaggatagggtggaatgtggatttattacgagttttgtttaatgaagctgatcaacaatgtatttgttccatacctctttgcaaatttcctaaagaagactcttggatttggcactatatgcaagatggttcttattctgttaaaagtggatattatgtgggttttcagttaaatttgtctgctacttctctttctaaggatgaattttcaatctggtggaaaaaattttggaagcttcatttaccaaacaaagtattaaattgtaattagagagattttcatgagatacttctgacttcaaaagggctccaaaaatgatctattcttccccactccaattgtcttatttgtggctttagcaatgagtctaatgggcatgctgtcttttagtgtcggggttttagaaaagtttggaagctccttaattttagtttcctaaaaaatttctctttggaaacttcctttcaacaaactattctttttgtgtttgaagtgctgtcttaggttgaatttgaattatttttagttgcaacttgatatttttggagtgagcgcacacagattgttcatggtcgggagcaattttcacccacggttgttgtctcacgaattcataagcttcatgaggaatttagtggaagtcggaaaaatattaacattca

SEQ ID NO: 87302 - DNA, 1490 bp, Cannabis sativa
ccttctaattcttcgtcataagatcctgaaataaacaataatcgggaaagaaagagatacaacaattcaaattacgagtgagttgactaacagaaagcaaattaaaaaataaattatgtaaatgtaagactgatgacaaagtaagaaaaggtgtagaacagtgtcagacacaagaatagaagatggtgatacatcagctaaggtaacaaaagaagtgggactataagactgaagagtgaaaaaagactggaattacttgtcatgtgatctgtggcaccagaattaatgacccactttgaggatgtggaaagaaggcatgcattagattcacctgaatcaacaattacagtgagaaaaggagatgaagaattgagtgattcctgaaacctcgagaacttggcaaatccattcccagaagtaaggaccgatttgtcagatgcatcactagtgcttgcaacattagcaaactgccttcgctaattttaaaaactttctacactcaaatttgtcagacctttgtggatatccccctttttgtccagttgaggtagaagatctcccaggtggattactattattgcgacttaccaaagcactagtaagcagagtagatggagtagcttcagtacgaagaacgcgtctaaagacatcttgcaaagataagatgtcagatctagaaagaacttgtgttttcgcagaatcaaattcagaagagagtccccccagaaagctcatgatagccatctgctcccgctgacattgttgaaccttcacatgactaaaaggcaccaacatattaagttgcttatatgtcttcttgaatgtcataaaatagtttatgaggaattgatcttgtttttccacacgaaaaattctttgccacgcatcatacatgcgggagagattttcgtttctgaattacaaaaattccaaataatccattagttcttaaaaaaattcagtgattgattaccacttccctcattttcaatagaatttcgaatctgaatgaataagcgagcatcctccctaagccatgtcagatcagttttctcctttgaatccaactttggatgatcattagtcaagtgaacatcttcgtcaatattctatagatagaggcaaatagtcttgctccaatccaaatagtttgaaccattgagtttatggtcagtaagtttagacattaccggcaccatattcatcacaatggctgacttatgcctcacacatcaaagcagaacaaagaaacgaagaatcacaccaaaaaatgacagacaaacctcaacgatcgcaaaagaagaaataatggtcgaaatgaatgcaacacaaggtcagaaagatggaaaaggagaaactgtcggaataaagcttctcaggcgcgaggattttgaccaccaaacttcagggatctgcaaatcgacagctgggcagtctgtgggtacccgcggtgagagttcacgtgttctttaagtatgttttccgagaaa

SEQ ID NO: 87303 - DNA, 1224 bp, Cannabis sativa
aaatgtgatcccaatttttgcactctggcatggcatcacacaatggtgacacgtggaatcaacttcacatatttgtttgcaagagatatgccgaacagaacaccacatatatttgcaaggacgaagccttcttaaccgagcagtggacagttcgaacaacatgctaacacttagcaatctaaacacttgcatcgtgaatcacagaggcaatccctataatcctgggatcatattacagagatattgcaagttgtccaaatctcttaattagtgtattctgtatttaatgtataatcctgccaattatatctattgtaaacagaagggaaacttttccctcaaagcttttagccctataaatagtgatctattctcactgggcaaagggtcgaaaaagtcatctaagaatgcatattcagagatattattgtaagagctctaagaaaagcaatcattgcattctttgttcttaagtcaatacaaatcaaggggagtaggctactaccaaactgctcggggtcgaacctctataaaaattctatgtctttatttattttactatattgcatctatattatactacttgtctcttacaattaatactcactgtcgttagccaaaagcgaggtcaacagatttaaacctcaaaatatcaaagaattaataataatctattaaaaataattaaatattattaattttgaaaatttgatatttaagtttaaatgataaaaataatatttttttttttgatatttgtcgtttgaaaaaaaaaaagttcaaaattggttgaaaatatccctaaaaaaacgaattttggtgcaaagcaccttggctgcccacgagataggctgcacgcagcctatcacgtgtgcgtaagggggctcttacagggtgatttgtcgagggaagtcggcatttgcagggtgagaacacgagatttgtagccttttttgtgtctgagcgaggcgtgcatcgtgtcttcagatatgatttgtctgagcacgcgcgcgcggagagacttccttgttttaagcacctggtgcgtgcgagcactatgcttgacacccgtatgcacctgattttcaaactaccataactctttcaatttgaatcgaaatcgagttttgtaaaaactaatgttgcttaatttttcacaaggaatctaaataaattaataaaaatattttcatggaaaaattttgtaaatcacatacattcatc

SEQ ID NO: 87304 - DNA, 687 bp, Cannabis sativa
actacaacgtatccgcgcttcgcgcggtctttttataattgaaaacatcattttattctattattttctatgtattgcctcatatatttttttctctttttgcttctaattaattttactttgtaaatcatgtattctgcctagatcttttatattttatactaatgtcctcttgcaaaatagaagtacaactatatgccttaaatttgaatagatattgatttggaattgatataatgctctatatgtaatttaaagttaaataatatcatatttattagagtcaataaaatttttattatattaattaataatagtaacttatgccacacaccaaattattagctacaatttttattttctagaaataaaaataaaaataaaaaagagactgagataaaaaagaaaattttttaagggtttattcttagcatatagttagggctttttaagagtgttttttttaacttcacatttaaaaattaaaatacatatattttatatttgtacatttatattaatttcaagttaaagttgaaaagataaatgatgtttactaagatcctcaaagttatattaccaagaaatagtattagattaataaataataaagttaatttttttcttttgaataaaattattaaaataaagtaaatgtaaaaatttaaatttatcacctttatttgt

SEQ ID NO: 87305 - DNA, 762 bp, Cannabis sativa
tctctttttgattttgagcaattagactcatttaatgtgtttaactagttaaatttacaatcgacattcttttcttctcccttatagaaatggaaacgatcaaagctcctaacagtatatgaacttgatattaaattgtactaataagagtatgatacatctatatattgttagacaccactatactcttttacagattatggtttacttagtgctattgtacgaagaaacacaacaacacaaatatctcgaaatgtttagtcccaacaaaattttgagttcactttagtacaattaaaaacaaaaacagaatgaaaatttttcgaacactattcgaatttgagcctgaaaagtgataccaattgcagttcaataccttcatgtattgttagacaccactattactttttacaaattatggtttacttaatattaatacacaacacaaatatctcgaagtttttagcccccaacaaaattttgagttcactttggtacaattaagaacaaaaaatgaatgaaaaaatttcaattcgaacttaaaaaatgataccaatagcagtataattcttttacaaattgtcgtttacttaatactactacatgaagaaacacaacaacacaaatatctcgaagccccaacaaaattttgagttcacttcggtacaattaagaacatttttcaggcactattcgaattcgagcccgaaaaatgcatatataaaccctttctcgaattaacaaaattgcataatagaaatt

SEQ ID NO: 87306 - DNA, 639 bp, Cannabis sativa
attacatatttaggatacacagattgtgggatttgtacagcttgccatatctctgtgatacgatccctaatttatagggattgctcttatgcttcacgatgcaaattttgaaatttctaagtgttgatatgctgctcggattgtccactgctcggctagaaggacctcgtctgtgtaggtatatgcagtgttctgttcggaacatctctttcgggcaaatatgaagaattggatccacatgtcaccagcatgtgatgccacgtcagagtgcaaaaattgggataacagctctaaacaatagtggaataaaatacaaagtctaaaatgatatatcttttcacaaataaagatattttggttatatttaaaaaaaaaaattaaacttaaaatcttaattgtagtcgattacaaaacatgatgagatctaaagttatttattaaaatgtagtgtccaaataagtaataagtcaaaatgtaagatctaaaatgatataaatttttcaattagtaatgttacaattagattttcaccctctcatacctctctcattccttaaaatagagtaatgacagagtttgaaagttatcttttggccattactatttttctccatggataaagatgagttattttctttg

SEQ ID NO: 87307 - DNA, 2080 bp, Cannabis sativa
tagtagaaacaggcgagaaagtttcagtgtaatcaatacattttctttgagtaaagctttttaccactaaatgtgctttaaacctttcaatctatcccttttatcctttttattttttaaaatccacttacaacctattgatttaaaaccatcaagtaataaaactagctcctatggagtcaatctcatcatcggtagttgctaaccattttgaagattgtgaactattaagtgcttcactataagtgacaagattcataaaaagatcaatatcattatctccttctccaaagtcaaccatttgggccaaagtcgccccttgggacaggggctcaacccggcccgcgaaaatggtccaaattgccattccaaatgacaaaagcacaattgcgtatgcatatggaccaaggcagatttaaaattttttttttataaagtactcaaaaaataaagaaatattaaagttgttaatattcatctgatcattgatatgagttaatttcaaaatacattattacatacaaacatacataatattaatttcaaaattattataataaagaatgagttaattaataattaacttgattattcatgtatgcatgcagctggatggttgtgttctgtacaagttatactataatggagatgttgaaaaagaatacagtgcaaaacaaaggaagattactactactacaacaacaacaaaagaagagatggcacactacccactgcaacaagcatacattccacaacaatcgccatcaacaaatgatactgaaggtgatgatgatgtatcagtagaacattgggaattaaaactcaacattactctagaagatcaaggttattaattattgcaccatgtttattattattattgttagacataatttcttaaaactggttattaattcttattgcaccatgtttattataattgttgtttccacatcattttaaatacaaaagttaaatattctttcaattgtgtttcctatgtaggatatttttaaaaaaaaattgttttgaatctaataaacattaattgaataactaaagctacgattgggaattaaaactcaacattactctagaagattaaggttattaattattgcaccatgtttattattgttattgttagacataatttattaaaactagttattaatttttattgcaccgtgtttattataattgttgtttccacatcattttaaatacaaaagttaaatattctttcaattgtgtttcctatgtgggatattttaaaattttttgttttgaatctaataaacaattgaataactaaagctacgattgtagattgatcaagttggatcggtttatgtgatactaatgtaacagccctcattagatctaagtaatgatattaggatacattagttgttttaaatattaataatttattatctttgcaatttttttctgcttattttttatttttaaataatgtcttttatagtttagaaaatattgatttaggtatcttttttttattttttttaattcttaaagatttgatttttataatatttgagtgacaaaaaatttttatgagattgtaaaaaattttgtgataacaagataaaatatatatttacatatatatacttagtttggaacttttgagttatatagtaattttaataattttgacaatgaaatagtgatgggaatagtattgtaatgtaatgagttatagttttagtttggaacttttgagttatatagttctagtaatactttgtaagaaactttcaagaaagaaaattattaattaggtggtgtttggttcattgaatgtaatagaaatggtgataggattagtaatgtaatgtaatgagaatatggtaatatgaatagtattaagatattaagtttatttatgtaatgaatattagaatggaatgtaataaatggtatattgacaaaaatatctatatatctattaattttattttatttttttgaaaggaaaatcaaattctataaccttttgtgcctataggatatcctagaaacacgcctttgacagatctagcatctagcttat

SEQ ID NO: 87308 - DNA, 752 bp, Cannabis sativa
  modified_base (709)..(710): a, c, t, g, unknown or other
ggatattttagttttattttattttaaaaaaaaaaatcattaaaaacgtggatgtttgagttttataaaaataataaatttagtaataggtttggtttgtgatatttgaaagtatattattatttttatttattttatcaattacaaaaagtttatttggctaactcatggtatatttgtaatattgctaccttatattatgtattagttttatttattttttctgttatactccaataaggtaacaatattacaaatatactatgagttaaccaaataaacttttatacaatctctccccaaaaaataacaaaaatacctctttctctataaatgcaggggcaacatcatcgcagaagagaaaggaagccaacccgcaatagaaggacttcgacaatgatgaaccaaagtcggcggacgaagaaacttagtaggggtgtttataaaatagtcgatccaattcaatccgcacaattcaatccaatcaaatgcgcaaagtgcggatatccgcacatgtacagattagattggattggattgaaaaattcaaaatccgcacttatgcggattggatgttgattgacatgtaaacgtaaccaattcaatccaatctacatatatttataaaaaaaattaaaaaatatatgtaaaaataatattttaatttaaagaaaatagtaatttaaaagtctaatacatataatacaannatatttcaaaacttaatagattaaatgtatattctattctta

SEQ ID NO: 87309 - DNA, 727 bp, Cannabis sativa
tacccaaaaccaagacaattattcacacgactctcatggaagaggacgaggaggccaccaaccaaagtcagcagacaagtctaatgtggaatgctacaaatgtcataggtacgaacattataaatatgaatgtcgtactaatttgaataaacaaagtggagaaataactaattttgcagaaaaagaagaagaagtatcactcttgatggtgtgccatgtcaaagaagaaactcaacaaaacatgtggtatttggatactggttgtagcaaccacatgtgtggagataagaaagctttttctgagatggacgaatcatttcgcaccaccgtcaagtttggtgacaactccacaatttccgtcatgggaaaaggacgggtaactatccaaactaaaggaaattctacccatactatttctaatgttctttatgttccagatttgaaaaccaatctacttagtgtgggtcaactacaagaaaagggatacggaatttctatcaaagatggagtatgtcgaatcgaagatgcaaatttgggtttaattgctcaagtgaacatgacggcgaatcgaatgttcccactttatctccacaatactactcattcctgcctcttagcgaaacttaaagatgcatcatggctatggcattttcgctatggtcatctgaattttggtggattaaagactttgcaacagaagaatatggagtatgcgagaggaaaaatt

SEQ ID NO: 87310 - DNA, 1156 bp, Cannabis sativa
caatggaaaactcttatggaaaatttgactaaccaaagggttaaaaccctaagaactgacaatggcttggagttttgcagtgatgaaaggtactgtggttctattggagttcaaaggcacagaactgtgagaattactcctcaacagaatggggtagcagaaaggatgaataggaccttgatgaacaaggtcagatgcctattgttgcaatctggactcactaaaggtttccggggagaagctgtgctcacagcagcctacttggtgaacagatgtcaatccagtgccattgaattcaagacaccagaggaaatcttgtcacgtaaaccaccagatctctcaaatttaagagtttttggatgtgcagcctatgcacattagagtgtgggaaaattggagcctagagctctaaagtgtgtattcctaggttaccctgaaggcactaaaggatacagattataggtaagagaaaagcagggttttaaaactataaatagtagggatgtcattttcaaggaagatttatttccttgcattacaaattacaatactttatctagttctactgtagacactaaccctgcaggcacatcagtggacatgcaaacaaggaattcacaaccagacattgctcaggtggaaccagaacaagtggaaaagactcaaggagaggcaaatttggaaggaaatgacgaagttcaggatgatactattcaggtggaacctatccaggaagaaggacaagaagctcaggcattacaagattaccagttaactagagacagaaccaaaagggttcgtagacctacacaaagatttagttttactgcttgggaagaagtgctacctatgctttcttttgtgctatgggagtagagatgacagagcctaaaacttatgaagaagccatggcagataaagatgccaagaaatggtctaaggccatggatacagagatggactctctgaaaaagaataggacctagatactagttaagaaacctaaggggaagagcatagttttatgcaaatggcttttcaagcccaaggagggactaacagagacagatcctaagaagtttaaggcaagactagtggctaaaggattgacatagaaagaagggatagattttaatgagattttctcacctgtggc

SEQ ID NO: 87311 - DNA, 981 bp, Cannabis sativa
  modified_base (903)..(917): a, c, t, g, unknown or other
taactttatggcccataacgtggccaactaggcttatacccataactactatggttatattgatgttgctaccattccaaagaacatttgttgtaacgaccgtaaggtctaatgtcttatgaatgaacgtttcttttcataaaaaaaaaaggcaatcattagttcgtatgtaatggaagcttaagaaagaatcgatgtgtcgcactttgatcgaaaaataatataaaacgtgaaattttcaaaaaaattaataataaaaagaccatttatcataagtatactctttatgtttatttggtttggaaacttatagtgtactgtaagtttcattaatgctcaattaggttcttaactgaggttgttattaggatttatttttctaatttattataaacagtttggcagccaattattgttgattttgttctttgagcaattatgaacttttttctaattttcctattatataaattttatcttttctttaaaaaataaaagaagttagcagctaaaccccatgtatactttaattgttgtacacttaaatcttaatctttttcttttttgtggcataatacccttaactttatttgtatttgcaaatcgaagacatttattaaatttagttgttaaatgccaatttcaattgtcactatgtacacatgtgtacaagtggcaagttttcattagccgaaatcattttaataatttaaataataaaaaataataaaaataatatttaaagatataaataaagttttttccttttctttttagttattaggtttttatttttgaattaataaataaataaacaaatataaaataaagaaagacaaaaaccaacaaaaccgtaattcctaatcctaaatctctctctctctctctctccttctctctctnnnnnnnnnnnnnnntctctctctctctctcttgttgtttcacattctctgaacgaacccaggcatactgtcgccgcct

SEQ ID NO: 87312 - DNA, 2200 bp, Cannabis sativa
  modified_base (37)..(50): a, c, t, g, unknown or other
aattcatattaggttgttaataaaacatacttggtannnnnnnnnnnnnntggtaaaatatttccaacacaatggtccttcaagttgacaccaggaaggttcaactcgtggagggctttctcctcagaattctacgcacaattttcttcttctcgccaactcccattgcatttagaggaccttgtcaaagtgaagcaaaggccaggggagcctttccgaggtaatatcagcaaattcatgatggaggcgacgaaagttgcaaggttaatcgaagaagggaaattaaccgcaataatggggggcatcagagttctcagggagctttggaaggacatcaagggagacagaccagtaaattctataagtgacttcctcgatcgcgcagatggtttcatcaagcttgaagaggccattcagcgagcaaaagtcaagcttaagccaggctagtcacaagttccctcagctggaacatctgttcagcacccctagtacccaagcaattcaagctccggcggtaaaaggactaacaacaacaggcaaggcaatgggaaaaagggaaaaggggaaaattcgctggcaaagacgaacaggtccctagagaaaatccttcaaagttcattactttctctgtcttgactgaagatttggagaccatttacatggctactcagtcagtagctccgtacaagaaacttgctcccattgaaaaggacataagtaagagggacatgtccaagttttgttgttttcatggatattatggccatgacaccaacgaatgcaacaatttgcagcgggaaattgaatttttaataagaaagaataacccgcacgtgcaaaaatatgtcaagaccgatcaaaatcagtgggctgcccagacagacaataatcaagatttactgcgaccacctgtggatgggcatttgcaagttataatttgtggcccacacatagctggagattcgggcaaagcccgggaaaggtatgcccgaaccttattgcacaagcaaaaagaagtggtcctggctgtcgaagaaaggaagccaaaagtaccacgggtaggggaacccaccataacgttcaatgaagaggatgctgtcaaagttaatttcccgcacaacgatccgtaggttgtggaagtacagatagccaacaaaaccgtggctcgaactatgatagataatggagcctctgcaaatatcctattcaaaacaccatatgaaaaaatggggctccaactcaaagatttaaccccctgtcttcagcccgtatatggtttctccggccagagtgttgcacctctagggcgaattcgcctaccccttactgttgggcaagctccaaagagcataactgtaatggcacaatttttgatattggatgttccatcagcctttaatgtcatgttgggccgatcagccttatatgacctaaaagccgttacgtcgatatttcattcatgccttgagtttccaacgaagaatggggtcaggtgcttgagaggaaatcaacaagttgcactggaatgttacaacctcgccctaacaaaggctaaaaaggaagtatcctttagtgagagttcagacaagggaaagacattgccaaatagggaatcgcccaaggcggggatgaagatgtagatccccgacttggggaacaaaatacaaatgttgggctagtggaagaactagaagagattggaatcgacccaaatgttccgaccaagaaactcaaaattggaaaaggtttgctgctcgaagtaaaatcaggattgacaaaatttctaagagcaaacctagacattttcgcatggtcacatgaggacatggtcggaatcgatccttctataatttcacatgccctaaatattgatcctaattttcggcctgttcaacaaaaaagaagattgttggacaaggaacgagccctagcgctaaaagaagaggtagaaaagctacggaacaacattttcataattgaagctttctacccggcctgggttactaatcccgtactagtacccaagccgaacaaaaattggcaagtttgtattgacttcaccgacctcaacaaggcatgcccaaaagacttctttcgacttctcaggagagattaacttgtggatgcaatagcagggcacgagattttaagcttcgtggatgcctattttgggtacaatcaaatcaagatgcatccacca

SEQ ID NO: 87313 - DNA, 577 bp, Cannabis sativa
agaatttcttacaataacaactatcaaagtataataaagatggctcactacaaaatgttgtatggttggaagtatagatccccaattcattgggacaaaaatggggaaagagtatttgggtcctgagttagttcaaaggaccaataaggtaatagacaagatcaaggctcgagtgcttgctttgcaaagcaggcggaaaagttattttgatcataagcatagagatattgcatttcaggtaggagaacatgtttccctacaagtttcactgatgaaaggtataaggcgctttggaaagaatggcaagttaagccctaggtttatagggtcattcaagatactcgagaaggttaggcaagtagcgtatcggctagccttaccaccaccgttgtcggctattcataatgtattccatatttcaatgctgaggaaatatgcatcaaacgtgactcatatcttgagttacaaagccctggaactatagtcgaatttatcctatgaggaattgccagttcaaattcccaataggaaggtgtaagttcctcgaacaagaccatagctttggtcgaagtactct

SEQ ID NO: 87314 - DNA, 630 bp, Cannabis sativa
caatcgaaaatgtcttgcttcaagagcaaatacgaaggtaatcaactctcgatctgtgcctatatttccaatttttgattttttttccttctgtgttttgatgtcgtttatctgttacttacgtagatctgttttgatttggattttaactttcgttcatttctaaacgaccgtcgtttgatctctatttttcccaaggattttgaatatttgatgataagaggtttttataattgaatttcagtttctcaaaccctgtttcgggttttgttggtagtatgatcttttggtagatttattatttgaaaggatgcagatcctgaatttcatattaatgttttggtgatcaacctgaaagcaatatattttatccaaaaacagagaattatatagaaaataaaagtgctcgtagatcttcaatttgtaattttttttccattcaatttggttttatgcacaatcaatcgcaaatacatctggtttacgtttttttaaataacccttaaaagttgaatttttgtcaaagtttatatttttaaattatttataaaattaaattttcaaaagaactaaaagtttggtgccctgatgcagaactcatgagtagtttatgttgtttctggtttggtt

SEQ ID NO: 87315 - DNA, 530 bp, Cannabis sativa
tgcaactctcctcctagtttcttttattattatataataatataaacacaaacatatgcaaacacaaggctatatgatgagataggaattgttagaagagtaactaggaaaacagagcaggtttttactgactcgggaatccgccaatccagaaagaaaataaaagggttatgaaatgactctttcaatgttaatttaattttacttttattattttattaatttatacagattgaatacatgtaaacttgtttctaatgctattgtactgttttatgagaatgaattgataatgtttgataaaatgaggatttgtatgtattttttgtaatttcttctaattcaaactcgcttcaacccaaccactcaccattactagtttatctctttctgccttttcttctacattaatacagtttattttatataatgtttgtcagtcacaaatgactattctaccattttaaaatttcgtattcttgaaaagtcacttttttttgtgacaggtctgatttgggcccaacaaattt

SEQ ID NO: 87316 - DNA, 574 bp, Cannabis sativa
taacctcttatcaccattatgagctataaatacccccaatgatataaagcaagggggatcgatcaagaaaactcttgtaataaatactttcataaatatagtgacatgtggactaaagctcatcaatgcttcaaccacgtaaaaaaatcttctattctaacacccattaattatttcatacaactttgattattggttaccgaaaatctcaatcaatattttggtactttcattgagagttgtagaaaacttacctaaagagaaagtcgtaaataacctcgtggtataatggtaaagacaagaaacacttcacatctacaacaaccagatgactcaaaggacttggaagaggaagaagcagcttctacagtagatattgaagaagaaggagacaccaacaatccaaagtattcatgtctcgacctttttctgtcacgacctgagccctagaccgtggtagatttgtaatattcataacttgggtagtcaaaggtcacactttgacccttgtaggaagataatgcttataaatgatcttttaacttatatcaaaaattacttatttaaaaataac

SEQ ID NO: 87317 - DNA, 634 bp, Cannabis sativa
gttctccctttcttttctcccttatttaataaagttctccctttcctaattttaataatgcaagtaaaaaaatgtaagggaataattaccttacgattgattcccattagttattagtaaacatgccattagctccttgagttttgctggagccattctatatggagcctttgaaataggttcaactctaggtgccaagtcaatcacaaaatctatttctcgttgtagcgataatcctagcaactcctcaggaaatacgtcgagaaattctttaataaccctgactacatcaggctgaaatgttttgggtctgctgaagtctatcacaactgctaaaatcatacagattcactgtgttgtaaatctctagcccttaaaattgagataattgggatccaagacccttaaattgatccaacatagacaaatggatcctcatcctcaagttggaaaattaccatttttcgcttacaatcaatgctggccgaatatttggacaaaaaatccatcccgagtatgatgtcaaattttgttcattccagctctactaggtcagcactcaactccctatcttcgattctaattggcatagacctaattttcctattggagataaccaactccacgctaggca

SEQ ID NO: 87318 - DNA, 675 bp, Cannabis sativa
aaaaactattcttacggatcaagatgcagcaatggcaaaagcattagctgctaaatggccagaaacacgtcaccgtctatgtatatggcatttatatcaaaatgcagcaaaacatctcagtagtgtttttgaaaaatttcgagaattttctaaagattttagtagatgcatatatgattatgaagatgaagcagcatttttgcaagcttggaatgagatgctttcgaattacgatcttgaagataatgattggttaaagcgtatgtttgttgtaagagaaaaatgggctttggtatacggtagagaaacattttgtgcagagatgacaactactcaaaggtctgaaagtatgaataatgttataaaaaactatgttagcagcaagcatgatctattgcgattttttcaacattttgatagattgatagatgatcgtcgttatgaagagttacaagctgatttcaggacatctcaaagtaacttgtcattatcatttcctgctgaaatattaaaacatgcagcaaagatatacactccaacaatattcaaaatgtttcaagttgaggtatgtaatgcttatgattgtgctttatacatttgtgatgaaacgacaatatcaaaaaaatataaagtcactccttatagaaagtcagttgattatacagttgaatactt

SEQ ID NO: 87319 - DNA, 627 bp, Cannabis sativa
aaaaattgtcatttttcacaaaccttctagctctttagtgaaattcattttcagaatagattacctccttactgccaaaatgtctcttctgagtttagaagtttatcctcccagactcgtagtacccagatgcaccaaccaatttccattcgttcctacagacttcaggttgatgaagaattccaagggaagattggcatggtttcgattgaatttgaggaggaagttggcgtggtttctatcaaagaaaccaaccaacttaaggccctatcctgtgccaggagatctttgcgtcagcctctcttcagtgttgagtgatttcttgaggttgggagatagatctcggcttcaggtaatgggatctttcgatgatgaggagaatagggtttgcacagagatcaaggctctctacgtgctgacggtctttctcgtctatatgtagccggtctttctccaagctatgtgtagacggtctttctctctcatcctttgcttaggagaatgactcaatggtttgcccttagtgccatttttgtagccagtcttaagttttccttatcttaaatgccttgtactatttttattcgaacttaatacaattacatttgcttgcgttattattcacaa

SEQ ID NO: 87320 - DNA, 692 bp, Cannabis sativa
agagatcctagatgatgtcgattctgggttggaggaataaaatcacttgatactcgaagaaaatatgtaaaggataacgagggcatgcaatttcagtatgcaaattggttttaagttttttgacttctaagagcttcgtgaatgataatggcagaatagaaggaattttgggtttaatatccaaatgatgaaaatcgtttgattacaatgatgactgatcgaacggatgagaattattggaaaaagaaggttcagtgtaataaatgttgaagtaatgtgtacctcaaaattttgaaccaccaaaataaagcgtgcaatttttaaatgggaaaaatatgatcgtaccctttaagaaattaaaaagttatttctattttcaaaaatacttcttagggagcaattgttatacccatatttcgagaagtaatatggtgctgacacatgtaatgaagctagaatatgaaccaaccctaattatacaataataaatacatttagacaacttgcctcaggaagtacagttagtaagaatattcgaactcaccctcttaaatgcaatggcgagtcacgaataaactattaattgatgagaccggcgacacgaacaaagaaggtcaatttcgggatacataaaatgtacaacagaatgacaatatttggaaatggtagataatgaattattcaaagagctc

SEQ ID NO: 87321 - DNA, 709 bp, Cannabis sativa
catgctaataatttatccaaaatagaggcatgcgtttcattctcttctgtatcaaactcatcatttccatcttcaacattaaattggcctaaatgacctattccatgtaatcacacgcatcactctagccgagtgatcaatatgccctgttaaacacaccaaaagaaagaaatttatttcagattccaaaaccactctaaacagctttaacaatcaatcaataaattacacagaccaaaaaaaaatggcacctttaatatcaaaatgcaaacttttttcagcctacttacttacttaccgcgattatcagcaaaattcgagtgatagtgaagccgggttgcctcaagcatcttcgaaacctcatgggcactctcagaagctttcagaaaatgatcatcaagatcattaaatagcttaactaaattaacacctttaccactcattctttttgcatcccctgaactcgaacccacttgcttcaccttcttcatactcttcccagcagcaacaacagcgtcagcagcatccggaggaggaggcggcggagtatccagaggaggttcatccaccgctacaacctccggcatgggttcctccgggtcaacctttccactactcccaacttcctcttcttccacaatcttaggcctattgtcatacccattacgctctatgtcttctttcgaaaaattaatctcatgatgatcca

SEQ ID NO: 87322 - DNA, 582 bp, Cannabis sativa
tataatattttagtattaatatgaaaattacaacttttcaaaaaacatatatgaaaataacaagtactatatgtattataatatgttttctcggagtattattggatggaaattagtgttgtaaatttgtgtttgtcgtgctagtccggtctatatttatttgtactttttaaaatacaaatcgtgtcgtgcttgctacagaaaaatatgaattatgttatgtcgtgctaatatttttaaaaagcaagcctgacacggcacataggtatggtatttttgtaaccgtgcttggattcgtattgtgctttgctcgtgtcaacctatattttttaaacaggctctaatattcggactcgaattcgtgttgtgctttgctcgtgtcagctcatatttcttaaacatgctagtatgttttcatatttagactcgaatttgtgctttaatttttcatattctttttacaatcaactatatgtatattttgtagctttagttatattcatataacttcttaacaatattttgttgataatcatatgtaaaaattattagcattattaaaatttaaatatttacttataa

SEQ ID NO: 87323 - DNA, 1107 bp, Cannabis sativa
  modified_base (600)..(607): a, c, t, g, unknown or other
  modified_base (682)..(687): a, c, t, g, unknown or other
tctcttaccaattgtgttgtaagtccttttataaaaattgttgaaccaaaatttatatctatatctataactatattatatttttatttatatatataatattaattttaatttttcgggatctctaaaattgtggggcttggggcctaggctccggctgccccaccctttggctcgccatgaacagtgtgatacaaatttgcttcttaaaaaaatatatcatttgttatattgttaaatataagcccatgtaattttctccatcattatttactaataaaacaatacaaaaggattaaccttatatgtaaggccatgtttggtttaaagtaatatagattaatagaattaaaattggtattataatctttgattttattttaatggtaatagcattacaatgtaatggtaattacattatgtaatggaatattaattgttatgtaatgagaattatatcacaaatattaaataaaataaaagtaaaacactcaaatactttattttttaaaattagaaataatttagtgaagttaccacttattttaacaaaaaattaaggtggcgtttggtaatacttttttaatcagttttttattnnnnnnnntagaaaagtgaaaatatttttcagaatcatgttctataaaactgtttttgtttttcaattttttaattgagaatnnnnnntttaaaaacaaaaaaaaaaatcactttcaatattttttttaaatagttttttttcttaatcaatattttggactccgacaagacccggatccaaatcctctcccacggcccttgtgctgaacccgacctctaacccggatccgaatccgaccccggacctagactcgacttaaataaaacaataaaaataaaaataaaaatgaactttacaaaacacacttttattttctgtttttaacattgaaaaacaaaagtggttacagaacacttttttgtttttcaaaaacaaaatttttaaaagtaaaaaatttacttccattttgtgattaaaaaattagaaaataaaagtgttaccaaacggcacctaaatatagtaatcaattctcattactatttctattccattacattactattact

SEQ ID NO: 87324 - DNA, 1242 bp, Cannabis sativa
tatatcaattttgtaaaccaatatgatgaatatattcaatatttagtttgaaaataaaaagaaaattataaacaccattaataattgtaaacatatcagctttaaaaaatgttaattgaccataggcaacaaaaagtattgaaattttaaagcatgctattatcaactaatcaattactttaacagtatgtttatagtatcttgaaaactaatatcaagtaacaataaaaagttatgtttgcaaattattaaagttatattaacaaaattttattattttaaaaaatttattaattattattttcgtttcgtatactaatcagtttgtatattaatgtattttaaaatacatttagtttacaatattataataacatcatatatatatgagatatatgaaaggtaactaattagtaacttatttatgaaatgtcacattttttcatttcatgtgtataaattttttttatatgtatatttgaattatgtgtaaactaattgttttgtatttcattggtgtgtagtttcttcttaagtttacaaaatttatttttattacatgcccaactaattgtggcttgaggatatgacctccattaacgaacacactaatttttgggtcaattttttttaagtttcgattgagctagctattcatgtatctagtatgattttgtctctaatttgtatatattgtcaatagtttgataaataatttcaatattgaattcttgatcgatcttccacattgttgtgaaattatgaagctttttttttcattgatgtaattttttttgtgagaatggttttggtttgtgatttttattttgagttgttacttcatttagcaataattttgtctctaatttggattcttatttgatcttgtgctatttgtgaatgaagtattttttctattaatggagatttatttgataagaatagattcgatttgtaatttgattttctatagttgcagatattattatttttctttcaaaattatttaagaaactaataagttacaataaagtaaaaaaaaaaaaaaaaaactcacataatattttaactaaatttatagtcatctaagttatagttattttaaagtgacgttatgtatcttaatattttttaagatatattttggtaactttaatttttgttgtaagaactaaggtaacaaatataattggtattattagtaattaaatggtttctttgatttcaaaaatagcaaaaaaa

SEQ ID NO: 87325 - DNA, 922 bp, Cannabis sativa
taagaacgttactaagatacgaccatgtaccaatataccacatccactcagtactaccatcgtactagtgtacgtagggcctgaacctcgccttgagtaccgttaagtgttgtaccacatttaccttgtaccttcctgtactagtgttggtaacaccgtgatgtatttaatcaactcaatgcactctgtaccaccgtacaagtgttggtagtgtgtgaatcacaataagcattcatatatattaacaaatacatacattcgcatattcatatcacacattatatacaattcttacctcctttccagattcaagtgagttggccaacctgaatggaaagtctcatgcttgatggatgccctaattacatattaaaatcgggtaaatcacatgtccgaaaccctaattcgggaaacccaagtctacaactcaagactctgttatacactctagggactacactatcttaggaaaaagggaaacacccaactaaggcactgaaatggacaagaattgagaaatctagtttttcgtggaaccttccaaaactagttaatcggtttctaccagtcctccccaaaaaatctccaatttgctcaaaacttgtccaattgcctccaaactttccagagtacctaaatagggtatacacaatatattccaaccagaaaatcccagaaaaacacacagaaactaacacatgccattaaagacctaaaattgagtttcaaagctcaagcctgctcaatttgatcacaacatagcaaaactaaatctagaactcgctatcaacttgaaatgaacttaaaaactgaaccctaagcatctctaaccctaacagccaccaaaacttaaaattactacttgaaaccattacaaccttgagaaaattatagctagagagtatctagggtttaccttgat

SEQ ID NO: 87326 - DNA, 667 bp, Cannabis sativa
ggccttcagcgagttggcacactgcgacaaagttatcgaggcttcggcacacgtaaagcttttacccaaacgagaagcattatcagtagtaactaactccattaaagctgagacaacaaaagacaaagggaagtaaagacactcactgtaggaccaactaccctactccaaacgcatgagaatcacaccccgacaaagatagagcacaaaagaaaatatgaccaactcccacccacaggaatacagttaggaaaacaagagaaaacaaactaacttttgactaaacaaactcactaagatgcacaccccaacaaagtaagaaaacacaaagaaccgagttcaaacagtaggaagaaaaatctaaagaaaaccagagattaatagaagactaatctcaacagaaactcaacaaacattacgatcgaaacacccctcactcatacattcattcactatcacactctgtctctctcattctcactctctctcactctctctcactctctctcactctctctctgccccactcaatacattgttaatggggaccatccttttctttattatctatatatagataacctcactttccattttataataataaaaatatcatgcaagttttatatttatttagttaataataatgttttaaatacatttataa

SEQ ID NO: 87327 - DNA, 850 bp, Cannabis sativa
gtcctgtagataggaaaaataaaagatcattaaaatcaaacaacctaatcatcttcaacataattcggctatttaattataatttggatgattaccgtggagcacagaaccttgtttcccatgctttggtatctcagaacctggtattgatctacatgagctttcaatgccacaaatactgttgttactattccttgtagccccctttgatgcaatatcagctgaatcagtaacgttgtatgcaataataagcattggaaagttccctttaacaaaattcaaaaccacaaaactacaactaatacagaacacacaaaaagaaaataaagaaatgcatgccttgagttgcttgaagattaccaaattcttcctgggatgttattttacttgaagtgggacttatcaacaaagaagcttcatcccatgttgaatacgcaggcaccaaagcatgcattgaagaaggataaactaaggaagcttgaaggggaaccaaaactgaaaatacaagataacccaaatcataaaaacaaaaatacttgtttagcttgaattctaaacaaaatggcatattattatcttctaacattaacatgaacatgaacaaaccatttttggatgccttttgagggtaagggtgtgcagctttgcgcttggggcgtggtggaggaacatgagcaagagtcccgttcttctgcactttctgaaaatatttctgggcatgactcctaatctgcagaagaagatcaattcaattcaaatttcaaatttcaaacccaaaaacgagacaaagaaactcctaatttgttctcttaaaaaactgtattgacatagcttacaaacctgaatgact

SEQ ID NO: 87328 - DNA, 936 bp, Cannabis sativa
aacacttcactcatctctacacctcttacctttttcatcttcatcatcatcacaatcttcttcttcttcttcattttgtctaccgaacatgcccttaatcccaccaaaacccaacaaaagccttctccacaaacacccactctacgccccaacccaatccaacctctctctccaaatcaaagaaaaaatagtctgtctcgaaatcatgggtatcgattcaggcaaagccctagccaaaaacccttctctccacaccacaacactcgattcaatccaatcaacaatctctttcctcagatctaaaggaatccaacaaaaagatctcaaaaaaatcttcggaatgtgccccaaaatactaacctcagatatcgccgccgatctaatcccaatcttcgatttcctcgctcaagatcttcaagtcccttttcacaatctccgtaaggtcatcaacaagtgccctagacttctcgcttccagcgccagagaccagctcaaacctgctctgttctacctccagaggttagggtttaggaatttggagtctctggctgagaacgacgccgttttactggtttcgagcgttgagaagactctgattccgaagctgagattcttggaggagagattggaggtttcgaaggaggaagcggtgggtatggtggtgaggtgtccgagtcttttcactttcagtattgagaataatttgaagccgaaattggagtatttggttggggaaatggagaggaaggtggaagaggttaaggagtttcctcagtattttgcttttagtttggagaagaggattaagcctaggcatttggagattgtgaagagaggattggggaaagagatgggtctgccattgatgcttatctctactgatcacgagtttacacagttaattaaccctaaccagtaaccagtaaccagtaacca

SEQ ID NO: 87329 - DNA, 1211 bp, Cannabis sativa
agaggtcatattgaaagggcagccattaatactccggtccagggtagtgctgccgatgttgccatgtgtgccatgttggagatatcaacgaatgaacgtttgaaggaacttggatggaggctgcttttacaggttaagttcacatatttgcatccttttctcatcagtactattattcggattcctgctcttttattctggttgctatcttagttttgattttctggttttcgttgcgagaaaagtttattgaaattactcttgtttctatctttccttatgaaaatcaggttcatgataaagtgatcttggaagggccatcagaatcagcggaggttgccaaaggcatcgttaatgagtgcatgtcgaagccctttaacgacagaaatatactgagtgttgatcttgctgttgatgctaagtgtgcacaaaactggtacgctgccaagtaaaacatggtgtggtctcttctttgctatggatgaaaatcatcaatcaatcaatcaaggtatctatctgattttagtctctgcatttagaatggaataggctgctaatgtgaaagttttccatcatctaagtaagatgatcagtttgtcactgtcagccataaaaagtgtcactttggctgtgttatatattgtaattcttaaacatgggaagggaagcccagtgttgtatttgtatttgtatatgtatatatggaaatgtagctgtcaaattgagttgttttaatgtaatgtaacttcattgagttgttttttgatcgggtgagtgtgcaaaaataaatcttattaagtataaccagtttggctagaaaaggtttttcttttttcttcttaatcacttaataatttgtcaataaaaatctactttttatgaattgtatacatgaaataaacttaattagcaaaaaacaaaaaaaaaaaaaaaaaaccaattatgctttttttttttctctcacagatttgaagttcaatttcatttagccagccataatctaacattttgtttgtgttaattatagaggaaggaagaagattttcttgcacaaccaaaagtaccagatgatcagagggaggagatgtctcatttcaatgatgacatgggttgatatcgagtccttagcatacacgttagtcttcctcataaaaggaaggttaccctggcaaggttatcaggtgagttgttgctttacgaaacgtgcttaa

SEQ ID NO: 87330 - DNA, 543 bp, Cannabis sativa
gtttgtctatattatacaatatattgtacttttttcttttcttttctttctctctattatttaatacagctttaagaatgtttttttttgttggtctgcagtcataaaaattatttgtttttagaagtttacctacgtctgaattaaaaaagatgtctttattttagaaaagtaatgaatataaaacaaagggtcatgtaatctgcttatgttattattgacagaaaaaataatagggtggattgtattggaattagagaataagtgacttgtttgtggttagagttaaaagttggtagagatttcaataccattatacaaataatcttagttggtatttagttggaggtaatgaaatggaatgaaaaaaaaaataatttttatttcttttctttatttaattgtattttaaatattgaaatattattttaatgaaatatcctttccactattttggtggaaaaaatttaatgattcttttattaatttttttaatatattttaaattttattttattttattctttttttttttttgatgaa

SEQ ID NO: 87331 - DNA, 743 bp, Cannabis sativa
ggtatgagaattagaaagagtaattgaggcctcccaattacctccaattacacagttactatgtaattaccaatacaaaaaatcacttgccagggctatccataaattgttgtggcaaacgttaacttttgtcgacgaaattcctttagctttgctggcagaggtaggaaaaaattttccgccaattatcaggttaagcgcctatatcggtaagttttttcgtcggcaaaaaggagttatgtcggcgaaacaaggttaattcaccggcataagtagggaaaccaagcgccaaaaggcacctattttttggcaagtgaaaagaagttctactgacgcataaactcgccggtaaaagtcccaaaaaaaggcagttaattttctgtaataaaaacgtgtaaagtaaattaggtgggaaagttttgcctacgcaattaagctccccatcaaaactttttatcctagcaaagacctttggatctagttcactcaaaatctttgaaaataaaagtggacaaattttattcaataaaattcatgagggaagctctatatacctggtatggttagtcaatctggtgttggtcccaaagcctaatagaacctggagggtttgcatcgacttcacggaccttaactgagcctatccaaaagattattttctgctaccccaaataaatcagatggtggatgtaacatccgtatatgagctattgagcttcatgtatgcttactttggctacaat

SEQ ID NO: 87332 - DNA, 752 bp, Cannabis sativa
cattactggttgtctccctactcaaacacaactttattctaagcatgtgcctgtgcaattgcactgtcttttatattccaaggaagaagaattaatcttccatgtgatggtttcttaacagtttgcctgaacctgttggaatagatctggtgtaacacttggcatggtttctgtcactaattttggtgactggttgctagaggtgttaagtcgtggtcaacctacaatgtttgaggaagctttaatggtttcttggtccatttggaagactagaaacaactttttatggaacaagaaaattaatgttgcagttgatgttgttgcatctacacattctgtccttagccaatagatttttgctcgatcgaatcgttttgagccgctgcctgcattattgcgtaactacagcagtggtgagcaatggactacaccagatattggttttgttaatgtgaatgtagatggagccttgcttgtagcatcttagtcatttggtgtgggtggccttgcccgtggagctgatggtcgtttgattgaggccttttgcttgcacaaagctgtctgtgttcatccaaacatggtggaggctattcgtgtcaaagaggctttaagttgggttaaaaagaaagaatggcagcacactattgttgaaacggattcacttgtggtggttcaagcacttgaaagcaatgttgaaatgcaatctgtttttggttctactattgctaattgtcttaaactaatcaaatcta

SEQ ID NO: 87333 - DNA, 866 bp, Cannabis sativa
ccttttaagtatctcataagccatttcatggctttccaatgctcctttccaggactagacatgaacctgcttagcacactgattgcataagcaaggtcatgtcaaatactgaccatgaagtacatgatggaccctactacattagagtagggtacttttgccatttcatcttgctctagtttggtcttagggcacattgtcttagacatgtggtactggttggtgaatggttgtgtaacagtctttgcatctttcatagaaaatttttctatgatcttgatgatgtaatcttcttcatgtagcattagtttccctttgtctctgtctctttgaatgctgatctaagttgccacccctatttctttcatctcaaattctaatttgagtagccctttaattttgtcaacatttgtcctttctttgctaattatcagcatattatccacatatagtagcaattagatgacttgtttactttagttcctttgaagtataaagaatggttataatagcttctattgaaaccttgtttggtcataaaggtgtcaaaccttttgttccattatcttagggattgctttattcaataaaaagacttgtcaagctggctcacatatcctttcttgcctttaacaacaaagcctttaggctgctccatataaatgtcttcttctaggtctccatgtagaaaggttgtggttacatctatttagtctatctccatgtcaaactgagtagctagggataacattaatcttatggttttatacttcaccattggtgagaatatctctataaagtctaccccttcattctgtgtaaatctttttgccactaatctggccttaaatctcactggttcatcc

SEQ ID NO: 87334 - DNA, 560 bp, Cannabis sativa
acttaggaaaaagaaaagaatagaaatgactttctagatttatcaagccgagagtgtttctagcaatgtgctctcttgatggaaacttgttgtcttataaaatgaactcattacctctatttatagtgttttgagaatcacatatgaaaattaaagttttttcaccacatagttgttaccaacactttaattggtgtttaatgggataaaaatgttggacaagagagcttgaaacatactcaatcaattcatgtacgtttatggacgttttcaaaaactggttctaggtgtcattacaaaaaattttacttttagtcacaacaaaatttgtaactaaagataaaacagttgtggctgattatataatttttttttttgatgaattagaataggtattggctcaaaaataatgtgtttacaatctaatagcacccaacaaaggcctaataatcatctatacatatatctcaactcttgcttcttctctaaatatttacattattcacaaactaaaaaactattgtcttaattataaattattattattgtgttgtgactaa

SEQ ID NO: 87335 - DNA, 811 bp, Cannabis sativa
ttaattttgggtcaactttgttcaaggtcactttctattgaaagccatcagactcgttgaagaccaatgtggctcaggaacctttttttttttacataacattgctcgagaacttaatgagaaaggaaataaaataacactcagaaagtaaaattgaagatattattgaataaaatatgatcaaattcacaaataaaaaaaagacttagtcctgatattgagatggaatcactccatgcttggcactttcaaatagaccatgttctgtgaagaattcaaacaaagcacatctctaagtaatacatttgcgcctccatttagagaaccaaacaatagtcacatcaaaataaggggttccttaaataaaaatcttaactattttgcaatgaagtataattttataaagataaatgtgtatggtgctttactttcatgtcttacataataaaaatatatgtatatatatgtatgtggctttttttattgtaattaatgataaagtgttcagaataataacaactattttggttggagcatagcaagagtttaagttaaagattgaattatatagaagtgaatatatataataaggcactactaacgtgatcatctgctctcgaattcattactgagctccttaaacattgtctttccagattcaagaagttcagacacctgcaacaaacaacaaacaacaagaatgagaagatcaatttcataatgaatgaataaaatgattattaatattatgtaagtgaaaatagtaccatgttagtgaaattgtcccatttttcaagaatttgagtgatat

SEQ ID NO: 87336 - DNA, 688 bp, Cannabis sativa
aacgtttaacgttaacagtctgttaagttaatcgtgtaagactaaataaaaaaaaaaaaaaaatcgttaaaccaacaattgccgttagataggtactttttatgtataaagattctatacacaacaatatataaattaataagattcaaatctatctgtaaatataaaggaaaacacaaaggagtttaggtggcatcctagatttttttcattgtatttttaaaattttatgatatttttatattttgtttagaaataaagtactataaatagaaacttaaagttccacatggtttagaaacacttaaagttaaggtgttatccatgtgggttatatataacacgtttgttatactacttttctttgtctaataaatatttttcttttatgggtgattgatttatatcttgcctaataggttttaaatttttatttaatatataaaaataaataatttatcattcatattttgataaataattatatctctttaataatttatatatcatcaatcatcaatctatatatctatataatgttgttagggtatgtgaggtggcagattatatgagcattctttctaattttttattttctcaatttttcttattttttttatttttaactattttattattcaatataataatattaattaatacagttaatgatggaaatcaatagaca

SEQ ID NO: 87337 - DNA, 603 bp, Cannabis sativa
  modified_base (574)..(577): a, c, t, g, unknown or other
aacaggactaaaggaaattttccctccaaaaataaagaaaagagggttaagtgttaaataaatgaaacataaggggtttagccacaaatttctcaaatatatatgtataattgagggtgttatgcatgcacctctccttaaaatgggtgcattgatgcacttgtatttgtcttggtattcagaaaaacttttactccaagtttttttatagtcgtgtaagttataattgcttaagacatcctgcaaaactttgaaaaattcagaataatttacaatataaaaagtaatgttcaaacaatatttcacacatgtataaaaataaaagagtcactagtgcaactgacagtttgaaccttatttttagtgtgttaatttttttttttttaaatttctcaaaatttggtaggatgtcttaaataagtatagtgtacacgaccataaaaaaattagactaaaagagtctctgagatgtcgaaacagctagggatacatcgatgcatgacttttagggggtgcattgtagaagtttccttgatagaaatattaaatgtaaatattgttgggttttatgccnnnnataaaactctttacaatctgattagt

SEQ ID NO: 87338 - DNA, 708 bp, Cannabis sativa
gatatggttagtgataggaatgggtgttcttctggggacctggctcattggtggaatgggatgtggaatttgcgggtaccgcaaaaggtcaaaatttttctttggcgtatgtatcttcgggctcttccgactaattcccagcttcttaagcgtaagcttccggttcagccactttgtcacagatgtggtgaggaaacagagactccggaacatgcattagtcttttgttcttctttgtggcctttgtggtctaagcttcgcctttggagggtgctctatcatgggaggtttgggtcgttagcggagttgcttgcttatctttttgaggtgcttgatcataatgcttttgcgttgttggctatggtttggtggtgggtgtggtatgataggaattctgttttgcttggcaagaagcaaatctaggttggaagtgcttgatgtgttagctagggaggcttgggaggagttttgtgaggtgggggtgagttcaggggggccggttttgggttcttcgggtgtgggtgcggctgggtggggtgctgggggtggttgtgatggacaggggtgtcacggtggcaggggagaggtgggccgaagggggatcgatggtggcctcctgaggagggggagtttgtgttgtcagtggacgtggctgtcactccggggcggggttttgcggggttgggaggagttattcgaggccatgcg

SEQ ID NO: 87339 - DNA, 561 bp, Cannabis sativa
gttatcactcttgattatcctctttgccttttcatcccaatgctgcaaaaataattgtggtgttctctcagaggttggcttgttttgtatagcatgttcagtgaaccaagtcctcgttcatgaaaattgaaaaagagaacaagaaataaaggatgaaaaatctttaccccttctgttcttgactgttttggaactcaataacttacaattgctgataactgggactcattttttggtttttaaagacatttttcaaggcagtattaagcctaaagttttaaactttgatggggatatgcaaacttaagctgactgtcaagacaagtttgaggaatttatgaacttgtaaactgtgacaagcctagcagggatatcatgaaagacttaatagtgttagttcatatgaactgaaaaagtaaattttagtatttttacaggtaaagaaaatgttttgatattattgtaactttccatttcaatttctttcttaatctccatgacagagtattttattatattcatataattacaatttaatcggtcggtttgtgctacatttta

SEQ ID NO: 87340 - DNA, 633 bp, Cannabis sativa
gcattgagacacctgaacaaaacgtcattgctgaaagaaaacatcaacatcttctaaatgtggctagagctttgctttttcaatccaaaattcccattcaatattggactgaatgccttcttactgctgtctttataatcaattgcacgcctacaccaaatcttgcaaacaaaactccttatgaaatcctttttgaaaaacaacccgattatactagtttaagatgttttgggtgccttgcctttgcctcaacacttacttctcacagaactaagtttgaacctcgggcaagaacttgtgtgttcttgggatatcctaggggagttaaaggctaccggttatatgatcttaacaccaagcaaatttttatttctcgaaatgttgtttttcatgaacatgtttttctctttcacaaacttaatgctgctactgaaaatgttgatcctttcttgcttattatttttccaaatgatcatataactaacactcatattgaggattatcctatacaagaccatagccttgttcctcctgattctgttttgcagaatagtgcaccagcagcagacattgaagaacagaatgaaacaccagcaccagacgttgaagagcagaatgaaacaccatctgctc

SEQ ID NO: 87341 - DNA, 1490 bp, Cannabis sativa
  modified_base (312)..(315): a, c, t, g, unknown or other
tcacatataatgacttggtagattttgcaattttcatctcaaaggaagccttcatcgcaatatcttttaacgtaaacttcacctcatctttattcttgaattcttgaccaatcgccaaatttgacccatctgtgaaactaaatgtatcttcacttatgagttgattttgttggtctgaatgctccaacagatagtcaaatgggtcgatgtgattttcagtcatcaattcttcatgtgaatggtttagagttggagatgatcttgttgtgcttctgttaagatgatccaaaaattcacaatcgagattaacannnntttcacctggtgcagaagcaatatcacaaatatcttcttcaaagtagaattcacgatcaaagtagttatctactaagggttgctcaattgtgcaactttcaatatccttttcacctatgtctttctttataagctccacacgtagtgcagatctgcaattgttctctccacagtccaaaagataagccgcaagacattcatcccctcataaataagtggcggcatattttctacaagtattacgggtaagtaacttatttttaattcgatgtcattttaattggctccaatcattttattcaatttatccaataacatctcaaatgtagtgctcgaatcatcgacaattatagatataacttccttattttttgacgaccacttatatgacccttgttcatccttccactccccatcgtactgaacatagattactattcgagtcattcttatataaaaaatagatggttgatattaaaaaatagttaaaatatattgatgttaaaattataattaacaagttcaattttcaactaaattcaattaagtgttatcaatgtgtccatcaaagagtttaacaacaattgagtattaacactatcttggtcatgtttggtcaagttagttgagctctattgaaattatcatatctattgaatatcactcttttagcaaacatcgatgaaaaaagtttaacaattaaaaatataaatcgggatcaaatctagttgagctctaccgttacgtctttcatctcgactgacaatagtcgagctctactaaaactgtaatctcaactaacatagtcgagctctactaaaatcaccatcttagttgacatagtcgagctcaaccattaatagtcgagctccctgcgattcatctttaacctcaggttcattttataaaaataggattttcaactcaaaaactacaaaatagtaataatatgagcggacccaggatataattttagggtgggctaactaaaatttgttctagaatttaaaataatattttttttaagtaaaaaaaaatctatactacattattttacttaaatttggaatgaatttattctataaattgaataaaaaaaaataacatctaaataataacatgagattttataatttcttttttattttttatgtaagaacttgtattaattgtag

SEQ ID NO: 87342 - DNA, 543 bp, Cannabis sativa
gcaaactagcattgttgaagcaaataaaagaattgaattaccatagcgtcgaacctcaccaaccacgacccatcattcacgcaccacaaccaacgatctcctctcgacctgggcaacagagagcgtcaagataagggtggcgacgactgtaatcgagcgaaagggagaaagaaagtgatgaaccctagagagagtctaagagtcaagcacttaaaaaaagtagggataagaataaaatttaatatgcatgtaaaaaatagacaaaacaatttaattttgaattggaatagtcattccaccaaaatgatagaaaaattattctattgacattctaatattttaaaatgcaaccaaataaaagaattgaatgaaatttgattttgttccattctatttatttccattaccaccaagcaaatgcaccttaaggtaccaaataatcaggattgaccctgatctttagtagatcataagaaaaaaaaaatattgggccgtcatttagaaaaaaaaaaaaaaaagtattttcaagtgtaaaaatgaaaa

SEQ ID NO: 87343 - DNA, 675 bp, Cannabis sativa
  modified_base (317)..(318): a, c, t, g, unknown or other
  modified_base (453)..(456): a, c, t, g, unknown or other
ttgttctgttttgtgttctactagtgttttaaaaaaacacagtatttttgaaagttaacccaaaatgcagtatttttgtaagtttcgttataattttctcattttttaaccatttatcttttatttcacaaataccatattttctcattttaatcctataaatacaaaaatatttatttaataattataataaattatccaataaaattttcatttaacttatttattattagactccacaaagtcttaattaacaaataaaccctaaaacctcttttcttcacaattaagtcactacttagtgaaaattcataaannagacatagtctaattttagaaatataattcattaattaaaatcaattaattgagtcttacaagaagtattgtctcaactagtatggggaccatgagcctatataaacaattttccaataagtagctctagaattnnnnaagtaaattctctaacttattcattcctccttccaccactatagatttgtaattgcactcttagttatatagagcactctagatgtttcacgatatagatacgctatgaaattatctactattataatcctaataatcaatgatcctttatagatgatctacatttagtagggacaaatttaccgcgttactgtaaagtccccgcttcaagcctccatt

SEQ ID NO: 87344 - DNA, 629 bp, Cannabis sativa
  modified_base (591)..(592): a, c, t, g, unknown or other
aaaaaaaaagtctcaaggcagtataaaagttatttttgccgtgtggcagtatttttgtaaagagtaagttaaaattcagtatttttttaagtttcccataaaatcacatccatttaaaaattagctccatagttttttgagaaaaattacagtaaaaaaagaaattaatggtcataaataatatttatttaacaaagttaaaattgtgatttttaaatttatagaaaattagtgaacttttcaaactcatttgatttttccatttttcttaaaaatgagaaataatgatatttatgcattaaaaattgtttagcttatgattttaataataaaagaaatttctacagtttagaaatgactcattctatatttttatctcaaaatcattttttattttatttacaattattaacataaacctacaagtttaaactcattttttaaaaaaaaaaaaaaaaatcattttttgaattttttttctaagtatcatcttaaaatctattctcatactcacccaaacaaaaatgatttaggggtaatagttgaaaaataccactttcattaattaattaatcaaatttacctctaatnntatatttaattgaaacatacctctttttatatgtatt

SEQ ID NO: 87345 - DNA, 740 bp, Cannabis sativa
ttcttcttcttctttcttctttgtttttctacagaactcccagccctctctttgaggcattaatacaaacactttgtgttctgaacaaagatcaaagactcaaacccatttctcaaaactaaagaatgaatcatttcaccttcccaaacaactgctaactttgctacagccttcagaagaaaggggtaactgtgagtatcaggtttaacacaagaaaaaacatgcatatgacgataaagctcaatagctggcctaggattctcactctcatcataccctctaatcatggtgttccacgtaaatatgttagggctatcaattcgcgaaaaaaaaattgtgagcatacgacattgaagccgagacagatacaatggcggataccaggtgtttccccacaaccgggtcggaaaacagaacaccaagtttgataaaaaaaaaggcgtggatttgcatcaatttgaggttggaagaagcacagatctgtaatagtgatatgcattgtgtgatcggaacgtgcggattcaggttcgccgaattatgaggtgatgaaccatcgaatgtggttggatgggaagagtggcggagaagggtactggtcgtggtcgttatggggttgtgaaatgatgcaccgcgttgcctggagccgtcgtcggaggaaatcgcagacggtgggggactcgggagagagagaaagagagggctgggagttagaaagaagaagagaaaaaaagaaaaaaaaa

SEQ ID NO: 87346 - DNA, 855 bp, Cannabis sativa
  modified_base (303)..(306): a, c, t, g, unknown or other
  modified_base (514)..(528): a, c, t, g, unknown or other
taaataacacgacgaaagaaagcgatttcgacaacttttgtaatgacgtacccctgacattctcctcggtgtcatttcaccaagtcatgttgcacaagatgaaggttgatgttgaggaggattttcacatgcagtttaacattggtcgaaagctgctcagattcggagtggttgagtttgccctcattacaggcctaaacttctccttcgggccaacagaagaggagaaggctgcgcaggtggctccctcagggtcagactgattgatcaacaaatatttcaaccggtctgatagtgtgaagnnnnaagcactccaagataggttcacaaactgtcaaaaccaagaagacttgtacaagcttggcttgtgcttgtttgttgaggtagtgctactgggtcgcgaggctaacgtgttgattacgcctgacatacttagatatgtcgaagatctcgagttcttctttcggattcctttggggaagcagtcattcgccagacttatgcactcgcttcnnnnnnnnnnnnnnnaacagaaggccaactacgagaagaagctgagtttgaatgttcagcatgaatgcaaatacacagcttatggcttcgcacctgcagtacaatattgggtgtatgaggccattttagaggttgggaagaggtattgaacgaatcatgggattcagtttcccaggattcttagctggacgagcaagggtgatatagcgaagaaggacctcagtgcattattctctaaatgggtatgagtttctcttatgtttagagtaattatttaagataaatacttgtaaatattctttgaaccttaaacagcatcttgaagtgatgaaggggctactt

SEQ ID NO: 87347 - DNA, 747 bp, Cannabis sativa
tctcccccacttaattaattaatttgaattttatttcttatttaattacaatattaattttttttttctctctctatctatgcaagcgtttttttttttttttaggattaatatagaaagcgttttattttatagaattaattagaatttaaaaccaaaaccctctctcattttttcctcttattatattaagtctctctctacatctctttgtcacattgtcacaataaaagttatcttcctgtctcttttccatccctctttttctgtcttgctgttatcttcttcaggtccagggtcaccaacaaagctttatttcctcattatttacagttatttatttatttatttttttgtggtaaatcaaaacatgttaatagattgatgaatcattaacttcatgttatttctatgttttatttcgattatttttctcattccctgcaacattttctggattcttaggtctctccctcctaccaatattagcatggtctctcaaagacagaaaaggctttttacaggagttatcatttgaaattttcctatttaatgataaattatacatacttttttctttgaatttttgttaatttttttctttacttgaaaaatataaattaatcaagaatttagtatcgtttgtggattttggttattttattttgtattttgtatttgcacactaaaaaaaggtaatgaagatttcaaatgctctaatatcatagaaggaactattgtaacttt

SEQ ID NO: 87348 - DNA, 639 bp, Cannabis sativa
aaagttgttcaagatcaagacaaggaaactaagagcttaagcttacagctcattgacccacatacttgggaataagagcttgcaactaattgacccacatatgcacacatggagagaataactacattcatttatcttgccctatatacattgaagtaaccacctcgctaataccatcatgataaaagagtactgcgaggagatttatatctatacttagcattttttctacaaagacaataaagaaagacaagttgtacttagcgaggaacaaccagcacagtcagcataaccatttaaggataaagacaaaagagctattgggtggtcattaaatattatcccatgtgcataaaaatgaaatgtggggaatgtccacgtttcatgagcagttgtgaatgattagatcctaaagaaaataagtgtcaccttatacacctataaatagagatagaatccagggtaaaagggacgataaatttgagagaaaaagctatatattatattcattgaggtaattgtactctgtatccagttatcatccctaataagacggactcgtggagtatgtagattttaactacaaaatcacgtaaaatatttggtttcatttcaattaattctgtagtatatttatta

SEQ ID NO: 87349 - DNA, 1167 bp, Cannabis sativa
aggtatatcttcttccttttttctatttaaagcccagcagtttgtttccagattatctttcacctgtattttttttctacttttgttcttttatctttctcttttctgtacctacccatggctaacttacctacttcccaatccacccacttaaccgctgaagaagctcttgtccacgatttcgaccatgtttccatacatccaaaacctcagtcccagtcctattgtttggttgttaagatcttgtctcccaaaactttgaaaattgattggattcagaaagctatgaacgaagcctgggttgcccgatgccccttcacgttctctgaataccattcaggccttttcctggtccagtttggctgtgagggtgatcgtagaagggtcatggaaggccagccatggcactttgatcgatccctcatgatatttgctatccctgatggttttgacaccatccttccctctcaacttcgatacattcctctctgggttcaggtccattttattccatttgggtctcgatcctatggtctggcactgtttgttgccgatgctattggtgatctcattgaggtccatctcatttgactctatgattctgtcactccctttatgcgtgttcgtgtccttcttgacaccaccaagcccctcaaccgtggaatgaacgtccgttttaggaaactatccctcactaagtggctcaagttcctttacgagggtatccaaaactactgctatcattgtggtaagcttgaccacactttcaacaagtgtgataagtttctccatcactgtgaccaccatccttttcctcccagcttaagctacaaggatgccctccgggcccctgccaccttccctactactgctacttcctctccatcccctaactttctccaactcaccactgctcctacttccaacattacctattccactcagtctcaaactgtgcactccaccctccactgctctctcccaactcaccccattatgactaccaccacccttcacactacttccaaaggcaaagcacccatgtacccacagccatccctggtttctctgagcagcccgcctttctccagtctccatatcaatgattcccctgctatcccttcctccaccaggaaaaggtcttttgctaggcagacctgtcaagtt

SEQ ID NO: 87350 - DNA, 1937 bp, Cannabis sativa
tttttttatgaatttgaagcagcctctgctttgattgattatggtcgtcttctcaagtaaagtcgccagaagtaatggtggttttcaatctgtttgaatttttatttcaattatgttgggttgctgcatagttgtgcgatggttgcgcgatagttgccgaggaagcatggatcctaggatgaaggtgtgtgtaagtagtatttgtgtattttttttttatttgggctgtatatttgtttatttgatcaagtggaagtatttttgtaatattgttacttttttttagttaaaattgaaaaaagcccaaattattatttaaaaaaaaaaaactatgaacaatatttaacccttaattaatgttaaactaataatgataataattaataatattgtgatcattttttttcttcttgtatgcatgtattgtatgatacaattagaacatgtctatttttttttttgatatacaattacaacacatattaatcccctaacttcatatatctaatttctaatcttaccacaaggagccaataacatcttgacaatcaatcaccacgagcaatgacttgttacaagtataaatcacattatgagctagtttggtacaattatattttgagaaaaaataattatagaagtgagaaaaaacaaatgtaactaagttagaaaaaaaaatattgataatgtttaataaattatagattttaaagtattataaatgattaagattctaattataataaaaataatattataattttagtttattcaaataaaaaaaatatatattttatgcatttgatagttacaaaagttaaatcaagtttattagagttagtctcacattgctaatgtgtagaaataaattatcacatataagatgaatgtgttactcctctcattgctaaatgctaattggttttgagatggaatcccatacatcttattccaaattctaatatggtattagaatcgcttgtgatccgttgtgagccaaaaaatatctatggtctaaaaagacaagccataaaagagccgtttatgatctattgttagcccaaagtatcgctcgtccataaagacgaggaaaacttaagaactttcccgctttccctttaaacttctatttggaacctttcggtcaatgtgccagtttcaagtgttacgatctttgacctatttcaaaatccataaatttctcacactttttaaacccgaacgtgagaatggtgtattagagttagtctcacattgctaatatataaattgtcatatataagataaatgagctactcctctcattgccaattagttttgagatggaatcacatgtaccttagccacttttattccaaattctaacatggtatcagagccgcttgtgatctgttgtgagtccaaatgtctgctggtctaaaaagacgagccataaaagagtcatttgtgatccattgtgagcctaaaatatcgtcagtctaaaaaacaagccaaacttaaaaacttttgttgtctcccctttaacctccatttgagacttttcagccaatgtgtgccaatttacagtattagagtctttcacttgtttaaaaatctacaaatttcctgacacgtacacacctgcaaattctcgatatttggccttgagagattccttcaaatgttacgtttgaccatgtggtctcttaaaggtcgttcatttcattatacccacgcttttcaagctaaacgcgaggagggtgtattagagtcagtctcacattgttaatgtgtgaaaataaattaccatatataagatgaatgaactactccttctattgccaattggttttgagataaaacctcattcatcttatcttaaattctaacaaattctcatacgagccccagctagtggttcattcacctgaccatacactatagctatttttaattca

SEQ ID NO: 87351 - DNA, 1308 bp, Cannabis sativa
ttttctttattccttcgatttttattctctcttactgactggcttttgtttatggaatctctaattggtgcaatgtcttcaaaaatcgttttatctgaaaaagaaagggccactcatgtcctcactgagtctgatcttcaagttgcacacactaatcctcaattttttcttgtagcccgatgcctctctaatgcctttaacccaaaaacttttataaatcgaatgggggagttttggtctaagaaatgtcgatttgaagttactgtttctgagatgcactctgaactttatttgcttactcttggctgtgcaggtgataaatttcgactcttggaaggggagccttggcattacaacaacttcctcatcattctacactcaccaactgttctacacaatgtctcaaaggaggatcttaacacagttcaattttgggtccaatgtcatcgccttccttttcttagcaaatcccgtgctcttgcttgtaagattggagaatggattggtgaatatgttgatgtgtatgaagactcactccatgaaggttggggctcctttcttagagttcgggttcgattggatattcaacaacctctaatgcgtggtaaaatggtgaaactcccgcatattcatgacgaacattggttggagtttcgttatgaaaatctcccaattttctgcttccattgcggttgtttgggccatccttttgagagatgtgttggcttccttgagatgtatgatgaaggtatagaacctgagttactttatggtcctgaattgttgggtgataaacttcccaaatctggttacgaaaggtatcggaatgacttttccaaggcaaatgcttacccgttcttaactcgcctaaccagaaaaactatcacctctgtctatcctcaacacttttcgcagaaacacttttcccttggctctgcccctcacccgaccctcctcaccaatgttgaatcttcatctcattccatacctgagaaatgcatagctactactgcccctgaacttccatctccatttccctcattttttcaaccttcattacctattaatgcaaatgggcctattgatgaacaaccagctattacctgctcacagatatcttctccaatctctgcaattatgacctctgcccaatctacacccgtagcaacgtatccccctgcctcatcactctctaatctcaattacaaacactcacccatctttgccagtattcccactgctgatgccatagccacctccacacttgctaaagggaaagctatattgataaatgaagatatatcggcc

SEQ ID NO: 87352 - DNA, 1221 bp, Cannabis sativa
ttccactcaggctgaccggtacacttgagcacgaaacgaggtaagatagcataaatattacatatatgtgaatgtatgcttgtgttaaatgtttacgctactaacactgattgttagtatggttttatgggtgttagtatagtgtaggttttagaatagttatagtgttaccaacacgagtatcagggagtacgtcgtgcatgtggtacaacacttagtaactttcggggttacaataatggctctaccaacactagtatagggttggtactttagtgcatttggtacagtggtcgtacttcctttaagaacgttcataatcattcggtgggctcagttgtagagctcggagcggcttaaacataaagctgatatcgcattgtttatatatatgttatgcatatcttactgagtctgttgactcatcaatttgctaccttgtgtaggtaaaggaaaagcaaagctggaggaacagtaagatggagctcggcagtgattgtacacatcgcggcagtgcaacctggaaggtttcggtctttcaatattttgagttttattttgtgttgcttgttacttgtttataaaaaaatcttcaaggtgttttgtattaacaaatatagttttaaactatgttttataactcgggatcccgatctttatagttaagtaattataatatattaaagttagtttgcaaatttcgtattacaaatacgggcgttacaaaatccctcccaaaaacacattcctgtaactttggtcgggttaggtttaaaatatagaaatcacattttaaaacaaatatctaaaaaatgaaaaaaagattgaaataccttctaactttacatgttaacatatttccatcacgaagaatacatgttaacacaatgttgttagtaagtcgcgagaagaacgtgggataatcctcattttggaccgaggtgatgagtgtgtgaggcccctatttgtgtcaagattatgataaggtcgagatgaccattttggtttgaagtgatggaggcataagaacccccatttggtcccaagtgatgatgaggtcgagatgatatgatggtgaggctttagctttgttctaagatgacattttgaggcccttagggccaagataatgaatgttatggctcctacggccaaggtgatgcaaattgtggcccgtagaactgaggtgatgcttgctaagacccctagggccgagatgat

SEQ ID NO: 87353 - DNA, 805 bp, Cannabis sativa
ggaaacatcgacatatcacagaaacagggctcactatgcttgcacaagctaagttggatcttaggtattggtggcatgcctttcaatgtgcaacatttactattaaccgattgccaactccagttattggtaatatcagtccatatgagtgcttgttctcagccacacctgactataccattttaaaaccttttggttgtgcctgctggcctcacttgaggccatatcactctcacaaacttgactacaggtctgaacaatgcctctttttggggtattctcctattcacaagggctacttgtgtgaaaatcagaatgggaggatgtttattgcacgcaatgtcatttttaatgaacatctatatcctggcctttctcccagcagcctcacaactcaggtacattctgcaccttcaacttctagtgttcctactgcttcatttttcactagtccttgtgctaatatacctgtttctggtgttgctgatatacctgtttctggtgttgctgatatacctgtttctggtgttgctgagccattgaatttcgcatctcacactgctgctgcaccagaacttaacccaactactcagcccttgccaacaatacctgagactcaacctatttcttcacctgatcctgcttgtatcattcctgatatcccaactcatgccccacaaatgaccctgcaatctatcccagaatcctcacacactgtctgtcatgacagtaaccattctccagtcaacattcctaccaccacagtcattccaactaccaccagggttcaccctatgatcactag

SEQ ID NO: 87354 - DNA, 546 bp, Cannabis sativa
tatttttctactgtattttactgtcagtgttagtattttacttcactaacagattcttgttctttcctatttttattacttagtgtcagattgttagttgggtttgttggagttagttaaggtggttaggacttagctttgcaccgccttaagctctgctattatataaatgttcctcctctgtttttctcacttactgaatcaataaacaacatttaaatcttgtttcttttccgcattagaattgttattggtgttgatgtaaacattggtttagaagtgcaatacaatcatcttatttatcaaaaaaaaatgttggcttgaataaatttgcattttatgagagatagaaaaaatgataaggaaatggttggaataacactaaagacatataatatatgtatacatatgctttatttaccatgacttagtggttattacttttttttttattatttaagcgtttatatattatatcaacataatttgggactcgaacccaggacctccaatatacacgcaccttctatggccacttgagctagc

SEQ ID NO: 87355 - DNA, 1110 bp, Cannabis sativa
  modified_base (478)..(492): a, c, t, g, unknown or other
  modified_base (714)..(717): a, c, t, g, unknown or other
  modified_base (1075)..(1076): a, c, t, g, unknown or other
ttggaccttttgaaatgcttgagatgatagggcaagtagtgtacatgttggctatgcccccagcgattgtagttgtacatgatgtgtttcatgtttcaatgcttcggatagtctgtctcagactcgtcccatattctaagctatgaagcattggaacttcaaccagacttgtcatacgaggaacaactgatgcagaccctcgacagaagagagaaagtcttgagaagtaagacagcgacaacttgggaactcgagacggatatgcaacagaaatatccagagttgttcagttaaattttgggacgaaatttctataaggacggggtaattgtaataccctaaaatttagaaatggattagcaaatcctaattagataattatgaataattgaggaattatattattatatagttcaatatctgtgaattattatgattaataatatggtaagatcccgttggtgagccaggggcattnnnnnnnnnnnnnnncgagaagggtaaaatgatcaaattaatttaattacgtgctcaatggaactatattatgatatagtctgtatgtgttttcttttcaggtgtgttctgacaggttggcgcgttatagtcacaaccggttatttcgggccgaactgggttcgggcccgaaatgtaaattggattgatttatttggatttataatttatgggtgataatctgaatttttatttgannnntattgagtatgaatttactagaatgctcttgtatgtgtggataggtgaaaattggccttagggacaaaatggtcatttgacctttattttctatacttagtaaaagctgattttcgagggaggtaaatgaattttatgggttgttctctctcaaacccgaaccccgtctctctctttaacccttgttgagttctaacttgaattgaagaaatttacttgggattttgcttaggaagctttgattgtttgtgctagtgtttgtgtaagaaattgaggtagtgttcttactgttttaagctttgaattcttgttgaaattaaaaagaacttgtgagttttaatgtaacaccctaactaanntaggcgtattacgtgattttaaacgtactgtgca

SEQ ID NO: 87356 - DNA, 536 bp, Cannabis sativa
cactgaaaatatctgttactgtcactttactgtcatttttatcgtttaaatattttattttattttattaccaaaaacctaaccattttcggtactaggttagagttgtaatagcttagattaaataagtattttcttcgatctcacgcaattcccatgggttccaccacattcttcaaaatctccatactacaataaagattcgtgcgcttgcgagttgataaatgtaaaacgtaccactttcggtacacaacaacatacttgaaagttgagttactgttttgtaatgaccgctttagtaatttggattagtaaaagcaattagcactaatctgtgttatttttataattatttatgaatttaattgtctgtgggcccttattagggtatttttagcctatgtttcgggtcaaaaatggagtcgttttttgttgttttaggacagaattacgcttgttttctatgtttttaggtttcccatagttgtggacgttcgaggtttcaaaagtacgataaatgtaacaccctaactagc

SEQ ID NO: 87357 - DNA, 961 bp, Cannabis sativa
ctcttccgatctaattttaaaaaataattataaaaattaaaaatatttcttttcttttttcttttcttcttctttcttcttcgtttttctacagctctaattatgtttttgataggtggattttcttttctcaagtgttgagtgatgggattcaagaaatatggagtgaacatgatccaaaataatggtaactttgttcttctttagttaattaataaatttctttatcattgtaatgtttctatgaagatttatcaatgaaaacatgaaagattgaagaatttattattattattattattattaaatttggaaattagcagataattagggtttaattatggatattatttattgatattaaaataattatttatgacgatttacttgaattcagaatgcatttaatatgtcatatatagaaacttcatatttttgcatgtttagtgtccgacaacattggaacgcggtgtatggctcagcagaatcacatcttggtattttagcatagcgaggcggtttagttagacattgggaatgtcgagattagtcgagaatttagagtttttccaaaataccctaggtgatttgtgtgactctttagtatgggcaagggcattatagtctttttgccttttgagttttgtcttttagtgaggatttaatattatgtttaaatctaattttaagtggctatatgctgattattaagcaagtaaatcaactcttttattcttttattgaaaaatcaagaattagacaaaagttgcattttctctcgtccctctctctctctttcgaacccacctaaaggcagctaggctttggttggttcttttgcatttaaagctggttttagcaaggaaatactgatctcaagttattggtaagattcttgtagttttctctttatttccttaagttgtaagaaatgaatttttgcatgctttgaagtgttgtt

SEQ ID NO: 87358 - DNA, 736 bp, Cannabis sativa
tatgaagaaattttttatatatttggtggtattgcatcttctaggtacgttcaaattgactcttcaatttacagaggattatccaaataagccaccaacagtgcggtttgtttctcgaatgttccatcctaacagtaagtagaaaaagcatctaacacatgcattaatcttttatctttttacagatttaatgcaggtgatcactctattaatcaacaaacacccacatagtgtatctttaattttgtactctgtctgttatgtcagtgcagtgttagattgtacttgtacgtcaatttattgtttaccttgtgctagagatagttttccttcttgtcctgttatctaattttgcatatctgttctgccttaacgttatatgatttgaaattgtttttttgaatacataaaaatgatgcaaattcttgctttttaagcgaatgaaaattaggcaatctctttctagttcaaattgaacctatgctaaagtcaaataaacctgtttactataatttgctttagctttgggcctctctaaagttgcccaagctagatgctacttagtgaaaatacatatgaatatgggaagaaatgtggcgctgtgtttgttcattcgtttgctattcatattttatttatatataaatatgtaaatatatatttacatatttacatataaatatgtaaatatatatttatatttatacctttttgtttcttgctcttttgcagttta

SEQ ID NO: 87359 - DNA, 1248 bp, Cannabis sativa
gtcctaacggtaattttcttaagtttaaaggtatatttaagagtgtataattttagggataaaatagtttttattttttttttaaattactaccaaattattacatgctttttttttttttattatcttaatccgatgttattagttgaaaaataagattgtatattttgtgtgcatgacaacttatttttgggtttacctttttaatctttcctacaatttgtgtattaagtgtgtcataaattaccttatttgtttttaaaggtaaatattaaatatatgcagctaaaataagttttattgagtttatttatttacaaattcaaaattttatatgctgcaattatcttatttatttatttgatgaatattttttttttgttttatttttatatcataggttatggatcttgtgtgtatccatcttcattaaggtatgttattattattattattattattaattttaatattgaaaatgttgggaaaaagtgattatattattgagaaaacatgagtctttgtctgttaataatcgaatataataaagtgctcatatgatttgtagcacaatctccataatttatttatttatttttagggtttcttattcttcacgcaaatatttatttatttattttatttatttttggtttttcaatgtgatgaatattagaatattttgagacatgtctctctctattcctctgtgtcttgtctattcatgggtatttgagtgaaccattggatatgtgacacgtgtccataatgaatggaacgtaattctaaaccgtagatagattctctcttctatcgattcaaaacaaaaaacaacctgggattttgagcacattttaaataacattgtactatttgttttggaccgttggattagttttttgggatggtagttgataggaaaatggacggtcaggattgatttgagaggatcagtgtacggtgactgatttagacagtatttggtgactagtaataataattcttctgctttcaaaaaaaaaaagtaataataattcttctgaatctatttttactcaaatatttatatcatataatattccttaagctttatttaatggtccacacaaaaatacactcttttaatctgtttttgtcagactatatgactttgactattcatttatctttgtctaaaaatagtattgtgattgggtattagtagtttttagtatttttcataagtagtgtttcataattagttggcaa

SEQ ID NO: 87360 - DNA, 651 bp, Cannabis sativa
ttggttaaagcttttgtataattctctatataaataaagaggcttctcctcagaaatattaactgaggctttcatacatttctctgtatctctctttctctctttttgtaacatggtatcggagcttcattgacctgcgtccatggcttcttccggcgacaactcgtctcctgttgcagtcaccgatcctcagcctcaggcaccatcagcttctgctactcagcaatggaatcctttctccaattccttaacctcttctctcaccatcaagctcgacagagccaactttcttgcttggaaatcccaagttgttcctacggtaatcggtcacgatctcgatgaaatcttgttcagcaatgtcactcctcctcaaactctactcaatggcaccacgaactctgcctatcttcaatggcgtcgaaaagaccaactactgttatcttggcttcgctcttcaatgactgaagggattcttggcactctttccagttacaacacttctcatgctgtatggaaagctctcgaacagaaattctccagtcagtccaaagctagattacttcaacttaaagcacaactcaccaactccattaaaggtaatctcagcatctctgactatattgataaaatcaaatcaatatgtgattcttt

SEQ ID NO: 87361 - DNA, 908 bp, Cannabis sativa
attagggactcaaattgtacccttgtggggattaattttgggttgcaatgaagccagtgagctatgagtattgctatcaccgaacaagcaccgtatcccgaagctaatcggctcgtttgatcgaaggaagcaaataaaactggaactttcaacaatgcttctttatcttgactcaataattttagtggagatgaccactcacttaaattttgctcctatgatcattaaaaaagattcattaatgaattatacatatactctaaaacttattcataaatatacataacatagttaaaaataatatatatgaattttatagctagttgtgttatgaatttaatacaataacaacaatttcattttaaaaagaattctacatgtttgtaatctaataatatactttccaaacgttactataaaacatgctttgcacaaactattaatattgtgtttattttaaataatgtcccattagaaattttagagaatttttgttaccttgaaattttcttgtttttcccatataataagatctcgttgagagtaactttttttttctattgtagtttgctttagttggtttgatggaattccctatatcaaaagaaaaaaaaaacaatattagctttcataaattactctctttcaatgaattgtcatacattttttgaaaaatgataaataaaaaattaaaaaaaaaaaatgaagtaattattagtcaaaaaataataaaaaaatcttaaaataacaagattaataattagtccaccgataagtaaccaaaaatagtagtgctataattttacttaatcaagttattgaattaatttaaattttaagttgtattaataagaagtttttcaatctagttttctctacaaattaacataagcaaagcatacctagaa

SEQ ID NO: 87362 - DNA, 3175 bp, Cannabis sativa
caaggtctattttgtgggtggccataaacatgctcaacttctctgaccctttcattggagaagttgcggtcagtctgttagctgtggagataattgtttcgttgaaacatccatttgtgatgattgagagtgactttgagacagttatcaagacactgaagggaacctgctccaattggggtattagtaactaactatgtgcataattgtaaacatctatctaacgttttgttaagttgtaatttttcgttaatttccaaaatctgtaattttgcagcccataatgtggctaaatgtgcttttgccaaaaatattactggcattgtggagctatcttccataccaagcaacatcttatgtaatgaccgtgaagtctaactctactttcttttattaatctataaacacttatttttcaaaaaaaaaaaaatggtaataactctcactctcactctaccttaagaggcatttaattccaatataggccttatattacaaaaataaataaataaataatataaaaaatgacataattacccagctacttactttcctacattcgtctaatatttatacatttaagttacttttttttctcctttgtacactaacccccttgatttcatatactagataagtttgacactgactccaacaagaaaagcttaaagttcctaagtaaatcactcgtgcaaacgaacatttggttaataccaaaaatttaaggcttttaaagagattgttattgcttacttagaagtgaaatttgtaacaaaattattatttggggatcaatatactataaaactaatctttcaataaaagaaaccaataataacagaacaaatgaagtaaatactaagtaggggtaatgaaactaacaagacataggtgttgaaccacacaattttatcctcttcatcataaattcttatctttagttatttattccccaaatgatattgaacactatatagaagtgcttttatgtcaagcagttatgatgatggattggattggattggtgggtgtcattaatcaactttcacttctaaaaataatggaaaccattttttcttttgatacctttatcctcattgttcttttgtccttacttcacatgatacttagcttaattttcctattcttattgggaaagaagaacttgccatgtgaatagagataatgtctttttcttttttttcatattaattgggaacaaacactaggaggaatctttcacaataattgggtagggtgaccatttttgcgcaccactacacactactaacattctctctgttgctttacactgttggaaaatcaaggatgggctgaaaaaaatgaaagtaggcccaccaacggcgcattaatgtaagttgtgggctcagattcttgaaagtaaggcctcgagtcaggaaaagcatctgagctattgggcccacccacgaccgctccaactaacatatttggattaggatttggactcagaaaataacgagaccctgctttacacccaatatgggccggatgggcctgtacggacggtaaagaacttcccctgtggtgaatcctttgtgggtaacgtgggccatatccaaccatgtaagacattctcaatggattatctcctagaatgtagtccacctgtaaccaatcaaaaagaaaaagagttatttatagccgttgattttgtagtccttaatatctggggtctagactctaaactcactcacctgacgtttagccaattgtttgagtaaagcaggagaagctgaggtttcgccacatggcacaatcttattggagtgactcagataattagagtaagctagaagtaagaatgacagtgaagttacatgttgcatgttgctccctccagccttaaagatcaagccacctttttatataaatggaaaaattaataaaacataattaatgcaacttaattactcaaaatagtaaaatcaactggcttagtggatttaatataaaaaagtttgtcgtttgtcccattataattaagcccaagattttggtaacagagaaaatggcaccaattatttattatatcttaatgatgttttttatttcttctatatttatatatatatatatattacctggcgaatattggacttggggatgagaaattccaggtaataaagaacagataaactcatcagcattttgcttaaaagattcgaaatagtctgctcttccactcaatacttcctgtatagtcaagatttttatttcaaaaacaaaacaaggacataactattttcaatctgacacacattgcctcagtttcaaatgccatattcaatgaataaatccattatttatgatgaaacaaaagcaaaaataaaaacagatatataacgattttccatacagtaagtcttagcttgtctacacatacaaaaagtcttgtatagccctatattaatagatatagagagggttttcttgtttctataaaggaaatatgaaaaagctcatttattatttaaaggggtcaaaatcactgtgaatagaagtagttctgaagaaataatggccgagtatgggatgaaccgaagtcccagccttttggcacatgcaattcatcagtgacactctgattcatgggcccacttgggcatagactataggccaaccccaccatcaccaccaattctctctagctcttttcttttttaatattaggatattaacaaaaaaccaaaaccattttgctagctagaagaagattagtgcttaattatgtgaaatatacaaacattttttaatcaaatcatgagattttattaataaacattagttataagaatagcttgcaaccccatcatgacaatcccccaaataaagaacaagaagagcaagccaaccaataaatcactttagaaacatttcgaactatatgagtagcattatgttaattatgtagtaataatgtttagatttagaataaaagaagcaaaaacattttgaactatattaatagcattatgttagttatgtaatattaatgtttagatttaccaattacgttattaatttttattaatgtttagtgtaataatgaaccctttagttttgacttcaaaatgactcaattaatactcatatgaaagcctaattaggataggaggcaaaataatgaaccata

SEQ ID NO: 87363 - DNA, 924 bp, Cannabis sativa
tatcatgtcaaatatgatattaggtatttatctgtaattaccacttgacatccaaacacaccttgtattttaaaatacaatgtaattactatatagtgtaattactaccctagtaattacactgcatagtaattacatagttgtttccaaacagaccctaaatgtccttaataaccctttcaaattcagtgtggaagaactgagcacattgagtttgtcttgaagtataggaaaccggttgctggagattgtttagtgagacaatcgcaacttgatgtttaaaaggcacatgatgcacactaatttctttgtggatcactttgtctaatctcaatatgcttggtcctaacatggagaataagatttgtagcaagcattatagaacttaaattgtcgcactagactgtaggagttaagggggacttgatctacaacttagtgagaagagattgtatccaggtaagctcagagacaagacaatagctgccaaacttcgaaactaagcttcagttcaagatcttgagatggttgtttgctttctaaactgctaaggaatcaaaatttcaccaagaaatctgcaaaatccagtagtagacctcttatcatcaaggtcaactcccaatcaacatcacagaaggcttgcaattgaagagaagagcttttggtcaagtacaaaccatagtcaagagtctttgctagatatctcaatattcttttaacaactaccaaatgaacttgtaatggattatggataaataggcagactttattgatataagctatgttaggtcttgtgattgtggcatattggagtgccccaacattgagagagtcttaggtcagaattcatgggagaattttaagtattgactctttgcatttgagctctacatagaagatcttgaaagtacttttgttgagaga

SEQ ID NO: 87364 - DNA, 1346 bp, Cannabis sativa
acttctatccacgcactagtacccctgcccctctcccatgtgtaaggatatccacaaagatccatgtctataaaactacaatcttccaacatgtccccgaacccttcaataacccaattgggatatggattaccacctcttttatccgattgagaagaaacattgttaagatcaccgataatacaccaaggctaggtgtacttggtcttgagatagcgaatttgatcccacgtattcttacgaagacttttatttggttcgccataaaatcccgtaagacgccattgaactccttcactacccgagacaacaacatttataaaattgtccccaaacccaagtaaattaacatcctcagtatccttccaaaacaacgccacacctccacttttccctctacaatcaaccaaaaaagcaccctggaaacctatagccaaccgaactttctcaatagcatcagactttgacaaagtctcacaaagaaacacaactttgggctgcttttggataactaaatccttaatgaattgaatagctcatgggttcccaagcccatggcaattccaagacaaaatactcatgatgattggtgggcctgaacaccaaggcccacctgtacaccattttttgacatagcatccaaattgtcaacaaagcccacattactttcatccaaagcaatggaatccttcagaatttccttacccatgtgccttcttttattgtccacaattaccacagagtcatcattttgactttccaaatgcatctgatcattatccttattaccataattatcaatgatatcactctcttgattctctccaggaaacaccttgattcactcctgttttcattcctgaattgcctccatcagatcgcaccattgcaggagaattaatttccatatcctccacatgattctggtgccgtcctccactagtagccgctcctccttcctcctcatgattggaccgtagccattgagcccctatgagatagtttttcttcttagtaatggctttcatccactctccataaggcttaacattcggatcaaagtgaggctcaaacctccggggacaaaacctatcactatgaccaatgagaccacatatgaagcagaaagtgggtatgaattcatacttaaaagtggtccaaatccatgttccatcttgtttaatcagtttcatacgacgcttcaaaggtttgttgatgtcgattgtaacccgaatgcgaaggtaatcacgccatataccaataaagttcttcgcatcagatttgatgaatgttcccacataattcccagcatgtttaaccacccattccgacataaaaccatactt

SEQ ID NO: 87365 - DNA, 672 bp, Cannabis sativa
tattacccatataaatattagactgtgtaatcttttatgtttaattttgtgcattcttatgagaaactcgcactttaactttacataaaccatgtgagatttttcaaaagtaaagaaagaatcaaataacttttgttttattggtacaatttttttttaaacaaaatgaaaaacaatataaacatcaactaaatttatttacactttactttatggactataaaatatatatattattgaaaaatttacataaactactatttttgacaaactttttacacatttataattaaagatttttttttttttatatttttacagtatttataaaaataacactaaaataataataaaatacatgaaactaatagaaaaacaacatttaagcagcataaaaaaaagtaacatacaaataacaaaaaaccaactacaaaataacaagagcacaacataaaaaaaaaatcaaaagaacatattttatgtaaataaaatcttaaaaaccgtaaaaatatttaaaattctgcataaccgtatttttgtaaatttttttattgttttttatgtttttctaatccctatattattacagactataaaatgaatgaatttcaataattataacaaattaattgagacaaataaaaataataaacaaaatgatttatttataat

SEQ ID NO: 87366 - DNA, 673 bp, Cannabis sativa
agagagagagattggatttgagttttgtaagaaaaatcttctgtagatgaagaagaatcttgggtgtaagtgtgagagttgaaacacttgtgaaaactcatcagagaatttgtctccactgttttgtactcgttcttgctcaatcaataaagagtatttcggtagtgttctagaactagagtaaagccatagatcacatcaatctataagacttgaactagtatatattttggtgttaatttttttatttttctacatttactgattctggttttccatactattctctcctatttttcattcaattgttgttcttgatatattaattttgtcattgctaattgtttaattatttaatgttttaataatttaattctgcactattaatcataattttcatgtaagtattttatttatcatgcagtgattgttcaatgaaaatacgtaaaagcaacacaagtctaactatgtaaccaacataactaactgtgacacgtggcatagttttttgtgaagcattactaaacatttaatctgactccctaattttagtatattgctaaagaaacaattacatcagcctcagcctacagttcccctatcacaaaattagtttagtaaatttaatattagtagtattggttgaaacttgatttgcaatctgtggatgcgc

SEQ ID NO: 87367 - DNA, 626 bp, Cannabis sativa
agttacaaataaattggtccataaaagaagatatatgagtgcatggtaagattgattgcgtggctagcattaagagattagatctcattaataaatctttgaagaccatttctttccaaccaacatgcatgactttgatgatcattattcttctaagtattccacaattatgctacaaagtaggagcgtggatgatatagttagagaattagtagcatcacgaattaggtggtaattaagttactgtttgaaatggagtttttctctctaccgttgaattaatccaaagtgttttgagcatgaaacatatatagggctgccatgtggatttaattaaagattggttcaatagttttgttataacttaattcaggagtggagtgtggttaaactaactagagttaagtccaatcaaaaatctataaatagagctatgtagtgcacttatttcctcactcatattcaaagaagccatcaaaagtctcaaaccacactcttactaaattttatatctaaaacattcattcttgagccctctctctaccgccagctatagtcactttcttctaatctcattaatcacttgtttcttgaaaagccaaaagccaaaatcactacaccaccat

SEQ ID NO: 87368 - DNA, 729 bp, Cannabis sativa
tgtctatttttttaattttagtaaacgtgtgttcaaaaatttaatgtacaccatatgcatataaattcaaatttccaatgtataatttggtgaactataaatattatgaatcttatgccatgtcttgcttttggctacctgccaatacatgtcaaaaaattgaagttcttattgctaattttttgtggaattttatagaaaggaaagtctaaggtgtattgaaaaacttggtcttctttgtgtaagtctaaatttttaggggtcctgggttttagattccttatcaattttatccaagctatgttagctaaataagtttggaagatactattagggtttatgccttgaaaagtctataaagatatttttgattattaataaaaagttgaacattatgatatatgcatgaatgttaaattattgatatttattattgagtaatttgtaaataaatatcaaaaaaattccttattcatatgtgaggtcgtgacttgtagatgtacagagaactaaaatcatttagataaaacaccgagtaacttattaaagttattaaatttttaatcaatggttgctagtatgattcattaatgcccgttctttggtgcaagtaatctcggtttggattaccgatgtagtatgacaacaaagtgaatgtgttttatataatagagattatatatgacaaggactaggaccgatatgaacaaaactttctttacctaacat

SEQ ID NO: 87369 - DNA, 1169 bp, Cannabis sativa
aaagtggaagcaaaagcaagacaactaaaaactttaaggtggtcataagtatgagctttcttatagaggacttcaaaggaagtctttttcttaagtaacatagatgaagtgcaatttataattaaacatcagtatttatgacataactctaataagataaagataaattagattgaaataataaagctttaccgactttaagatgtgttgatgcttgcgctcaacaatagaattttgttgaggatgaccaatgcaagaattgtgctttgtgattctttttatagtgtaaaaagtagtcaaattcagttctttagtattgtcacaacagactgctttgatggagattgaaaattatgttgtaataagcgaaaaaaaattagggaataataaatgagacatcagatttagatgttagcatgtaaacccaggtataacgagaaaaattatcaacattagttaaaaaatattgataaccttcaacactaataatatgaaaaggtctccatatatcaaggtgtattaaatcaaaagcagcaatagcaaaattataatcaagaggtttctcacaaaattgtaaatatttatttaatatagtagtaatgttcacagaagggtgaccaaggtgaagatgccaagggtccttcaaagtacaagaggtgtttgcaaaatatataaatagtagaagtgagaaaatgacgctcatgttaaaaaaaatagcttttaactttcttagttgtcccaatcgtagaagtcaaggagggatccagaatcaaatattgattggaagtaaatgtgagtttattaggacaatattcaagataagcattagcagaaaattaattgaacttgaattcaagaatatataatacatatgttcatattagtttattagatattttcacggtgccagatttgttgatgtgtatttgatggccattaggtaaagtaactaagttagcaacatgatttttatttagagatataaaacaatgaagagaatgacatatatgatgagtggctccgctatctacaattcatataaaaattagaaaaattttagcactaccaaagacgttaaaaaccacaagaaaaccttcactggtggaaggagcgccttggatttgctgactgagaagcgaaatcagttgctggttgagttgtagttgaga

SEQ ID NO: 87370 - DNA, 763 bp, Cannabis sativa
  modified_base (27)..(35): a, c, t, g, unknown or other
aaaatagattacattgaaatggagttnnnnnnnnngcataaaacccaacaagcaaaacaatcaaaaggttagttaaattcatatcatgattatatataaaattaagagataataatagcaaaaaaaaattattatttgctctcgttgaccgttcatattcaaaatagataaattaatctattaggcttataaatatattgatactgcctttattaatttcatttttcttcaaaattctaactaattggaaattaaaattccattctatttgtaaagtttaaggtttagttccattctgggacaagaaataattatttcattttcactttattttctttactttgtttgaaaactataaattaactaaaagactttttgtggttgtttttttaaaaaaagttataagaaagaaaatacatattatttaaaaggatcaagatgagtagttgtgaaaaagatgaatattaggaaaaaaattgattacattgtttcctaagaacttataaccctaaccctattttcatgtaacaaaagaacatatgttgaaaaatcatagaaaaattaaaattctatacctgtgattacccaaagattctctttgaagatcactccattagtttcccacattgtcccaaaatttgtggccttcattcattatttgattccaaataataaacttgaaaaaccctttagaaccataaccctacccgttatttgaagaataagaaaaaaaacctctaaaccgttcaggtatagcaagaag

SEQ ID NO: 87371 - DNA, 1205 bp, Cannabis sativa
ttcaaactgcatttttttgtggtgtggtgcgggcggtttgagcggtttgaacggtttgatgaacacccctagtctcaggcaaaaaaaagagtagtttttctatctctcaactagaaaaaaaaactggttaagagaatcgatcactactattgaatcgctctccataatgatgaacttatgctctttgagttttaccgtgtcaagtactaagagcacgctgcctccttgctaccacccgagaaatccaacctaacgatcgaatagccattataacccaaaccacctcactagattggtttctaacgaccacagcgagaacttataataatgttaatgaaatatatttgataatttcataaatagagaactaattacacatgcacgtggcttctctggacaactaaattgccaatgaattatatgctaagtgggtcataagaataatgtattatttttaacattagtaaaaaaaatgtgtatttctaggaaggaaaaaaaaaacatagacacatgtctagtttgtttatgctcaggatcagtctgtgtttaattaacatattatattattattgatacagtactatcgagtccttatataattaaatattataatttttataagatagtattaaataaatataaaatatcacctgcagatggggatgttagataatactggtaattattttggtaaattaaagaggctagggttttgaacaagattagattggaactttattttgacccaaacaacgtgtgtgtaatagatacatatagatacaattgatctttttttgggttcggtctacttcaacttcaactacaggaatttcgttgaccaattctatataacccaattcaactatatgcaactttttgaaataaaattaaaacgatattttgtattatattttctttatttattatattattataataataatttatatttacaaggaaccggtccttaattaattccaaattattattttattttattttgataatagagtgaccttgtagtcagtggcggaactagacaaagacccgaggaggggccaaataggaaggtcaagcgaattgtatttttacttacttttcttataaaataacaacaaaattaggctatttaaaaattttataaccttgaactattacaatgatcgtatcgtaccccttgaattttttttcgctaaaacatgtca

SEQ ID NO: 87372 - DNA, 1002 bp, Cannabis sativa
ttagtaggatcataatcccacttacctatttaactcataatataaatataaaccctaattatttaccattagacttattgggatattacattaacacttcccccacgccacagaagaataaggaggagaagtacacctgcttcaccctcttgatagagaaaccttaggctatcttcatggccactcagggaacattcctgtaccaaaagccctttcctattagaaaggagatgggaagagggacatgtcaaagttctaatgctatcacaatgacctaggccatgacaccaatgaaagtcaatatctgaagagggagattgaatacctcataaggcgtaaaaatccccacctgaattcttatatgcaagacgacaaaacccaggcataaggagcccagaacggagatctaatgccaccacatgtggcaggacacctaggggtcttcattggcggaccccacattgcaggcaagactagcaaggctagggagcgctatgcttggacactccgtcacgagcccaaaagtgatatcctatctatcgaagatcagagctctaagcaacaaaaacccataaagcccacaatcttcttcagagaagaagatgctgctcaggtgagttttctacacaatgaccccttggtcaatactgtacagatcgagaacatgaccatagcaagatgcatggtggacgtcagagcctcccccaacattcttttcaaatcaaaatatcaacagatggggctccaactcatcgacttgccaccttgcaaccaagtagagaatggcttctttgaccaaggcattgcacctgtcgggtaaataagattacccctcacagttggaaaaaatccaaccaccacaacactgatggcacagtttgtggtgatcgacattccttcaactttcaatgccatgataggccgacaggccctcaaggacctgaaggcgataacaacttggccctgtccaaggccaaaaaagagaagatgcctgccaaaagt

SEQ ID NO: 87373 - DNA, 1190 bp, Cannabis sativa
ttgtccctggctgttgaattatttagctcagtacacaaaaaccatgccttgcacgatagtatgttgtgggagataacctctaaccttgtgcataaaataacgtactaaacgatcacttagttctcaattttaaccagaacactcctaactatattaattttcaaaatacaattttgtatttttattaatataaattgatgaattcaacaaagtatttaataaatcacaagagaattcgattgtgtatatgtttcacatttgaaatatatgccatatatattaagttataaaagatgtaatataaatttgtgtatatataaataaagagaaatgctaaacgacgtgtcaaacaccaaaaaaaatatcataaaattattattaggataatttaatatcaaatcttaactattttttatttaataaataacataaaatatactattatattatattatattatattatatataaagggtcttaattaattacacttgtgttggaatgggcctgaactttcccgttagtagtatgggcttgaagtctcctcgaaggcccagcccataatgtttttaattttatacaaataacacttaaaataataactataatattatttttggtgttataagcatatgactattatatttctcttagaattttaatcaaatatttttgcctagaagaagatatatttcaatatggtaagtacacacattgttaaaaagtgagataagaaaaagtttcaccacctaattctactattatactaaccaaattaaatcttactttaccaagttgatagaatcaaatctccttagacctctccatcattttttgaggttgatttttttttttttttctatttatttaaaaattaggtttgatttaaattatcaaattttgtgctttaagtggctaatggagacctttcatttaagtttatgccaaactcaagaaataattatatttagaagacaaaatctaaaagcaataggcttggttagacatgacactttttcttattagggccacaattcacatgggttaaaatcttgcttttaaaatcacaaacaagattcttataaatgttgtctgatcttttgcttgctttaacagccaacagacacaataaaaagaagaaaattaaattaaaataaaaataaataaataataatggagttccaaaattt

SEQ ID NO: 87374 - DNA, 630 bp, Cannabis sativa
tgtgttcgtggagctactcatggggggcttactaaaagaggccacccgagtaagtgtcttcacttttgtttttctcacatatgctttaaactgtgcagactttaatcttattttattgtgcagctcaatctgaagatggcatacaattaatcttgtgcccagtctgcagccttgaaatttacaaccaccactagcaacttgaaaaaggagatggaggaggccaagaaggatgccgagctgaagagtattcaattatgtgaagtcaataagcaactcttggatgctaacaaactcattaaagacttgaagaaggagagtagtgacatgccatccatcgttcagcttgaggcagacaatgaggctttgccaaaggatgtaaattctcttaaggatgagaggggactctctatactattctcaccaatctagagaccagagtcaatgatctaactgagaaaaagataatcatgtaggagatccttgattttgagcggacatcttttactgttgaataggatgtccttccaaaggaggtggaaagtttgaagacaactgctctggacgtcttctatgagttttggagggctaatccagaggctaactttaattacctcaatgagaaaaaggagg

SEQ ID NO: 87375 - DNA, 834 bp, Cannabis sativa
  modified_base (580)..(588): a, c, t, g, unknown or other
  modified_base (679)..(680): a, c, t, g, unknown or other
ttgattagcaacgagctgcagagtatgtttaaaaatcacgtaatacgcctatactagttagggtgttacaccatttccttctcccgttttataaaaaatcaaaagctttatttttgaagaaaggttctattcctcttgccctctctctttcgaaactctcttggccagctagggtcgggagttttcattgtgattcaagtgattttcttctattgtttgtaatctccaagtcaaggtaaggtttttatcaacttcccttttgatttcttgatttttaaggaaatggttcatgcatgttttgtggagtttagttgctgttgtggctgtggttgtttgttgttgattcctgaagttagaatatgatttaatatgttgattcatgcaagattgtgttggtgtttgttgatttttactaagtgtggaattttaaacccaaaactttgattttcaaggtaatttgatgattttcgtggctgtagctgttgtaattgtttagcgttgttttcagagattatattatgcatatttgagtagcttaaagcaggttttaatgcatgtaggtgagctttagccaagtttnnnnnnnnnactcaaagcttggagctcacatgacatttttcatctctgtgatttctgggttattttgatgctttagaaatgtttattggggtatttagannaggtctggaagttttggtgtgatttggggatgaattgagcgagttatgaatttttgtttgtttcctgctcagaaccggaattccagttcagcaaccggaatttcggatggtgtttcaggaattcccagaaccggaattccggttgctgaaccgg

SEQ ID NO: 87376 - DNA, 561 bp, Cannabis sativa
tgtccctcaaatcaccaaaaatctcattagtgtctcgcaatttgcatctgataacaatgccttctttgaattctatcctaaccattgctttgttaaggatcaggattccaaggcagtgttgatggaggggcatcttaaacatggcctttatgtcattccttcttcacaaatgaaatttcaaggcatcagtcagtctgtcttaccaacagtttcctactctgtcaataatgctcaaaagagcacttgtaatgttgctcactgttctaatttttctctgtggcataatagactagcacatcctgctgctagaactgttaaacatgtaatgtccctttgtaatgttaccaattcgaataaaattgtcaatgatttttgtgatgcttgttgcaagggcgaaattcacaaatttcctttctctagctctcaaacagtgtacacgaaaccacttgaactcatccacagtgatctttggggtccttccccaaaactctcatcatctggttataggtattacgttcacttcattgatgcctataacagatacacttgggtgtttttact

SEQ ID NO: 87377 - DNA, 776 bp, Cannabis sativa
attccccaacccattcccattcccgatccccattctcattcccattcctattcccattcctaaacccatgcccattcccattccaattcccattcccatgcccgttccccaaaccccgaaaccccaaatgtaaaaaccctaaaaccccaaaccccaaacctcaaaccttaaaccccaaatcccaaaccccaacccccaaaaccccaaacccgaacaagttcatcaggtcaaattttctggatctcaacccgagaaggtactcttggagccatcttgcccttacctacctttacaggtgtcgatggctcacaagcatgctcgcaatatgctaccaattattggcgccactataagaccttttaacaaaatgactggaaattaatcaataggcacaacttctaaaacttgatggcaaggagtgttgatctcttgcattcggttagtggtagagagactacgtgacaacaagttcatcattgaagctttctacccagcttgggtggctaaccccgtactggtacccaagcccaataaaaaatggcaagtatgtattgattttaccgatctcaacaaggcgtgccccaagaactattttccactcccaagaatagattagctcgtggatgcaagaacaaggtcctaaacttcattgatgcctattcggggtatagtcaaatcagaatgcatccaccagaccaagaacatacatgtttctaaatagatatgggtctgtactgttacaaagtcatgccgttcgatttaaagaatgctagagc

SEQ ID NO: 87378 - DNA, 519 bp, Cannabis sativa
tctgtgtgatttttccctgtccctcttcactagtggttgttgaggatatttcatttccattcccattaacccaatttctttttcacagacacaatatttagaataggaaatataacccagaaatagaccattagaacaaaaaaaaaaaaacctaaaacaaatcagatccatggcagggttcaaacgaaccatgagccgagatccacagcgtgattcaaacgaaccccgagttgagacccgtggagagcttcaaacgctgtcacctgagatctctgtacaaaaaaaataaacactgtcaccacgggccggagagagcgagagagagacgcacgaaaaaataaaaattagaaaaaacctatttaccttcagcgaggagcttcgtgcgcgaaaggagaatgagagagagagagagggcgcgactgactgtggaggagaaaggtggtcgacgacgtgctaggaagagagaaggagcgggtgcaggtgtgggagcggctacgggtgcggctgagaagagacgag

SEQ ID NO: 87379 - DNA, 902 bp, Cannabis sativa
catttactaacatagtcttatgatgtagggccatttgctatatttttttgaaatgaggacataaactaacatactcctatgatttggggccatttactataatttcccataataatttcagtagacaatagctagatttatagtataatactataattattatataaatattaattaaatatataatcaataatgtatgttaaaatataaattataaaatcatataacattaataactaaggagtcaagaacggagaagcatatctcgacagttagcgagcaatgagcaggcggatacgggcaaacaccagcgggggcacaggcgaacacgagctatcagattttggaaaaacggaagagggcaaaggaggtttagatgttagggatgaggctcaccggattgagtccaccactgggatgagaccccgccggagaagaagcagccgcctttgctgggagtttcttgaattcttctaagcttttttggtggaatgaatagtgaatagttatagtgtacaatacagtaaaagtgaatagtattgtttttcaattttaagttataaattttaacaattaaaattattatttttttatgtaataaaaaaatatttttaattttttatttattgttgttcggattacgaattaaaacccgactaaaaaattatacatttttaaaacccgaacccgaaacccgtgtggggtattttcgggttggacccaacccgaccacacgggtttttaattgttcagtttttttggcagcaggtcggggcgggtgttcggattttttgagtttgcgggtctaaatgttcagccctaattacatttccaggaaagataccaatagtgtgatgtatatcgctgcttcttcttggtgttatttattttatttttttttt

SEQ ID NO: 87380 - DNA, 684 bp, Cannabis sativa
aaagaaagaaaaagaaagagtaagaccattctatttcagtaaaaggcctacgcccaaattctatagctttgagtccgcaatcgcgatcatgattttcctacccccaaagggaaggaaattatggagaaactccatgaaagaaagattaatgattcatataattcacttcattgtaaatgtctccaataaattcaacgagtaactaataattctgttatacagcaaaaagtagctatcatccttttttcagaagaattatatagtcctatgatttcatcgactaacaagattatgaattgaattgcaattgcaattgaaacgatcgaaaagaatatatgaagtaatatatgctcgaaagttgaaaatatcataaaaaaaaattctcaattataggataattatagaaatcgggaattgaattcaatataggatttctttttatactttttagaaaatgtcatgccgctactcggacaggtgctattccgaataaagttgtaatagaaaagagtgagcttatatatagatagctatagttatatatgcttttttgacttacacattatttatacatttcatatcttttacgaatttgactaaaaaaatgtttctcttctctgtaaattattttttgaacaattgaagaacacgttaagtgctaaaaaaagaaattctatgttgttt

SEQ ID NO: 87381 - DNA, 650 bp, Cannabis sativa
acaattttttttaatagaaatttaaataacaaattaacttaaatcgcaattaaaatctatataacaatttatataaaaactaaaacaggaaattaaaacaaaaattaaaaaatggtaataaataatattatttgtgctatattagaagttaatgacatgttagaagttaggaaagagtgtaaaagtggaaagagagcattgggccttgaaactctgcgtttggtcttgtagagcggggaccgtacataaatcaaggcccgacacagttttaaatcatacaagatgacccatcattttctacatttataaactattctttatttttatttttactttcattatttattttgtgagcagcgttaatgaaaatctcataattcaataatttttaattgttagctttaaaataagtattttttttggtgatgcttgttaagttgctatagttatgattttttgtaaatttttaagtattgagagtttttcaaaaatttacaagaaaaagaaaaaaaaaagtaaatatatttttaaggtgtgaagattgaaaaaataaaataaaaataaaaccaaagtaggggtttactatatcacttttcttatttatttatgtaaaatataaagacaagtaaaaataataatggtaagagtaa

SEQ ID NO: 87382 - DNA, 537 bp, Cannabis sativa
ttaatcttctatgatttaatttttgatctaagagaatttttattcttgtgtctttttcaagagatgataataataacagtcttattcctactccaattgataatgctctcattgcttatgaatatattgctcttgaaattgaagataacgagggtcttattattgatgaacgatctattattgacaaggggcctattattgaagaagaacttattattgatgagggtcctgttatcagagaaattccagttgtggaagaagtcattcaaaataatgataaacaaatagaagttattctagaagcacttcctaagaagatcttaaggacaaaagaattcaacaaggtgttataataattttgtttaccttgaagaaggagaatatgatattggccattttgtggatcctgtcacttatagtgaagcacttaatagttcacaatctttaaaatagataaaaactatatatctggagttagttatattatctgatggttttaaaccaataagttgcaagtagattttaagaactaaaaaa

SEQ ID NO: 87383 - DNA, 784 bp, Cannabis sativa
aaaattatatacttacatttaaatatttatattatgttaacaaaattatatatcactattatacatagaaaaataaaaaataaatatcatttaagaataataatataccaaacaataaaataaaaatatactatacaacaaaatctatataccaataatctacaataacccataaaaaatttaaaaaaaaaaattgacataacttttaaataaaaaagattttaacaaaagtaatatagatataccataatctttaagtaatttgcttctaattttaaaaaaatatgcaaaaaagtattaatttttttatgtggtaaataataatattaatgataaatagtgtaaaagggtcattctccacaagttttaaaataaggacatttaattatatagtgctttgatttgagatcatttgctataattttcattaaatatttaactttaaattatgtgagattaaataaaattactaaagagtatattatatgaattataaatatataatatttaaatgaaactaaaaatatatactaattggataagacaaactttattaattagtctgagacaaagaaaataacatactaagaaaatatttatttgctacaatattttctacactatagcaaataataatgcttggactaatgaaagtgacaaagaaaaacttatttatagtctagttataaaaaaccacagtactttctaaacaatgtggtattttttacaaaattcgtaaggaatcatacgattttttttgtaagacaaaacttaaagatctcac

SEQ ID NO: 87384 - DNA, 958 bp, Cannabis sativa
taacaaaatcatacacttaatgtggatgagtagatccaatcctgtctgaggagacctctttgcattgggatacgaaattaaaatattttgtctttgtaagtgattgctttaattttaatgtgtgttttgcacatattgtttatactttaggtagtctattatttatttttgttctgtaaaagataatttacttccaatatatttattataaaatactaaaattatgtggtagccagcagtatttaactctatttttgtatgaatttactttatctgtttgagagagtatttatgaatagcagagtatattaatataatgactagtacttacaacaagttttgagtagcccgaactctagacactaaaacctccttcagcacacttgcttagtttttctcctaggacagacaagctgttctaaaatagtcctagaacactttcaagttctcccatcgtttcatacttctggaagttgtcataagtttgaatgtttttgtattgatcaatctcctatggagattaatttaatactaattttagagcaggggatcgctccatcactacatcttctttgttcacttccattactctttgttgagcactcttagacattgtggaagctgaaaaaataccaagcaattagctacttagacaagctaagatagtaagggcacaggggaattaatcctcccccataattgcttggagaggtccccatcagattctctatccaacaaaacctttaggggcattttttccaggtagtagaatcaagaacacaagaataaaagaaaagaaaaagcttacatactatccagaaccataaggattcagaacagtgcaacaaagaaatttgacttctagtaattcttaaagctattaaagaagatattcagaacattgtactcctaccaacaacaatatcacagccacaagcctaaactcatagttcttaaa

SEQ ID NO: 87385 - DNA, 708 bp, Cannabis sativa
atctagcactataaaagaaatttatgtatagcatttaaatcatacaaatctaaattaattgcattaaacaaaaatttgtcaaataaatacaaattaatacaaatgtatgataattaatcaaatgctaattttttaatatgaaattaatggcagattttttaaaattaatttagacaataaattgcataaatttggtaatatataattaaatgcacaattaagacattcatataggtttcatgcatcgaaaacacgtaaaacaaagactttaaaatcaacaaaatttttcgggtccaaaaatattttctaaaaaattttgagatttctttgtttttcaaaatgggttttcatgcttagaacaatctatattaatatatgaatgtattgatacataatgtataatgcatatataaacatatattcatatatataaatatataccgaaaaaaaatattgtaccgtatgtatatatataaacatgaaatgcatatatgtgtatatttgtatataggatttatatatgaacaaatatgatatgctgaatatatgaacacatatatatacgtaatgaaatagaaaatataaatatatatatcaatataaaatatatatagaaccgaatatatatatataaacaccgaatatgaatatatatataaacgaaactcaaatacaatcaaagcagagataaaaccgctctgataccaa

SEQ ID NO: 87386 - DNA, 655 bp, Cannabis sativa
  modified_base (333)..(335): a, c, t, g, unknown or other
tatgtagtagtcgtagtagactacttcacaaaatgggctgaggcggaacctttggccaccataacttcaaaaaaggtactcaactttgtcgtgaagaacagtgtatgtcgctatagagttccacaagaaatagtatcaaataattgaaaaaaaaattgatagtgatttatttacggagttttgtaagaagaatgttatagtcaagagtcttgcttcactagctcactcacaagaaaatggacaagttgaggcagtaaacaaaacattgaagaataaattaaagaagagcctagaggctgccaaaggaagatggccggaggagctcccacaagnnntctggtcctataggacctcacaccaaactgttgcagggcatagtcgcttctcactcacctttgggagtgaggccatgctcccagtttagacccaagttacctcacaccgaaattagtactatgaactacatcgtaaccacctactcctagtggaagcactatacttgctcaatgaaaaaagagaggaatctaaattacgtaatgtcactcaccaacaatgggtaaaagtattatgactctcgtgttcaaagggagtttataataggtgacttggtgttaagaagggtgttcttagcgacacgtgacccgacggctggggt

SEQ ID NO: 87387 - DNA, 584 bp, Cannabis sativa
  modified_base (535)..(539): a, c, t, g, unknown or other
gatagatagatcagatagatcgtgtttgttggatcgatctgatcttgtgtttgtgtttgatctgtgatttctgggttgtttgagggattggcttcgagtttctcagagagaaactctctgctagggtttcgagcaaaacctagggctgagggaaagtgattgggaaggttctcgatcctttgggttttgtctaaggcaaaacggggtcgtattgacccttctgactttgaaaagtcaggattggtaaatgtcaaaattgaccttgtttaaactgattaattgattgttggtgtagggaaaaattggtaattggctaatttcctataatggtatcaaagcttggttaagctggaagattcaacattcaaaataatcagggaggaagaacactcaagcaagaaatcaagaaacacaaacaagaacttcaagaactcaacctgacctaaaagaaatctttaacaaaagatttctgggaacattgctctaattcatctttatataaattgcttattatttatctttatctgattttatnnnnnatgagcaatttaaaggtagacattgacaaatttgatggttctggt

SEQ ID NO: 87388 - DNA, 629 bp, Cannabis sativa
  modified_base (589)..(591): a, c, t, g, unknown or other
aagtattctattaagtcacatataagtatttaagtgatcgtgattctaatttcaagatttactaatcagtctaaggcccaaatcttcatttttaaattctcacataatccacctagatctaaaatataatttatgcatatccaacgcattaaatcttagacaaaatttttcataatcttccctgtacgcaatctactcacattttctttaattgaaattaattaagaataataattatcccttaattaattcacatagctaggtaaaataataataatattaataataaaaatattcaggttattacaataagtgtggtattggtgcttaactcactggggttgttgattacacgggtactagtaatggaccctctttaatcatccagaccacagggcgagttagtagagccggaggctgcgcaaaccgatccaccgacaccgcctccaccttcgcagaatccaggggataatgcgggggttggtaatgctaatcctcttagtgattggcagcagatgtttcaagaaatgtgaagtttagatcattgagttaggtcttacatttatcagttgtatttgaattttaattnnnagttattttagttgcatatttattaagttttacaatta

SEQ ID NO: 87389 - DNA, 831 bp, Cannabis sativa
caaggtctttacaagtttgactctcttcaatttcaaagtcttgccacaaccaaaagctgttccaactcccaaaccgagtcaacctctctacttgaccaacacaataaagttcaatgtaacagtacctccatcccacctagaaattctcttttttcactttggcataatagactagggcaccctactgctcaaattgtacaaagtgcactgtcaacttgtaatatcaaaataagcaataaaattgatccaaatttttctgatctttgtgcctcttgttgtttaggtaaacatcataagtttccttttcctaattccactactgaatataatgaacctttacaacttttgcactctgatttgtggggccctgcccccattgtatcttctagtggatacaaatattacatcagttttatagatgcttattcaagacacacttggatttacatgttgagaacaaaatgtgaggccttaccaaccttcattacttttaaggcacaagttgaattgcaacttggttttaaaatcaaaaagcttcaatctgactggggtggggaatatcaagcttttaccaatcttttaaacgaacatgggattattcacaagttgtcttgtcctcatacacatgagcaaaatggggtagctgaaccaaaacatagacatatagtggagagtggtttaacccttttagcgcaagcatccttacctcttaagtattgggatgaggcttatcgcactgctgtttttcttatcaatagaatgcctacacccaagttcaattttagcacacctttggaattactattccatgtcaaaccagattacacaatg

SEQ ID NO: 87390 - DNA, 606 bp, Cannabis sativa
  modified_base (47)..(54): a, c, t, g, unknown or other
tatatgccagccgaaatatacattaaataataaaatatttttgtcannnnnnnntgccaaaaatggaattaacagagacaattacataaagtgtctagataacaaatatactttcaatatacaagcccaaccttcataacatagtaaaaatttacacttacaatacacaagcctatccttcatatgtgtgattagaaaaggttctcctactcctaactttcataactcttgatattattcgaagtaccttctagcttatccaatcttcaatttaaaattgtatcgctaagtcagggaaaaaaaaacatgtgggtatttaagccatggttgtagttattgagcaataaactactttacaattattacacgttggcactgaaatatgttgaacccaatagttatttagtgccatgaatgtcaaataatacaatctagggatggtcatgagtcatgagtgttgcttggtaagtaatgttatttagaagtaagataaaataattctgacaaaaggaatatagttgcccttattaccttttttgtttctcgttgtattgtcaaaatctgcttagaatatgaagaacaccattttgccagtgaccagattgt

SEQ ID NO: 87391 - DNA, 863 bp, Cannabis sativa
ttagtacatgtcaaagatcgggggaaaaattactaattagaataatctaacttattggatcttagtattataggtcaatggtctccagatcatcattgtataacacacgcagtggaatggatgatacaaaataaaggaagagaaaaaaaattatttaacttgtgtaaaatagtaattatttatttttgtaataaataatattttaaatttaatatttaaataaattagagagtacacataaattgtctcgacaagacaagatgacattaccttgtttgttaggataaggtggtggcgccaccttgcctcaggacaaggaagtggcacctatcacttgtaagtgcaactccaatgcagttgctattgagaagtagctatcagaaaatacgattaaatgtcagaaaaatattgacttttcaaccttaaatataaggtgggttgctcttgttgagcaccgctgcccactttcttttttcttccattgattaatttattaatattttcattaaaaaataataaaatacagccactaaagtagctagcattggagctggcctaatgggccccattgaatttttttaaaaaaattaattaattaattaaaaaaataaatatttatttaaatttaaatttaaaagttggttatatatatattatggttgagatattctctcaatatagttatgagattctttaagcggttgagatattctcttaagtaatttagatattcccttattaatcgtttatgagatttaatttaaaataaatatttaaatttaaaaaataatatctataaccaaatcggcacaaatatttatttaaatattattatttaatatttcaaataaatgggtaaatac

SEQ ID NO: 87392 - DNA, 1208 bp, Cannabis sativa
aattaatacaatacattgcttaatgcaaacatagtattgtttattatttaatacaatacgacccttatacggcgtaccaaacgagcccttgatgatttttttttccctcgaactttaacgtgtactaaattatattcctttaatttttcaagctattaaaaattctctttgaactattgaaattgttagattcaaagacttttgttcaattctaataatgacaattggacatggatgaaagttcatgaggtacaatttagtacatgtcaaataatttaacaaaaagaaaaggtattaaatagttaaataacttttacaacttttttttatgttatatgggtaaatatatctatatattttatgtatcattttcattaaataataataataattataatattgaattgttcaggatcaaaattctgttgcacttatacaacaacaatagttatttacaaaaaaatatgactctctattattatgttgttataaaaaaatttatatgctgtatttatttatatagtcttataaattcatatatttatttatatagtcttataaattcatatatttatttatattcgaaacaacaaacatatattaaaatattatttttttctaatatttttcaaatagtgtaattttattttattttataattaaacattattcaattatttttttttatataaaaataattatatactcttcattaattattatttatttaaaaataataaaacattactaattatatttatattaatataacatgtatttttatcaaaaatttatagagtttaatatttaattaaatatattttagttcatttaatttttatattttatattgttattgatttaacaaaagaagaaaaagaaaattgaatacctcctacagattattaacggtatcaatcaaatatataactatttttataattttgtaattagcacataaataacaatgtatactaatataaaataagttaaataattaagttttaagtaagaaattattttaatagctaagagttttaagaaaaacaactacgttattattaatcctcaaaataatgaaaaaaattaagcttttaatacaatttattttattcaaaagagtgtatataagtttttacaaatttgttattatttttttaaaaaaatatgaaaattgttcatcaatgacttcaaaacatctatacaag

SEQ ID NO: 87393 - DNA, 2856 bp, Cannabis sativa
cgagaatcgtttgttatgccaagtgaaagcacaacctttatatcttagatcaataccccctgtgtaatctaaaaattcatagaggtactttgtatcgtttacatcaaccttccttccaccctgcttttcctcactactcaaaatacagtttaagtccccaattaccatccacggcagagagcaaagattaatcttgtgagccatatcttcccaaaaactacctctttcccagctatacggagtaccatagatggtaaaaaggcgccacctggtactaatttgcccatcccaaacctcagcctcaaaaacaccattttccattcttactatatccacaatcaacccccaattccacataagacagaacccacccgaaagtccattagcagggtagcaaacaacaccagtaaatcccaattctctcgccacatctttcattcgaacgcttccacatttagtctccatgagaaatatacaatccggattgtattttctcccccaagccttcaaggcttggactgccgagtcttttgcaagaccacagcagttccacgaaagtattttcatggcgacttggggggcttgataagggcggcctcctcgcccatttgaatattctcagcctcatcaattctaacctcaaccaagtccaaactttttaccagatttctagtaatctcactcttcttaatcgcttccctttgccctttgcttgaacttgaagatgcccgagtattcgagcctttacgccttcttttctcagtctttggatttgtagcaggagcccctgcaccaattttgaaagttgaagtcgaaggattcggagagaaggggagcatttcaggtatttccattgagaactcctttgtattttcctcagtcctaggaacatatgacattaaattgaggcatgcctttcgtttcctaggctgaggacaggggtgaatctcatctgaaacatctttagggtcatgaaacagagttaagataggttcaaatttgtccacttggactgggcccattagctcctcagcaagcccaatttcctcagcataagagggccaagggaaaggggtcttttcaggatacttatgtggttgtctagacatataaacctcttcatgtgggccttcaattgattgcaaataagtaggcccattttgagacataatcgtggcaattacctgggcatccctagcatctggacaaggccttgaggaaaacttcttcactatttcttcatcagataaagttatagaatttcctttcccatgtcgtctccaaaaactgggagagatagacctagcacgcctatccttaattagctctgaagaattctgaggaacacttgcagccttcgaactgcaagcacccgctggacaaagcgggttcttctcaacaactttcaaattctttccaaaagtagcaccagcagtttagtcattgattctgataaccttcttcactggttttggaatctgtgtcctctgtctaccgccatagtgcctatccgttaccggcgatttccctttctctttggtcgtcgatcgttccatcgtcggaggtagcacagatgattctttcctgaaccactcaagttggttcctagtattgaagcaacttatcacagttgtttcagccttcgtccacggcccaaaagctctaacagccttaccttcaagagggtaaacaaaagccgttggccaagcacaacttttttcatcatggccgatgtggccacagttataacaatactgttgcagtttaaagaacctgaacttaatccattccttccttccccttctgatatcaaggtaaaaccccgttgaaagaggttgaagaacatctatttccacctgaaacttgaagaaacctcttctcgtgattaatctttggtcagcagtatcactccttttaaaaatacctgcctttctaccaacagtaggaatatttgatctgtttaaatacggagtaggaagccctgaagccattgcccaaaagatagttttgttcatattcactgaagcccaagctccgtcctctggccattccttgattaaaagtaatttcccattgatgatccatggcctatgagtcaaaatctcaacacaatcttcttcaagatcaaagaaaatcccccataaacctatctttaaagttttgaatttccaagcccccctgagctttggtttccatatatgattgagaatctccttaagtcgtgatctggatacaccttttccgtcgaaaaatctagcaagaatgcccgttctagtaatttcttcgctcaactcaaaatccggttccaagtctaaagtcatggactggaaaaagtcctgtctcaaaagttttagttcatcagcacccttttgaaagttctcctcctcctcaataataccttcatttactgtttccaccctgttactctgatcttcacacattacttctgtaggctgtagtattccatccaaagtactaggattaggaatgtcattaataatcccagtctgcatggttgactgttcattaataacagtttcctcaaccaccatattctccactgtagctgattgaccactcgtatctcccattacaataagtcaaagaagtaaagacactcccaaagcctaaccaccagaaaccaacaagaaaacacttttagctctgatctacttttcactcaataacaaatggaataatgaaaaagttcccctgaggatgaactcattgacatttaaccgtcattttggacaagccaaaactctcacactagagagaaaaaaaataaacccatcatttcactcagtacacaaccctaaatttttaaaatttatttggttagtttaagaataataa

SEQ ID NO: 87394 - DNA, 824 bp, Cannabis sativa
  modified_base (537)..(544): a, c, t, g, unknown or other
ttgtacatttaaaaattcaaattatgatttccaaagttctacttataatcaaacatttttaattaaccctacacacacatagttatcaaattttaactgtatgataaaattttaataattaaataaatgctatatgtataattaaaatttatcaaaagaaaaaaaaaatcatcttcaattaaaataaacaaaatataattttagttttgatatctctactgtattttgatctaatctacctaatacatattttttagaaatttgtattctttttattttctataaaaaataattatttttaaatctaatattaatgtgctaagactttttttcaaaaaaaaaaatccttttacataaattgtataagtacttaaaagtaataattttatcttataattattttttataaatttaattacatgaattatagtgtttaataattttaaattttttttctaaaggaagcaaatataaatttgtactaaatttatcacgtgcaaggcacgtgatttttgattagtatatatatatatatannnnnnnntatatatatatattaaaaaaataactatgtgggctagattaatactattaatcacctattatacaacatttacaaaaatttgtaaacacctttatataacccatgatacaacatttttaatggtttctaaaccatgtgggatttttgcttctcctaaaaaaccctagtgcaaggcacgtatactaaattttatattaagtattttctactttatttaaaagtgatacaattaaaaattaaagaaaaaatattagtggttattaagtgagattattattat

SEQ ID NO: 87395 - DNA, 831 bp, Cannabis sativa
ctacaaggaaattcaagctcagttatctgaagttttgtcaaagaaggaagttttctggaggcaacggtctaagcaattgtggttacaagctggggaccaaaacactaagtattttcatgcttgtgctagtagtcgaaaaagaagtaatcagatcgttaggctgaagaatgatgatggtttatgggtcgactgggacaatggacttccagatgtcatgagtagatattacaccgagttgttcacttcatcttgttcgaactggcagagggtaattgactgtgtggtttctcgtgtgtctgaggatcaaaaccgagacttgttaatggtggtggaagaggaagaagttcgaagagcgctttttcaaatgcatcctgataaatcaccaggccctgacggatttaatcctggtttttatcagaagcattgggatatagtcgggaaggacattacaactttggttcagcggttcttttcttgtggtgagtttcctgattaccttatacatactaatgtagtgcttattccgaaaaagtcccatcctgaaagtatgaatgagttgaggccgattgctttatgcaatgttatctacaagattttatcgaaagtattggctaatagactcaaagggattctcactcaagttatttcagaaactcaaagcgctttcttacctgggcggctaattactgataacattttgatttcgtatgagataatgcactatctcaaacgtaaacaaaagggtaaacaaggctttatggcaattaagctggacatgagcaaggcgtatgatagagttgaatggggttttttggaagctatgatgaaaaa

SEQ ID NO: 87396 - DNA, 541 bp, Cannabis sativa
ccaaaacaagatcttcttgctcttttcacttctactcgaaaacagtaacacaaaaattcccacaaccccttagtcgaaaatcaacacacaaaacccaaaaatagcaagaacacgaaacacacacaaatacaaaaataaacaatctagagattaaggtgagaaatacaaacagaaataataaagatggagacaccaatttgatcttgaagttcgcccaaaacaaccagctacgtctctgtcaagccgtcaaagcttgaatcgattaatcatcaacaggttacaatctttaatttacaacttttgatttctctctatttttcctctcttttgatactaacaaaactcttttttcttttacatgaacacaccaacgacactcttggaggagctctctcaaactggccttgtgttctctttgtgttgttctcttctggtcgtctcacttgttctctcaaaaatgagagaaagtatccttttatagatctgatctgtgattctaatctagggcagagccctcgtgtaatatttgtaactgttttgt

SEQ ID NO: 87397 - DNA, 822 bp, Cannabis sativa
atatatttcatctctcaacagtgcaaactaaggcagagatagaacaaataatttttattctgtgggtgatttggatggagcgaaacaaagtcctccatggtagcactagtagagatggatcatactaggctacatacgtgatcaactatttggacaactatattaaagctattagtccctctcaaactcttgttgtacatgactcagctttgactgcctttaattgaccaaaagatggtgttccatggaaaccatctgacctccatggcctcaagctcaacgtggatgttgccgttaactcaaacactaagattttggatgttggagcaattatttagaattctgaaggtgatgcaattgctgcactgtctaaaccagtctaaggttgctttcaatcagacgaaatggaagtgaaggccctctttcatggtctcaaattgggctgcccaactataaatgtcaatcactcatgttgaaactgatgcgatctatcttgtttttcatatttgattgttgatgtttgttgtcttttatcctctttctctagtattgttatttctcatgttcggtgaaatgctaaccatgctgctcatggattagcgaaatatgcactagagttggatagagatacttgttggataggagaaattccacctcctattttctctgtcattgtaaacgaattttgatttataataacaattgaattttcctaaaaaaaatgtatgtatgtattttattttcatgcgtaaaattgaagttttggtaaatacatcccatttgctaaaaaatataatgataaaaaaagggaccaaatcttat

SEQ ID NO: 87398 - DNA, 766 bp, Cannabis sativa
aatcatcatttcccttctattgtctttactagattctgtatctatgattatcgctcccactcatgtgtgctaccatgtttccaagatgtaagtattggcctgatccacttggtcagatttaacaaacaagtcaaataatagaaataacacagttaagctagaacctaaccatctcaggattaagatctattaaactaagatcaactaagtgatattgagttcaaaagatataacaataagtttatgatatctttttgaactacatgatactagtatactttaccaatactctgaaaaggacatactgcttattcaagtgtaagtaaactttatcgctaatcatcatgtcagtataaatctagtgcactgataaatcatgggacttagactttgaagcatataatcacaattaattttaactgtggtcacatcactgtaattatgaattactataggttctagatttatcagaaatagtatattaaactataaacatgaaaataacatgtaaacttaaatgtcttctaatcctctattgatagcaaatagaatatctagaatatagtcattttcgccattcaacttcatagaagaaaatagtatgacatcataagcatatgatttataaaccatctgtccaatgatatactatctaagcaattcttaatgaaaaagataagaagaaaaataaaggataatttcgattaaaataataatttaacgatgtcttgtataggcaagcatcaaagttattcttattttataa

SEQ ID NO: 87399 - DNA, 629 bp, Cannabis sativa
tgagtaccatggtaagcaaaaactcacagttggtaatgggcatcagttggttattgaccacattggtaatggttcacttgtatcctcctctagtgattgtttaacactgaataatgcgctacatgttcctcatatcactaaaaatttaatcagtgtttctcaactcactttggataataacgtttctgttgaattctttccctttaaatgttttgggaaggacatagcaacaaagagggttttgcttcaagggacacttagagaagggctataccagctggacagtcgcaaaaaaacacacctcaagagtcgtccacagctgctagtcaatccaagtttactgatcttactttcttttctggtttagtgtcaaaatcaaaggaccagcatgttgctgagtcaagtttattttcaatcaaagacaaatggcataagagactaggccatccgtctagtagtgtcttgaatcgtgtcttgagtcatgtcaatttgaaaccccctgctaatacaaaagaaagtttttgtgaagcttgtcaattcgaaaaatcacatgctttaccatttaacacgagtagtagccatgccaagtaccctcttgatttaattcataccgatgtgtggggtcctgc

SEQ ID NO: 87400 - DNA, 580 bp, Cannabis sativa
  modified_base (326)..(330): a, c, t, g, unknown or other
tttaatataataacttttagggactatcgctagctaatcgcaacgcgatgtcgagaaggtgctaagcaccactgatacctaatagcaatgctcaaatttcagaggttgcattgcaactaatattctttttcgacatgtgagttaatgcaaaatggcttatatttattaattaaagtaaccaaaaaataaaaacttgtccaatgaagtgaacactagtacttaataacacactattgtggatattgtcccacatagaataaatggtagagaattgagtcatatataagaacatgggctactctactcattgccaattggttttgagnnnnnaccccatgattctcaacatggtataagagccatatcccttgcgggcaagtgatcctatccgatccgcacctacatgggctactccactcattgtcaattggttttgagatggaaccattctcaacacacacattaatttggaactcaatatttatgaatagactattaatatcagtaggtagtgctaagaaatgattttttagttatctcttgtttcattttattcaataaaagacgtgcaaactattat

SEQ ID NO: 87401 - DNA, 845 bp, Cannabis sativa
aacaacaaaaaaaaaaaatctttttttacactatcaaaaatatgtttatatacaaaatatttaagtcaaactcaattttttttttatctttttttggctcaaaaagatttttcttaatttttttttctcaatcagtggaacaattctagcctatattaatgtaaaaatgagatatttttctaattagattataaaaaaattaaacataaaaactcaaatattcttaatagtgtctattcatgcataatgtccattaaaagtttacgatatatagggcaagactatggtaggacctaacaaaaatttcctaccggtagtgaacttttttttaccattgatttcagatcatgtggttattatgatgtaaggtgtatactcttacgatatgactgcttgatacgattaaaactttatacatattataataatatttaatgatatttatttttttaaaaaaataatattaattattaaaaaatttataaacttttattttgaattattatttttttttttaaagttactttgaattatttttatattgatatttattttcaaaaaaaaaaaaaagaattgttttttctaaactcatttttttttggcttcttatttgttggcttttcataatttacttctagttttttttatgtttacacctagtcttttttttttttgtttgtttgcttaggctgtgcgtagtttggtgttattgactgttgttttagtggtttttatcttgttgttgtttggctgctcttttgagacgccacttataaaaaaaaattaattaattcggttagatattattttttctaccaaagaaattgagtttaggagaagcaagt

SEQ ID NO: 87402 - DNA, 647 bp, Cannabis sativa
tccctgggcgtggccccgtggactaggagtgttcgtgataacactgataccacgtacaaatctcttgtgtcaagttatttaattttctacaaatatttttatgttctacctgttctgttttgtcgttgcaaaactggtttctgcagtaacagaattacattttgcctctgtagacgtatacaattttatattttcgtatatattattggcatttgcaaaaactcagtttttcaattggtatcagagcgggacactaaactcttagtgtggtcctttaacgttttgtgtaaaatgtcattctttgcagaaggaagttcgatttctagaccaccgttgcttaatgatttctaattatccttattggaaagttagaatgagtgccttcatcaaatctcaagatgagagagcttggagcatggttctatcaggctggtcttctctagttgagacagattccgcaggtaactctaaaataaaatctgaactggaatggtctattgaagatgataaactttctgcctacaatagcaaagcgttgcatgatatatttaattgtgtaagtgagggttatattaaacttatatcatcttgtgaatctgcgaaggaagcttgggatgtaacgccctaatgctaaggcacgctacagt

SEQ ID NO: 87403 - DNA, 1783 bp, Cannabis sativa
ataataatataattcctcaattatacataattatctagttagggttttgctaatcctttctcataattccgggtattacactaggggcacgcaagtcattaaagctggtgatgggactacaccgacatctcaagttctaggttgaggcctcataaacagctccataactcatcccccaaggccaccaactgctgctggtgctgacaccaccgagtagattcctccttgggaaccatgtgtggaactagaagacctcgaggaggccaatccttgagctgaaaaactttgccaaattgtggctgaccttaaaaaacaactacgagactctttcgacaatcaacacgagcaatttcaaaaatggttcgtggagaactgaccgaacatcgagagacaacgagttgatcagtaggaatagtagagagctaacatgtctcaacggatcagagaagcctatcactttggtcgcaagactaccccccacaggggtcttttcgagttggtaagagagattccccgtcagccaactagccacgttggaacaagtgctcaaggggaaacccttattgcacaaaacactactaccacacctaataaccgtgcaagtactaaataaacaataggtgctgagactccccagaggaaagaaaaccttgggcaagaatccgaaagggctcaagctaaagggtgccaaccaatgggcctccacttgatgtcaaaaaaccatggacaactgagagaaccaatagaactacttcaccatgttctctgcatcactctaatgacaccaggccttgagaacctgaaatggtaaagggacctgctactcatgctgaatgagaaaattgaagatactactttgaaactagaggttgtgagacccaacgagtaaggaccaatgagccacttcatacttggaagtatttccgagatgaaagaggtgagttgtgtcgttactttgcctgtggcccgacggccaacaatatgagtacttccctcgagtacatggagaggagttgaacttgagcaaccaattcaattctctctgtacttgcgatctagttgaagactaatttgagggaagtagccactataatgctatgaatgaccgctcccacggcgcatcatcccaagaaaattcggagttcattctgaaaatatcactagtgtttccttcacgaccttgtggtcaggagacaacaacaagacctaagtcgactggggtacatgatcgacttggaagaataaaggacctgcgtgacactctaaccaaaaaatagttggtggaagtgggagcttctaaaggtaaccctgatcgcgtaatagaagttctaactaggacacaaaccaccatccatgggtgtcaaccggatagagtttgacaacctagcaaccctagtgaaaggaatagtactccaaagtttttgaaattcaaacttgacagagagcgatgctcacactctctgactgggtcaaagctctaccaatcccttcgaagttcaagaatcattcctagcatcaatacaccgagaaagaacacctgatatctcacaaccattacttcaaagtgcagatcgatctacaacgagtaagagacgatgtcaggtatagaattttacctgccacactgacaggcttatctcaattttctttaaacaacaaatttttttagtgtgcccaaattttttacaattttggcactgaggcattcctttaaactatcagtcattctccaagtgactttttattttgcaaatgccacatggagaacacttgtcgttatttt

SEQ ID NO: 87404 - DNA, 1038 bp, Cannabis sativa
  modified_base (168)..(172): a, c, t, g, unknown or other
tgcggcataaatactcaatgttttagattttatatatttaaatacttaatatttatttttggaggcaaaaatatctaatgttataattctcttataccgttactacgactttcattaactcataaatatgaacacatggaggtcctaaatgcattacatttatttatnnnnntttaaaatttaatattcttaatatcaaaaactaaatgctacttgtttcaaaaaaaaagaaaagagagagatgcaatactaaattaccatagctgagtgaaccagtgcacttatcgaattgaagtgccgatatcatgtgaaaattgttatgagaactgtttttttttttttttaaaacaagtagcatttagtttctgatattaaaaatattaaattttaaaataaaaaaataaatgtaatgcatctgaaccctacacgtttctatattttatgagttaacggaagtgatagtaacggtgtaagagaattgtaacattaggtatttttgcctcaaaaaataaacatttgttatttaaatgtataaaatttgaaatattaagtatttataccgcaatgtacctaaatatatatataagtgcatgtattactcatatataaatggataaattttagtttttaagtttaaattttctatccaataaagaaaatctctcatttttatattatatgggtttgagttgttctgtcggtattaagaaaaaaagtttttggcaaaaaaaaaaattaaaaaaaattgagtttaagtattttgtatccaaggatatttttgataagtgtaaaaagaaatattttttgactttttttttttttattaagtgcatatattcaattttctcttttattatttgttattaaattaaaatttaataatttaatatttttaaaattaatatttataattaaatttagttaataaccttcaatcaatcaataatacccattaaaaattgttctaaatatatatatttatttacatgaaaaagctcatgtgttttccctctacactaatcttccttagtttattta

SEQ ID NO: 87405 - DNA, 847 bp, Cannabis sativa
aaaccctttttcaataaaatcacaagacctacccaatagattaattacacatgttgccacatatgagtgtgtagctctcgagtcaaataacacagtaaaatacgacttgttgacaagaaactaacctatcaccacagaaggactggctgcagcatcaacttgagtaatagcaaacacccgagcaggtatgggttatgcctttggcttctgctcttcattcttcgtctaggggtaatctttcttgaagtgccccaccatgccgcactggaagcatgtcttccggttgcactctcccatatgatgtttcttacaacgtgggcacaaagggtaggaataaccctagcgtccacctttgtcttggttccgacggaaccacttgctctgtcttgaaccaccagatcccgggttagcctttcttttctgatcagtggtggaatcaccaccatccctaccacaaacatgagtaggaagagtggggctcccaccaacacttggggtcactcggggctcttaaagaaacttaaccgtaccttcggcttgtagagccttctcaaccatctccgcataagatgttgcctcatttgtagtaatcaccaggtcgtgtctaattttcacatttagacatgccaaatctttatccttcttcctgaagttcatatgcacaatacccgaagcaaacttggccaggcaatcaaactttgtcgtgtattctgttactcacataacctcactctgcaccagctcagtaaattcttttctcttagcacttcggactgcctcgttgtaatacttgtcattgaataaatcttaaaactcttcccatgtcataattgtgacatctcggttg

SEQ ID NO: 87406 - DNA, 737 bp, Cannabis sativa
tgctctttagatgtaattatatatatacatattttatatagacaataaaagaataaaagaatgaatttcattgttatacgtattttgtattaatctatatacataaggattatattagaagatattttgacaaaatttgaacttcaaaatacattttatatattatgttgaaatatatattttaaaaaaataatgatagtgatagatacattcttaatttgtagttaagagagtgtggttataataaaatgtacaatttattaaatatatatatcttttatgtatagatgtgattatatatagatataatttatttttaatatatataataaaattaaatttttttatataaaatatttatataatatttatttttaaatacatatatattaatattataaattaatgaagaatattctgttaaataattagaatattctattcaaattaacgtaaaaagccaaaagacattgttaaactaagaatttcgttacataaccagattttatatagaatatatatatatatacatttatatactaattaattatcttttcataaaagattttattttcgaatcaaattatttgagatatcttttagctgtttctaaaacttatttggataaaatttattatatcattgaataatatttagattatatatgttggaacttattttaccagattttaatttactatcacatatgttggtttacaacctaaacatgttttcaa

SEQ ID NO: 87407 - DNA, 1022 bp, Cannabis sativa
aattgacttatgcataaataaatttcctcttattgtatgcctcaattattgatgtattccacattctaactgaatcttactgaaacttcaagtgttcgaactcccttcaatttccttgaagagtgcttgcttcaacctgagttaagacttgaaaagttatctcccgaaagtttgtagaaccttctcctgaaggtagcactattgttctacttcttttatagtctttattatagactcaagacaatataaagtacataaacacaaagaaagagaaacaccctctcatctacataacaaagactctctttcttacaaaatatgaataaaataccaagatgtgaaaaatatactaaacccacatgctataacatgtatttataatcaatatacacacaatgcatacacggtctgaataagactacaactcacaaaaactttcctgaaaagatcttcaattagcctagaaatttctacttatgtgtacctacaaaatgatgagcagtaagtgcgactttttttttttatagaaaatgaagttttactttattttgctcacaagaaatttgatcaaaccaattaagaaactcatataggatcatattaacacggctggaaagatatgaaattgatttgttaataaaacttatttgtttatgaccaactttctaaatttagaaaagctagacatttttcataccttatatgaatcaataaattaaatacaaatttatggaagtaaaaatacaactcagctaaaattaatattcaatttataaaatatttttgttaatctaaatataccaaaaatagaattaagaatctccccatttgacactttgattgacaaaatattttataagaagaaaacttgcataaagtgttaaagacaaaataatcgtatttaattagcaacacttctctcaacaaaaatagactagcacggtaccacccctctaaccgaccaacaacaacaagtatcgaaggagaaacctccctatcattagcctcatgataccgctcat

SEQ ID NO: 87408 - DNA, 625 bp, Cannabis sativa
  modified_base (559)..(561): a, c, t, g, unknown or other
tctttttacttcggataagtacctgcccattttcagttctttagcttcaaaatctcctttgacttgctgaactatcaactgagagtctgactggactaataccctctcggctcccatttccttcaccagttttatcccgtggatcagagcttcgtactcagcgctgttgttggtagctcggaaacctaactttatagattgctctatcatttctccatcgggtgacagcagtacaattcccactccgcttcctctgacatttgaggatccgtctaccttcagtagccaatcctttctggcggattctttctcaggcaggacagactctggggttatctcgaccagaaaatcgctaacgcctatcccttaatagccgtctgaggcaagtactgtatatcaaactcccttaattctaccgcacacttcatgagtcttccggatacctctggcttgtacaagacccgctttagtgggaaagacgtcatgactgagattgtatggcattcgaagtacggctaaagttttcttgctgatgtgactaaggcccatgctaattttnnnattattgggtatcttccctctgcccccgagaaagttttaatggtgtaatagatcggtaactgcg

SEQ ID NO: 87409 - DNA, 591 bp, Cannabis sativa
actaaattttttcacatttttttaacaaatattttctaatttttttttgaaaataatcatatatatatatttaaatttaaataataaattttaaatacgtaattattgttcatgtctatcacatccatcacttctaaaacttgcttaattcacacacccatattttttctgccactatttttttttactttttcaaatttaattttgttagtgtattagaaatagtttatttttcaaaataataattttaaaaaattaaaagtctaaaaaattgtcaaaataaactaataaatttagtaacatatacaataggatatgttatataaaaaggctaacatgtagacaaagaataaaaatttattttaatatgccaaaatatatgagtataggcatagtatagtcatattaaataaacttatgagcaagacattttatgtgagcaaaacatttcatcatattcaaaactttgacaagtgcatatattattatccaaatttacatgtaagtctgtaagacatgttatagtcatgtactttgcatatacaaccaaatattgatgtctcaacgtgaaaaaatagactaattagtttg

SEQ ID NO: 87410 - DNA, 941 bp, Cannabis sativa
tttgattctgagtcatcacaatctattgttgccactcgtttcgtgcctcttgttcttccacccttcgcttcagtacctcatattcctcttgagtgacactagtctgccaggatgcacctggcctgggagttgctctttttgccctcgtcttaagtcttggcaacgggcctagtcctctcaagttgcgtggttgctcacctaatacccgtgtcataatatgcgtatctataggaaattgggtggggtcaacattgtactcccggggagcatcgactggcattggttgagtgtcacgaatctcaaccattttggtctgcaaaaaagttcataatgaaactattagactgaaagaaatttaaattataaaactaatttaataaaaatataaagatacttacatgcagttgttgtgtgtgctcgtcgcgccacttattgttcttgtagtggaactttacaaatgtatccacagcactgggaagctcccccgtctgcgagtcagcctatttttaaacaaaattggaattagaaaaatattattaaaaatttccaattgaaccatattcttatcatatattgaaaatttcataccccgttgacaatggtcgaaactatggtcttagatccccatccaccttgaaccttcatgctacctcggtttttcgtattttgctcagctcttgcctgtaatttaccgtacagttattgttagaaaattgagaaaaaaaatattaagtaaataagaaaaaatattaaaactttcaattaatacctgttgttttgggtctttccagtatgcgataacctctgcccacacctccggtgtcaccatatctagacgtgacctcctgttcgcttcttcctccccatatttttcaatattctccttccatgccttcttcgtatctgatctccagtcacgtaatccttttgacatagatttg

SEQ ID NO: 87411 - DNA, 542 bp, Cannabis sativa
tccaaacagcatgggaggagttgtagttagagactgttccaagaatcactttagtcattgatgatctgagccaagaaagtaacaattgatctttctttcgtcattgaagatacatccgattgggatcaccattgataagattttgtggaggactgatactggtaaacaatatctcatcgaggtcatgaccaatgaccatgggaataacttgagatttccaagcaagaaagttagctcgatcgagcttggttgtaagataagacgttaaggaattcgagaaaggattccattgaggaggagcaacagcagggggtggcgcctgaggcctaggatcagtgatgccaagtggagacgaattgttgtcggaggaagccatggacgtgagaggtgctccgataccatgaaacaacacacacagagtgcacgaaaaggaaaacagagatagagtgaaagagaaaagcctcagaaccaagaatacttacttgaacattctgaggaggaaaacattttatttgtagtgtatgttaagacaaaatacaaac

SEQ ID NO: 87412 - DNA, 674 bp, Cannabis sativa
tggaaaacaacaaaaatgcatcggaatagacatttaactatagtattgatgtaatttttttttggattatacctgagttggattgtttgggaactccagttcagctttttgagatttgcatttcatggatctacaaattaaaattaggacattagttttatacgaattgaactggatttccagttgaattttaattttgtagtagtttttctgcacttcttttgatgatttcaaaacaacacctgttttgattgattccggtcatcttctcaagtgaagtcatcgaaattaatggtggctctattctggttagattttgtttcggttttgttgcgatactaggttggtcgatcgaaggttgcgtgtgtgaggtaggttgtttatttcgttcgttccgtgcgtgcgactgaagtagtagaagaagtggtattttagtaatatttagtttatgagttgtattaatgttcaaagggctggccataaatattattgtaatttaattgtcttttttgtatatacatgaaaaactccttgtttatttataacttaaactttattaattaatagggtttctataaaaaatactagatttttggtaaaagtttataattttactgtcacaatgatttttcttttttataaaagtactatctttttataaagcaaccgtaaaa

SEQ ID NO: 87413 - DNA, 1001 bp, Cannabis sativa
  modified_base (708)..(713): a, c, t, g, unknown or other
ctagaatcaatgaacaagatgaagtgattcggcagttaacacagaagggtgctcctgcagtgcctgttctaaaaatgccagtggcacctgcccctactgtgctagccgaattggtggttgcaatgaaccggatggaacccctgtatgaaaggttccgtaaacaatcacctccagttttcctgggaggcccttatgttatgaaagttgagcaatggctaactgtgatcacaaggatcttgaattttacgggcgtcacgggtaatgatagagtggtttgtgccacttttcaatttcaagaagacgctttagtttggtgggacatggtgtccatgattcatgacgttaccgcaatgacctgggagaagttccaggaactgtttaatgccaagtattataatgaggcagtcaaaagtgccaagagaaaataattcacccatttgacccagaaagaaaacatgagtgttactgagtatacgactcagtttgatcgcttggcaaggttggcctcgggaatcgtgccaaccaatttcagtaaaaaggagaagtacctagatgggttaaatgcgaagattagacatgatctaatgattactacggacgacaaaaccacttatgcggaaatggtggataaggcactacgagctgagggcacagttggatgcatgatagagtctggtgggactctagttgttggcggggctcctaccnnnnnngcatcaggttttagcaggggaggtagtgatttggccatggacaaaaaaagaaaggcatccactgcaaccagtggctcgggtgagaacaagaggtttttggggaaccaggatcgaggcaatcgctagagtgtaaaaggcatcatctgagggagtgtttaaggcaggggtgctttcaatgtggcatgccagagcattacagaagccagtccttaagtggtaacaagtcagctctcgatcaacaactcttatttctctgtgctttttgactctggggccactcattcttat

SEQ ID NO: 87414 - DNA, 819 bp, Cannabis sativa
gggttcccttaactaagccactgcatgtgagtcgccggctcattcttcaacaggcacgcggtcagagccctgggttcaatattaccgactcgcccaacattactaaattaattaataagtagggtggaatcaaattgattcctacttcaagcattgggtctcctgtcttagtttaatgagtcttccacttatttgatgtgatagttaagagattatctatggttaaactcttcacttgtggttttgggtaggctgagattgagatctagattgtttaaatacaatatgtatctgaagaatagggatgcccaatttgtgggctgaacaaagaaacatgggagtgtttattcatcaaattaatgtgagcaattagatattggctagcatcaaggcttggataagatggactactgctgctaacactattcatggtgtggatgaatctcaaatgctaaaacaaacaggttcaaacgtcaagtattcgcaactatatatatcatatttagtggacaaggaatgaagctttatggaatatgaaaatatacacaataaattttattataaaaataattaaacttgatgtaaagagaacagaacagtaatgagcattatgcccaataaaatggtaaaaagggatataggatgattggaaaagttataataggagttgcatacctattataattagtgctgctaatggtgtaaaaacttggttgtggaattaatatacttgccaaaaaaatacaaaaatagaattaatcaaaagactttttttttttggctgaaattaatcaaaagacattaatcttcttcttaata

SEQ ID NO: 87415 - DNA, 1124 bp, Cannabis sativa
caattttgacgacttttttggcgttggcaacaactccgttgacttttccgacaccagcagctactccggtgaatttttcggtaccgatagcaaaccctaggaaattcatcggaattgacattgtcgctgaaaaaattaccggaaaaactagtttcttgatgaagaaatggttttttggtattttttttgtgattttttcggcaataataacaatttcgatgacttattcgatgccgacaacaactccggtgactttcttggtgccggcagcaactccggcgactatgccgattccgatgacttgtttcagttaactttattgtttagcatttatattttgttatgatttttcatagtgtcaaatctagtttcacagggttcataagttcaaaactggttttacaggtttaagggttctgtaatgagattgctctattttataatgtttttgtatattttttattttaagtttctttttattattttgtttctaggtttgaaactgattttcacacttatattttattttagattattgttgtgcgttttgtgttgttttgtttatatttatgagtatttttttttttgtatttctttctctatttggttgattgatgaaacatgtttcaattatttttattgtatatcatttttgttttgttttcataatctttattattgttgtgtgttccttgatgaagaaactaatttcttagtgaagaaaccgatttcttggtgattttttcggtgattttgccggcgacaatgccaattctgacgactttttcaacatcgacagtaactctggcaacttttccgacaccggcagctacttcgacaacttttttcaacaccgacaacaaactctggaatagtcgtcgaaattgatattgtcgccggtaaaatcaccaagaaatttctcggtgatttttctggtgattttaccggcgaaaatgttaattcgaacgacttttttggtaccggcggcaactccggcgactttttcggcaccagcaactacttcgatgactttttcggtgccaacaacgaactcctgtgatttttccggcacgagtgacaactccgacgatcactgtagtaaaaataaatatgaagagaatttt

SEQ ID NO: 87416 - DNA, 540 bp, Cannabis sativa
aggcgtttgacgttgcgagaaaattggtttttgtcacgaccccaagaggacagagatttagagcaattttgctgcttggaaaggaaagaaagaatggggttggtggagctggcaactgtggggtcagaaacccaacttttgttgacaaggtcatggaagtccggttcaagtaaccagtggttctcaaaacgaaaagtttggttagaacggaacaaattaggattatcctcgagaacaacctttaagactctgtggtccgaaccataaaaacccaaatggtagagggacgaagcggggaacaaattggtccaggagttgttgacaatagcccaatctaaacgttctaaagtggtcccatgtttccaagtgaatcggtttccagaaaagggaagcggggagagagagtaagtgccaataaaatgttggaaagattgcatagcatgggagggcggaagacagtgagtgttacggtcattaaacccaaggtaatcgttaaaatcacccaaaataagccaaggttgcaaaggagcaacatcaaaa

SEQ ID NO: 87417 - DNA, 527 bp, Cannabis sativa
aataaccaagtcatttatttctctaatctgaatcttttcttagaaaaaacataatggattactaagatttatttactggattgtgagatctcaaataacacaatcttaacacatattatgcaatctctttattaaaaattacaaagttaataggaagaaaaataaacatatagcatagaatcaatatcgatatagaaattgaaaatataattattgtacaagtaatctttatataattcaatgaatttaaaaagcataaaatattgagtaaatagcttaataatacaaataattctaacattgaacagtttgcaatattttatagcctaaaagaagaacatcatattagagaaaactaataaacaggaggtgtaataaagaagtgttctgagcaaaaccaacctttatattaagcttaattaaccacttaattattccatatagaattaatgatgaatcatgtctaactatgaaattaacatattacgtactttaataattccttatatgtttatttgttttagtta

SEQ ID NO: 87418 - DNA, 1009 bp, Cannabis sativa
  modified_base (938)..(943): a, c, t, g, unknown or other
ttcccaataactaacatgataaataaaacttaacaggcagtttgatgggccaagactgcttaccatctctataagcaaaattgatctgttatgcaaattttgattgagattactttttgcaacctccaattccaagtattcctcccaaccccgtgtgacttgaagtggattgtaaaaaactaaaaaaaaataataataataataatgagttaaaatgaacatatatatatatatataacaaaaacaacctaaattttacagcttaaatcgatcacataatagctttattataaaagctcatattaataattttctacagtttatatacttgggtgaaaataaaaaagtaccttgagctgggatattctcctcctccatagccattaagctcacttttctgctacttgtaacctctcctctcctctcctctcctctcctctgtgtgtgttagtgagtgtgaagtttttttttttttttgagaaaatgtgttagtgtgaagttgaagataaagaaatatgtcttcttctttttttcttttttttttttgatgaaggagaaaccagcgtacctgaagttgcacagaggggaggacatgtcttctgtctgccactcttcttcactgcacagtgttgaggcctagctgcctctgctattttgtcttcctcctctttttaatcataatatacatataaatgtcctgaacatggaaagttatctttcctccttcttgttttagaagatgcatgctggcttggattgatgggcctgaggttattattgtcctaaaacaaaaagctatatatatatagatatagatagattttaatttatcaatggatttgacacatattgcccagcctgatttatattttcattattaaaaatcaaattctttctttcatactaataagatctatgttaattccatttttggcatnnnnnnttgacaaaaatattttattattctttgtatatttcggctggcatatattgatatggtttccctatt

SEQ ID NO: 87419 - DNA, 630 bp, Cannabis sativa
atcactgcatgatctcctcatctcgcatctaaactccatagctaacaacctgtaaaaaaaaccaccaaagactgagatcagaaacccaaatgtatgaaccacaattcaaatcttcaaaaatagtcagaacaacatatcagttaatatacaaatcataaggaagcatgaatacataaattataaatatcaaattatttgactaagtacatatttcaattcttcacagcagtcgtgtccaggtgttcctatcttggttgttttcaagcatcggcggagttttcaaggtgaagattcgggtatggcattggctaccaagtctactactcttgttgtgcctcaccacgatcaccaaattattattattttttttttttttgaaaatttacaaatttatatacatttattatgggtttgatatagggttgtacaaaaaaaatttgtaaaccgcctaaagtgaataatccgctcaaatcgaaccgaaaaaaccgataaaaattacaaaccggaataactcgaaaaaattacaactcgctcaatctgttaattgggcttgggcgggttgaaaataggtccaacccgcccaattaaaccgaataacccgaccaacccgactttggctttttttttttt

SEQ ID NO: 87420 - DNA, 1050 bp, Cannabis sativa
gatcgtatttccagtagggggtctgtcccttctggtttggaagctattttgttagctgatttgctttaatgaaagttgcaatctttgtttcaaaaaaattacttaattctattatattattttgatgtgtattaattttattattattattttaagagcattgttatggagtatttgtggtgcttattagtatgggtatttatcaaattatccacactgcacaaacagtatattttacataaaagttgcagtttgtattttttttcaaatcgcgcggtgtagtgctgtttgcagttttaaatttaataattgcagttcaaactgtaccgcattatatatattagaaagttactaatttttacaatataatattttattttctttttcatataagaacatatatatatatatgtaatatacatatatattacattactttattagagataatttaatataataacttgataattagtatatgtgttatgatgttaaaactttaataagattgtttttataataaaactttatagattgatttataaatttttattataatgttcgataatgatggtagtgtacactgctcaaactgtaccgtaccgcactgtatttttgtggttttgaaatctcacagtgcggttgcagtttgagaaattacaaaaactgcatatatgcgatttggtttgaaaaaaatattacaacccgcactacctacaccataaatactcctagtgcttagtaccttttatagataacgctccacgattaattagcgatatactttaaaagttatttttttaagttatatgagatccgatatttaattacactaatagtaatatgacatcgaagagagtactaaatacaagtgctaccatttagtaattttttttattgggcatcagtattactcaacactttttataagtgtcagattaattaataatattctccaaaaaaattattttcttaaattatataaaatctaataattaaattatatacaatctaataattaattacactcaagagtgcaccatatcgtac

SEQ ID NO: 87421 - DNA, 1132 bp, Cannabis sativa
  modified_base (836)..(843): a, c, t, g, unknown or other
tagttcggctacttggaatgatctctttccaaatgcatccttgaaacatctatctttctttgggtcggatcatcgtgctttaaagttgattcttaatgatagtggttctaattctcattctaactatagaaagagatttcattttgaaaatatttggcttgagaaccctaattttttctctgttgttaagactgcttgggatagccgtcctttcaataacaatgctttgtcctcttttcattcgtttttgtctactcaggacttatgtatttcagcacttaagtcttggaataaagagaccaatttctctattaagtctcgcatctctgatcttcaaaaggaaatcgcctgcattcaggatgctccttttgctgatcctgagtgtcgttttcgacttaaatgccttcaatctgagcttgatagtcttctctataaagaagaagtctattggaagcaaagggctcgaacccaatggcttaaggctggtgatagaaacactaagttctttcatcgttttgcttctaaacgtaagaggaataatactatcaaatttctcaaagattatcatggaaatattttctctaatcatatggatatgggaaaactagtagtttcttatttctctgatctatttagctctgatggtagtgatgccgatgccattagcctcattcttgattgcctgggtcctcctttggatgacttggattttgcgttcttggataaacctttcaccattaaggaagttaggaaagccctgtttcttctctctggggacaaggcccctggtcttgatggccttcatgcctacttttaccaaaagaattggtcaactnnnnnnnntgattttgccaaggctgttctgtcttgccttaatgaggggttgatttctcggcagttaatactacccttatctctcttattcctaagaaacagaatgctcatagtctgaaggattttcggcccattagtctttgttctaccctttataaagttatatctaaggttttagctaacagattaaaggttgttttagataagattatatctccttttcaaagtgcttttgtctctggtcgagtcatatttgataatattcttattgcccaagaaatagttcatgccattagtt

SEQ ID NO: 87422 - DNA, 592 bp, Cannabis sativa
aagcaaagactgtaaataaaaaaaacacaaaaatttctagaggttcggcccgtgatagtggtaatagcctactcccctttagattgtattgacttgtgagacaaagaacaaagtatcctctctctcaagctcttacaatagatctctgagtaattctctcttagatcactatttctctcatgagtgttttctctctgatattattcgtgtcctcaaacagtggggtgagaccactatttatatgggctcattggaatagtttcccttaatatataataaataaaatggaaaataaatatgtttccataattacaataaaggatttgggcaagtttaggttgattgcccttattctttaaagatatgagtcaatctcacaaaagtagggattactttgtgtcatgcaaacttgaagatatcattgatcactgttaaaatttccaactcacatttccaagtcggtgcatgcgaattgatcatacaattgggttggtcagatgtccttcaatgaccctgttcagaatcctgccatgcatatgcaatttggatcttcatatcaatccttatggactgctaggagtgaaacctgttg

SEQ ID NO: 87423 - DNA, 1610 bp, Cannabis sativa
aagattgtaagaacatctctactaccacgtggtgcatatcccttccccacccattcggtcattttgacaatcctggggaccatgtgtaagctattggggtctttacctcagtttgctttaattgggtcatcggtaactatttcaaggattcccatcacacaaatgacaccacctacatcaagctaaccttcaaaaagaccaagcatttaatccatttcaagagaggctatggtggatttcaaattcttgacctaagcaaggaaggatgtcagtaaaggcaatcctttttgtgtcaaaaataacataatttttacatctttctttggagatggtctaagcggcataaacctaatatttttttagcagcataagtacccaatatttataaaactgtaatttttattcagtatcaatacagacttcattttgaatttatctatacaattccgtccaaactcaatgatgtagaatctaagtcttatatgtgtcttgtttgaaataataacagggtgtgtactgacaaaattaaaaaatatatatacataattttacaaatattgtacttatagcgctaaaaaaattattgagtttatgccatttataaactcaaaactttagatattgttataaatcattttcttagggaaatacacaaaaatatgtgtttggcttgttagtagtaggaacaaaaataatattttttttttttctgtcatttctaaataaatattgttatgagacacctatggtatctaatattacgatgaaatgtcgatttaaaattgattagcgatttttttttaatatttattaaaataaaacaagtgagacctaatattgagttgcactaatagtaatattacacctcataaaaatacttggcactatgagtaccttttagcatttctctttctgaatacgatataatattttcattagaatggttaatctttcatattctctttggtatttttattatttcaaatgtagagaaattattatttaataataagatcttaaatccttttaaaaatgttgaatccaaaatacaatatagtttaattaaccgtaatctaactaaatattatccatttataaataattatattctctgttttactataacagtttttagaccataccgaacaccctcgtagtgtaatgtgacaattttttataccaactagtaactacatttatttatattagaatccataattttatattgaatgttgattaatgtaataagtgtaagtctaattagtcggatgatggctttattaggtttaaaataactaataacatctttaaccgtgttttctaaatatattctttagctaaaataagaagtgagacttgaaaaaaatgagctataaccataaaaaaaaaaatatatatatatatatatatataataaagaatggatagaaagttccttacttttttaataatattttattattttataaaattaatttacatttgataaattcaaattattaaatattattaaaataattaaatatttactaaaatataaaacataattgaagtaacaacaataaaaatgactctctattttaatgaattatttgttttactaactttga

SEQ ID NO: 87424 - DNA, 1189 bp, Cannabis sativa
gagtattctacctcacatcccatttcaaatttcatctcttatgacaaattttctcctagttttcgtgctgcaattttaagtgcttattttccgtatgggtaaaaactatagatacagaaactgttgcacttatagccaataaaacttggacagttgtctctcttcctgctgaccactatttcattggctgcaaatgggtatataaaataaaatacaatagccaaggtgaaattgaaagatttaaagctcgcttagtagctaaagggtactcctaacaatttgggatagattatctaaaaaaaatttctcccgtagcaaagtttaatactttaaaagttctccttgctcttgctgccattaataattggaaattatatcaaatgaacattaacaatgctttcctccgtggcgatcaaaatgacatagtctatatggcgcttccccccggttacaaacactaaggagaccttcctcctaatgatgtatgtaaattacataagagcatctatggtatcaaacaagctagcctctcgacaatggtatgccaaacttagctccactttaataagtaaagggttcaaacaatattcttcgggtcactttctttttattagatcttctaacaacacttttcttgttgttttagtttatgtagatgatattttaatcgctatcaataactctagtgaagctgaattgtttgaaagatagcttgattccaaatttaaactcaaagatcttggtcctttgaggttctttcttaggctagaagttgggagatccaccaatagtatttttgtctctcaaagactatttattttacaacttttaaatgatacaggttatattggtgtcaaatccgcttccaccccacaatggaacctaatactcacctctaagcaaggacataggggagttactttctaaccctaccacttatagaagtttgattagaaaactcattaacttaaccataactagacctgatatttcttatgttgtcaacaggttaagtcaatttcttttggcttcgcagcaacctcatcttcatgccgctcaacgcatccttcaatatttgaagggttccccaggccaaggattattcttccactctacttctacacaactcaaggcctataccgagagtaacttatctctcaataaggtacaacttaaaaaaattttatgc

SEQ ID NO: 87425 - DNA, 2784 bp, Cannabis sativa
gcaatagtgacatactatcacgttcattggcgaacgttatatatttatatatatataaacactcaccatataaacattcttaaactttctacagaaaaaaaaaaagaaaagagattatatattagtttcatgcagagagaaatgaaaaccagttcaactcatcatcaaatcaacaaacaccgttcattcataataatactcaaatacttttttatttctctcttcctctcactccctctctttctcttcctcctttcccttcaacccaatcaccgcactaccaccaccaccaccaccacagtttccggtgaccttctcagaatacgaccgggatactcctcctacgaaaactacatccagcgccagctcaacaagactctcaacccaaagctccgccaaatatggacaacacgagattgggaaagaaaaatcaaagtattctctcaattcttcgaccaattgaaacgacaaaatcttctctcaaacgactccaaagctctctgtatcggagcccgagtcggccaggaggttgaagcactgaggcgaatcggagtatctgactcggtcgggatcgatctcgtgccttatcctcctctcgtagtgaaaggagattttcataaccaaccgtttcgaaacgggactttcgattttgaattctctaacgtgtttgatcacgcgcttttcccggaaaagttcgttgcggagatcgaacggacgttgaggccaggtggcgtttgcgctttacacgtgtcgatatctaaacgggctgataagtactcagctaatgatttgtatagttccgaacctttggtgaagttgtttaagggttctgatttggttcacttgaaaaaaatcgacggttttggattggacaccgaggttgtttttcgtaaacgtgagaactgatccaacggtcacgattattccacttgtttttttctcatttatttgaactttaactccatttttttttaatattatataaattatttgatgatacgtgcatagatgtatgtatgtttggtttatatacatattttttttatattatatggtgagaattagatacaaccaccaatatgatatgatttaattacttttcataattgtaatgagaaaacaacaaaagagaagagaacaattgagaggcttggcctgcttaattgttctattaagaaaataattatgtgaaataagagaagtaaagtggaagtaaagagtgaatttgttaatgctttaagagacaaaaaggaatttcttgataccattgcattgattacggccaatgctaataatgtcctctaactttggattgaacttgacccactattaattaattaattaataaataaatctatatttatatcagtatctatatctatactatttatataaaattcaatttatattttggttttttctaatttgtttatttctgtcaatagttaaagaaaaggtttattatattttagaggtattcttattttctgtttttttttcttctccaactttgtttatttatcttatttttgacagctgctgcctacttttcttcttcttattttttttttctctactgttcatttttgaagctgaatttaagcttcgaactaggaaagcctaatcaagaagcaattagtccgatgtttgagaatgagtttaagctttaaactgagaaggcctaatctagaagcaattgatatctttatcaacatttgttgaatatggttacaagttttgtcatatggaaagaaagctatgaatttagggagtaaatacgaaaagcttagtgtggatctggaaaaatcttaagcagaagattttgttagaagcccgaaggcgtttccaagtaagctgggtatgtactgtcactccagatagcttgttattagtctagagatgaactttcggataacttactattagtcatggctattcatcctggaataagcacttgtacaaatcctaatatggcttgtactgaaagcgtgttcttcaagttgacaagttgacgaggattattattgttggagatgaactagatcctttaaggtggtgtaaataagccatgatatttttggagctaatttataaatctataaatagttattaatatccttgtaatctgaagtgaagcataccattatagcttaagtgaagatcgtgatagtgtaaggttgagaaagagtctaaactagagagagaaattttttttcgtaatctctgaaagtttgtgaatattcttgtaaccttgtaaatattgatatcaataaagatatagttgttactgttctgaccgagctgtagagcattgcacatggctcgaactcgttaaaccttgtgttattcttttctgttttacggtttaattcattacatgaattatgtgatcttttgatttattgtttcttaattgtcttgcgtgtttgttgatccagtatactgaatcgtaagttattgattgtttctgttacgtacaataaattagtattggagaacaatttgtaatcatgaatgtcacaaaatacatacgatgctgaaaagtttattggtacgaatgattttagattatgggggatgaagatgaaggctttgttggttcaccaaggattgtatgaggctttgctaagaaataagtctcttccaaagtctatttaccaatgatttagtcatacaatatttttacgttaaattatatgtggtattaacttttatagatacctaaatgtataatattttagtataaaattgttggaactttgtgaaatattacaaaaataaagt

SEQ ID NO: 87426 - DNA, 515 bp, Cannabis sativa
atagggtacacgtgtcaaatttcaaatgtatcctatccgtcggttattatattatataagaaccgacgacataggcctctcccacaaaatgatctatcgtttaattcccaactgattctaaatggtataatccaattctatacatacggtttttataaaaaaaaaaataaataaattcgcctctaaaggttaaatttagcttcttttttataaaacgggttgaaaaaaaaaagaagttaaaaacctatattgtagtagtgtgatcatttattcaagaataataataattcactacacagactaccaaaattaattcaaattatataaccataccatgcatgtttcacgtctacgctgacaaattaaacttatttttttttaagtatcatatgaataacgttgggccttttcagaaaactaataagaataaataacgttggcaaattaatgtccctcaaatcttaaaataaattaattttataatgtatatatgtgtttttgggtgagaaaagtag

SEQ ID NO: 87427 - DNA, 647 bp, Cannabis sativa
atagttgatgattgctctaggtatacatgggtgcatctcattaagaataaatctgatgcacaacatgttataccagcctttattaaacttgtcaacacccaatatagtgctaaaattaaagggataagatcggataatgccaaagaacttcagttccctgaactattcagttctcttggtattattcatcaccattcttgtgtccaaactcctcaacaaaactctgttgttgaaagaaaacatcaacacttgttgaatgttgctagggcacttctttttcaatctcacatccctttaccttattggggagaatgtgttaacactgccacttatatcataaatagaacaccaactcccaatctcaaacacaaatccccatttgaaattctaaattctaaaacccccaactacaatcatcttagagcctttgggtgtttagcctatgcctcaactttaggtgctgccagaactaagtttgctccccgagccattgcttgtgttttcttaggttatcccatgggaatgaaagcctataagttgttggatttaaacacaaatagagttttctgctctagagatgtaatttttcatgagcaaatctttccttttgtgactgcaggaaccatgtcccatgaatcccttgattt

SEQ ID NO: 87428 - DNA, 759 bp, Cannabis sativa
ggtttattacaaaaatttcagctacatatcatacttagcacattcaggttgatgattagggccaatgaatataatttgcagagtgtgcaaggttttccccttaatatttattattttcagtgtgaggatttggttatttggaagggattacaactttctcggaccaaatgcatttttatgaccagttgtcaagatgatccttttaggtgcagtaaattttaattacgacccctcgtcatagtacttcaattgagtgatgctatagagatacaaatatttacacctaattttgcactattgatgtgttattaactataagcacttgtgtcctaactgaaaaaagtgcggatcccatcatagctcataacaaatactgtttgtcataaagtcataacaacgttcttctaacatatgtgatgttttctgccttggctctgttgtggctgatgatgtctatgctactgttgattttgcatgttgacattatcattaaaacctttggattgttgtctattccaatactcatagagtattctaattgttgccttactattattgattgactcatgctcacgggaaatgtgaaatattattggattttttgttgtttgataaaatctctattagtggattattcagggtaccttggcataatatgtatttcctaaccactatactatttaatgtggttcttcaagggggtttatgctgattagatagaccatattttatattctcttttccacgctagaatctata

SEQ ID NO: 87429 - DNA, 676 bp, Cannabis sativa
  modified_base (624)..(630): a, c, t, g, unknown or other
tttccccttgtgtgcttattcccacgtggccagatggtggctagggaatctctccatccaacttggaaagaccccttcgagggtagtcccgtgactggagtgataacctgctctgattcgttgagataggttagccctttgttgttcctgctcaactcgttgattcttaatattttgccagttttccatgaaccagctttcaaactgtttgtgttgtttgtcgagagaatctcatagttgttgttgcaggtaagctgtgatttggctaagttgttcaacccgaggatcgacctcctcggggtctctagttccacaagtggttccccacgtagaatttgttcattagttttagtactaggagcaggttgtagccttgggggatgagctatggagctggttttgaggccttcacctggcatctgagatgcaggtgtagtcccatcaccaatttcaatgactatgtgcccccagtttgttggccagttgttgtggatcttctttcaacacttgaggagcatgttgcaaccatcttgtgggtgattctttgacttgtggctctcaataaaagtaccaaaatattgacacacaaatctggacacagacactacaagaaatgtcactttnnnnnnnacatttttgtgctggcaaaagttggtattgcgctggtaaaatagaa

SEQ ID NO: 87430 - DNA, 539 bp, Cannabis sativa
acgcattccttaatggagacctcaatgaagaggtttacatgaccataccttctggactgactgtttctacatctgctcctgcaggtactactcttgtttgcaaattgcaaaagtcgatatacagactatggcagtcatccagacaatggtacaagaagctaacagatgcactcattcaagaaggttttcagcagcctcaagctgattacaccgttttcaccaaaggacgggaagacaatttcattgccttactcgtgtatgttgatgatatcgtaattacgggtccaaacctcaacatcctacaacaacttcaagagtctttacatcaccaattcaagctcaaaacccttggcaatctcaaatactctcttggctttgagattgtccgaaccaaagacaacctatttctttcccaaaggaagtatactatacaactttttgaagaaactggtcacattggcagtaaaccagctaaagcacctatggatcctcaccacaaacttaacgaccaagatggagagccactcaccaatccttcc

SEQ ID NO: 87431 - DNA, 1381 bp, Cannabis sativa
  modified_base (673)..(673): a, c, t, g, unknown or other
aaaagagtgtaattttctctaaatttttttatatgaatttttttaggagaattgttctatactactttttaactctttttatattttttttattttacggtttaggttgttccgatgatttttatatatgtgggttgttatgtgaattttagttgtgatttagattactccgttggttgttatgtggattgctaagtggatttttataaaattacaaaaaaaaaaaaaaatgctttgaagtgtaaaagtgaaaaaacctcaaatttttatgtgtttttgtataaataatagtaaaaatctaaaatataatatttcaaaaatataattggaccttttttttaataaagtattaagtgtagcatcttaaaaaataaattgagtatttttgttagaaaatagttatattttttggagtttttggtagttaaaccctctaaactactgaaccagtagcaaagttaaggtgtcatccagttaactgctaccatggactgcttatatgcatactcttgtacacgtgacacgtttatattggtatatcgaatattattatttgaaaattattttcaaaatttattgaaaattaaataaaattataaaaataaaaaataaaaattttaaaaaataaaaaaattataaaatttgaaatattttttatattttttaaataatnatattaggtgtactaatataaatgtgtcatgtatataagagtgtacatataagcagtctatattaacaattaactgtaaaaagtagatgacacattaaatttgcaaacagttaagtagtttgtagagttttactgtcaaaatttgaactttgagggttaagtgcaagtagactgatagttgggaggatttagccacaaaattaaagactttttgtcaaagagttttttaggaatttggtgggggttttgagcatggcccctgctgctccatccttgagttgactcgaccataccctaagggctcaacctcacacacctcgagcactagacaccaaaaagactaggtctcactcaccatgaatatttgacaccttgaggactagggcttacacacacgactcttctccttgacttaagaccaaggactgccccttaggtataccgaaggactccacctcgacatagtctaataattccagtcgtgtgatctgatggcaataccttatgaaacttgaacactaaaatatatgtggcacggttgagatttttgaaggacaacattttttctcaagtttatacaaatttatagtgcattatgatgagtttgaccaatgagtatgttcgtacaaattttttaaatgaatcttgaaatttacaactttttataatcacattctgaaatagtgatcttctaaattttgaactctt

SEQ ID NO: 87432 - DNA, 650 bp, Cannabis sativa
taagctataactataatctgtgttatatggtattgtgttgtgtattatattgacgaatgccattttatataggtggtgatgagagttagggtgattaagagctggtgtaattaattttttgtacgtggtaattaaattgctataagattggcttttcatatcacttactgttacgcgtacattggttattgttattatatgtgtgttaatttttgggcatttgtagtggaatcgatgttcgtatacgactatattatgcatttatatatgcttataatgtcattttgttcttccgttaaactaaattaacatgaataaaacaaccaaaagaaactgaattatttataattgtaacatctccttatttaatggcttcactattgttggtatttatgtaaaccatagaatagaatatatatcgatacgttttcttcataaaatgatgataggaaaaactaatgagcctttaaaaaaaaaagaaaaaaaaaaaactgatgaatgtttaccattctaaccgccatatgtaatgtataaccattcatcattatcttaattgatatatcgacaatatataaatgtaggaatatgattttgtctattattatactttcacggattgtaattcgtgatgtacggtagccgtcagatga

SEQ ID NO: 87433 - DNA, 515 bp, Cannabis sativa
tactcgatttatcactttattacttgttacgattgcgtacacttgcgtatacaattttcacaacaagtttttgaagatctttatcatcgaaatggaatgttaaagttgtaaacattttctcaatataacaaaagattatatgattaatgagtctcaaactaaactagagaaacagaaacattctgctccaaatatttatattgacctgaattgaaaaatcccaaaacaagttttagattaccgcttccagataagttcatattactaaaaacaaatgtctatataattcaaaagtttcccttttgcccttccataatagaaattctctttgcatcaaacccaattttcaaaatttcagcaattaactggaaatttacagagtgaaaaaaaaaaaataaaagagttgaagaaattacgagagttgggagaagtcgagggggtgaatgaagcgcattcagagctgttcattgttgaaggtatagtagtagaaaggggatagagcgaagttgcaggta

SEQ ID NO: 87434 - DNA, 1331 bp, Cannabis sativa
ataccagctgctggagactttaaagcattggaaactaagagggcatcagtttcaacaattgagatggaaagctgctgctgtagaacccagttgatgccgtgaaacattgccttagcttccatttcgtgagatgcaaaattactaccaatagatagagagggcagcaatgacttgactgacagaatttctaatgacagcaccaacaccaatcttactgctagttttattagaggctgcatcaatgtttagcttcagagtacccattggaggcggttgccaaggtgcagaaggagcagtagatggagaaggcacctgagaggaggttgcaggtggtcgatacttcagctgtgccgcacggtagttgtccaggtattgaagggagaaggctgcaagagcagaagcagaacgggatttcttgctgtgaacaacctggttgcgttctgaccatatgcaccagagtgtgcagataatttgctcaaattcagccttggtatgagatgaggctaagaattttagatagtcccccttgtacatggatacaacttttttccaatcaaaagattggtgcatcaaacgcaatacattctttgcataatggcagccaaaaaacacatgtccaactgattcccatgcttgtcgacaaaccgagcatgcgacatcagttataacttttcgtttaactagagaagtggcaactgcaaggcatcatggataacacgccaagcaaagattttaatcttttcaggcagctgtaatgaccaaaaagatttccaccactttgattctgaagatgagctcgaggagtgaggttgttcagccaaagatgaggccaaatggtaacccgtctgaacggtgtagatgccattgttggtgtggtgccatactaagcagtcattactaggaaagtagctcaagggaatggtgagggtgcgctctacatcagccggaatgaagtattgatttaatagagcaacatcccattgtcgatccttagtaatgagattagccaccactgcattatcaggacctttgtaaagaaaaggtagaaaaaaattgttccctgggatccatggatccattccacattgtatgtttcgtccttctccaactttccatcgcaagccttctaacaataactctctgccatagagtattccttgccaagataaagatggtgagtgaccatgagaagcttcttgaaaagagtttaaagggaaatatctgcttttgagcaatcggcatagcattgatgttgggtgagcaatgagccgccaggcctgtttagcaaggagggcttgattaaagtgttcaaaagatctaaaccccattcc

SEQ ID NO: 87435 - DNA, 817 bp, Cannabis sativa
  modified_base (214)..(237): a, c, t, g, unknown or other
tttgggggcaaaactacataaaccccattccgttttgctttgtacacctccgtccaaaaatcaaagttaagtgtcatggtggactctccacgtgtatacacttgtacacgtgaaaaatttttagtggtcaacgtaatataatttcaaaaaataattataaatatttaaaaaaattaaaacatcagcaaaaaattaaaaatattttttttacttnnnnnnnnnnnnnnnnnnnnnnnntttttaaaaaaaaataatttaaaagttataaaattataaaaataaataaattataaaaaaaatattttttttattttctttttttcttatctttttttttctctttcctttttcttttcttcttcttcttcttcactaaaaaaccctaccaaaccctaacgccagcgaccacccccgaccccccttgtgcggcgtcgaagccaccaacggaccaaaagaccacacagttggaattcccaagccccgaaactcaaaaccccgacccctttgtgcagctacaccagagtgtttggccatctgtgagagaactcgaaaactgaacaaagcttcctccctaaattgagtttccacattttagggtttggatttgagactggaaatggtgagttttacacaattggctaaatggggtggtttgagatgaaaatgaatgacttttcacaaagttttggggttaaagatggaaactttaagggataaggttttctctctagctcctagttctcgcagctacctcagctggcgccatggcaaaaacgagattgaaggttcaagggaggcaaccaacaactatgaagac

SEQ ID NO: 87436 - DNA, 796 bp, Cannabis sativa
aaataaattccaacactatgaacctagggcttaaactttcccttttcccaaagcactttacacccttcattggtgagacttgcaggaaaacatgttctcccgcttgaaactcaatgtttctgcgcttaggattaatataacttttctttttgctatgcaaagaaagcatccgagccttgatctattctatagcctcattggtcctctagactaactcaaagaccccaaaattataaaaaattctaaatttcacacatatggaataattaatacacttagagtttaataaaatctctgaaattgagaaattataactctaatgcccattttttgaagatggagcccacaccatacatattcaaatataataataaaataaaagtaattaattctaattgccctacgaatttatattctaatcatgcagtcattacaattatccccccgttaaaaggatttcgtccctgaaatctaacgtgaataactctggatattgagccctcatgccgaactccaattcccaggtggcttcctccacattactgttcctccagagtactttgactaatgttatggtattgtttcgaagaaccttttcctttgtattgaggatctaaactggctgttcttcataggacaaatctgactgtagttctaaggctttgtaactcaagacattactgaagtctaacacatattttctcaacaacaaaatatggaatacattatgtacaactaataattctggtggtaaggctagccgatatgctacctgcccgaccttctcgagtatctc

SEQ ID NO: 87437 - DNA, 588 bp, Cannabis sativa
gttttgtaattagtaaaattttaggaaataaaaaactaaaaagtttagtttaaaaattttaattataaataaaaaaaataaaattatatatttagtgtgattattcttaaataataagtaccaaattttaataaatttatataattataaaattagtataattatttaaacaagtgtgtttgaaaataaaaaattttgtatttaaatattttaataaatttttgttattttgtaattattttcatgatatgtaattaattataaataaagtaaatttttattaaaaaaaacgtatgtaaattataaattaatataatttatataaattataacacatatgagaaagttttttaaaaaaattttgattaaagaaaaaaaaattaagaaactttttttgaaatgaacaaacttaaatttaattatttatattaaattaattatatttttgaatttttaaaataatacgttaattaaattatttttgtaaatatatttatgtttattgaaaaataaattatttatgtgtataattaattattaaaataaattatttcataaaatagtttaagattttaattatttcataat

SEQ ID NO: 87438 - DNA, 670 bp, Cannabis sativa
accatgttgcaaactagatttgatgaattgagaatgttaaaaactgaaactttgtctgatttttatgaaagattatctgatatttctaatgagtttttttaccaaaataacattttagtgaaattttgttataattatttaatatatcttacaaaattttaaaaaatatgaaaaaatttaacataccgtaaatagagtttaaataatatattacacatgtgattattttattttatacacaaacatatgaaatagactatttaagatactagtttctatgttataaattattctaaatttctcaaaatcatatataataatatataaccctcatttttttactttttaggatactacatttttttttcctaaaatacttctatgagcgcatgcccacaatagaaccaccaaaagaaaattaaacacctaatcacatgtcttcattagggtgtccactgaatcatgcctttaagggtttttaccatagaatagatatatatttcctacattatatatattattcacctatgtatgctttttatcaaagatattagatcgtattgtattgtatcaatttaattatatatcatatttttatataatactatgtgaaactttcatttatattaaaatattatatatttaggtgtccataaaaattaatactaca

SEQ ID NO: 87439 - DNA, 666 bp, Cannabis sativa
tcgattgtttctaaaaaatagttttttcgattgtttcttcatatttataaatattaaaaacaaataaataaataagagcttctttgaacttttcttttccttaaattaatatcaatccatgcaaaaaagagtctaaaaaataaaaaaaaaaattatttgcagtttaaaaaaatataaaaaaaaaaaattaaaataagtcttgtcttttgacatgtttagaaagttatcttatgtctttcctttgaagaagatttgagtgtcagtagcagtattgtcgtgtttttttctggtttcttggttacaaatggcgtcaagcagtagtaatgaaggtgattggatgagtcaatatgcacacattcagttagaagaagaagaggaaggtgtcctactttctgatgaacaagtagaggatgaccaagcgttcgatgataggaggtgtttggtcggtaaattcttaacaaatagatcaatcgattttgatgctatgagacacatgatggcttctctgtggcagcccggcaaaggagtctacatcaaagaattggatagtaatcgctatttattccaattctatcacgagcttgatattgagacagttattgaagggagtccatggacgttcaatagaatgcagttagtatttcatcgtttgaaaaggggggagga

SEQ ID NO: 87440 - DNA, 532 bp, Cannabis sativa
attttgttcaattttactaataggtgcttgatacagacgtaagtttgagagacacgatttgatacatgacaaagtttagaggcatgattcagtatatgaacaattaccacattacgtgtccgttaataaaattgaatgaaagttcttgaatccatgaattttaatattttcagaaaaaaatttaacgacttgaaaagttcgagaaacacaatttggtaaatgatttgataaatgttatggctaggcaaaaaaatcttaattagttttaatattgtattccttgccagcttaataaccttaattagcatgcataatggagaagctctctagtatcaaccaattaatctcattaatagtgtatacatatttaacaaatgggttaatgataggttaaataaaatgtgtaagttgtttacacaaggtgatgtaatagtatcagtattctttgaaaaaaaaatgtaataatttcacaaaaatataaaaacaacaaaaaaaattataaaaatacagttttacggaattttaaacattt

SEQ ID NO: 87441 - DNA, 512 bp, Cannabis sativa
accagatatttgtagtgtcaaaatgaacgacccacacccgaatcctcatcttttacatgtctttgcaaatgaatctatagtatgaagatgtctcctggtaagagcatcaattcacacttactcatgatgaacctgaagttccagaaagcaaatctattgggaattaatttatcaaaagagcaatgggttcaattcattctcaacagccttccacttgagtataatggatttgctgtatcatacatgatcaataattttaactcatctgacataaacaacctgcatgcagaactgcgttcttatgctgcttcttcaagtttaattttgagagctagaatcaaaattgagccagcaattgaaacaattagagaacaaatgagcagacgtattcttctatgttcacactgtggagagaaaggacatttcaaataaagatttcccagacttctgaaccattggaacgaaggttactcttttatagaagtcaaacggtgatttccttcgagcttggc

SEQ ID NO: 87442 - DNA, 857 bp, Cannabis sativa
ttctccaagaattggaatttcaaggcaatcaccacctgggactagccaccagcactacagagtttaactgcgtgacaaggcccaagtcttcgcttctaacgggttacttgcatcgattttgacaacaagcgcctcaatcaactcccctgacacctctgtgatcacaattccagctgtagaatggaagtccttgcaagctacatcaacaaagataaccaaactttcatagttcagccgttgttcatccacaaacctggccatcagtaggttggaactcggggactcccaagctgcaacaaaagagttacagggagcattaactctagctaaaataccagtacaaataggcctcaactggtcatggaaagcacgattccttgtattctagagatcgtcacacaaacatatactagaccttgtgaaagcacctctctcagccacgtgagccccccttaagaagtctggatcaagcagccatgtaaccaattctctaagactagaaaagctcagtgcttcaattctaatcgtccaaccacttgtgaaccaagtggcattggccaacgagcaagaacagaacaaatgcaagaagaatcatcaaccgctccacacaaaatactaggggtgttcattggatcacatctaatggattttggcctaatcaatctaatctagttatttattggatattgaatttggtcgtccgatctaatccaatcgaattgagtcatccgatctgatctgatgtaatggatgtattggattggatcggttccaaccattagatgcattaactagtttcctattagataggattggatccatcctatccattttagctaccatttaagttgatttca

SEQ ID NO: 87443 - DNA, 690 bp, Cannabis sativa
cacttttcaattatattgcaaaggtattggaaagtccatgttcctaaatctttcgatgagatcgtatcagtagagattcccgataaaaactcaaatatccacttgcataaggcagttgtaaaacacatgatgcatggaccttatggagaattgaacaaaaaaaatgtgtgcatgaaaggggaaaatccacgatacaaaaataattttctgaaaaagtatgctctagttacgtcagtcgaaaatgattgtttccctatttataggcattcaaataatggtgtgactgtgaaggtcagggggcaacatttagacaatcattggatagttccatacaacccatatctcctcgccacatttgaatgtcacattaatgtagaaatatgctctacagtgaaggcggtaaattatctctacaatacatatacaaaggccatgaccgtgttgcattcaacttggtctctgaatcaaataatcaagcagttgatgaaatacatcagttccagacagctcgatggatttttgtcccttaagctatgtagagaatatacagatttattgtaaatgagatgtcgctgacagtatatagcttgcatttacatctcaagaatcaacacccagttacattctaaagaaattctgatatgtcaagcattgctaattcagaatattataaaaaatccatgttaacag

SEQ ID NO: 87444 - DNA, 897 bp, Cannabis sativa
ccattgtctatcatggtctgggccgctgtcttgtttgctatctatacttccatgaccaaggggttgttgtgtgggaagtgcacgtgaataacatctgcttcattgaaggttatagtgagttcccctacccataatatttttgtctctctcttctacggccaaaagtgtttctttctattcgtgttgtaaggctcggccatacttttcctgagctttgcccgagtctccaggttgatgtgggcccccaataataacttgtagatgctcgtccactggtggtggcatcaatagattctgagtatcgtctatttgggcggcctttgattctagtcagccttgacgtatttttgcaagtgcgggtcattcgttctgatcaagaattcgatttcctgcttcaggttattgcactcattcttgtcatggccatactctgcatgaaaacggcagaacttggatgtgtctcttttacttacgtccttcttcatgggcactactacaaaaaggaccttttgcttcggttttaaagtgacacataaataatttgctttggtttgagcaaccgacgttattaccgtagatgcaaattttgatttttttgcttcaatttcgaaccgaagccaaatggttttttgcttcagttatgaaccgaagcaaaaaaaaaaggttttacttcggttcataactgaagcaaaaaacaagtgtaccgatgctatttggttttttgcttcggttatgaaccaaagcaaaaagaatttttttttttaaaaaaaaaatcagaatcatcgcaccaccaccatactattgtagatcttacaccaccacatctataaatatttgaattaccatttaaactcaaaatcaacaagtttaaaccaccgcaccaccaccactacacca

SEQ ID NO: 87445 - DNA, 621 bp, Cannabis sativa
ataaagttcctatgaaaggcgagtatggggcgtgtaacgtttgtgctgctccttgttcatcgtgtatgcactttaatcgatctctcatggcttcaaaaactgaagaattttctgacgaaacttgtcgtgttgtaaatattgcgagtcagcactctgtgaatgtgggtgacacctcatcttcctttaagaataagacatgtgacagtttacagcaagcaaacagtgaaacaagcaacctaatgtgatcctcatcttcatttatatttcttgtgcagtggtaatataagtgaatattaaattttttatttgatgttaagttattattgtgaaaattacttgtttatattaaaatattgtactaggatcagcattacaagtttttgttgagatcatatagtctggaggtttcacagtatgtttggcaacataaaagaatttacaaatcacttctgaattcatgtcaggtgttatatgtaaaattctttactttttttgtagtttttttagacaaaacttttagtattgatttgaatctaaaacccactttgtatcttgtatacaattgtgtgagtatgtccacttcgttttgatcggatgaaaggtgaggagcctttaagtgat

SEQ ID NO: 87446 - DNA, 1097 bp, Cannabis sativa
tttttcgactgacttgacatgaagttaaaataaataccaagcataaattcgaataataaaacaataaattgttaaaaatacacattacaatagactctgaaaatgcataaaaaaaatagaacctaacagttagaagtgtgatgaacaaaaggaacaaaatggaaattgctgaaaaaatcttttagtttaatagtcttttgtaacaatcctcttgttgcatgagagcctacgtaatagttttacaatcagaatggtgctcaaacttggtaaaatcaagcttggtcaccagctgaacaaccctacgaacaataacagcttcaacaatctccactgtagtgcgctcagggcagtagataacttcaacacgaagcacatgaccaacatagttatgaggagcaatgtcaagaccaaaaccaacactagtttgggaaagggaggcatcatagttgatgcaaactataggatgagaatgccaaagaggagggggttgctggttatcacactttttagtggggttggggtagttagacagagtcattttgatgaaagacaatgcccaatcaatcaatgcacacaaatctgagtagaaggcttgtgtccacaacctatcctgcttatcccacaacccaaagaatcaaaagaaacttacaagtttctactcacacttagcttttcacaaattgagggcaagtttcactcattacaaaagtgaccacatttcatatagtgaacactttcaacatcaatgattgcattatcgtatatgagactccactaccagaaaatgggcttaaacattcctaataagtaccggttttaataggaaccaatactatagagttgaattaagccatatcttgaataataactaaaactagtagacaagctgatgttgcaaaactttttaagttgtgcaattttgtgttgcttattagcaacaaactcaattgcctcttttgagagattagcgttaatatttggttcaataccaacggtgatttagtggcaccaatctgcaaccactatatataatgggtttgcacttgacattttaagtttattagagaaaaacctaaactgttgcgaaccatcttgcg

SEQ ID NO: 87447 - DNA, 1042 bp, Cannabis sativa
catgacttgtgttttaaaaacttcaaaaattattttttgttctcatttctaaaaataattttttgaaaacaaaaaacagaaaataataccaaacatgctacaattttcacccaattttctatttaggatttatgtatgggtcaatcaaagtatacaaaaacatagaaagagaaagcactaacagagtcattgaaccaacaacaaaaatttatatagaaaccagaataaactaataaatatttcacaaatataaaaacactaaaacaacacttctagaattaatagtaagagaatcaaacaccaaaaagaaagtctacaatgaaacaaaagaaacttagaaatcataacaaattattgaaaccatgtatgatgctgatgttgagccatccacatgttggtctccactctaattttcactcaattttcttcataggtggatagtatagaaaaagtactaagcatgaagagactaaccaatcaataataaaaaactaaatagaatcataataaatattccaaaactagtacctaaaaccactactatagaatgtaagaacaaaattgtgtggcctccattatattttctaactcaacttagaaagatactatactgtgtgcataagtaccaaggtaagaggcttgccgttgttgtagaccaatatgttggaccatcttactcttggctttgggatcataaaatgacagactaaataataatcaggattcatcaacacaactatatgattcaagtaagaggttaccattatgtgatacaccgaatggccagtatctacagatatttgtaggctcaagttggttaaccaagtccaaataaacatatttttactccaagaatcacacacaccatattccttcatatctcaatacatgatagtcttgctgataattttttttaataatggtgaagtcatcaaagataggcagccacacaagtttgaaatacccataatggaaaagcctttatcttttaaagatgaaggaggttcaatgagcttaaattcctcactactcaaatcaaaag

SEQ ID NO: 87448 - DNA, 552 bp, Cannabis sativa
  modified_base (323)..(343): a, c, t, g, unknown or other
gagagagagagaaagaaagagaatatggctttcacacttagaactatttggaggctaggtgacctagaggtaacttagagagcttaggtttctagggtagggttaaggcctttatataggaagccttaaaccctaggtttataacttaaatcccttgaaaataagatagttagctagatatttacataagacaaaaatgcccagcctgtctgttagagttttgggtcccaatttacagcccatgccttggtccacatgtagagttatacatggagtcctgccaggtcaatcttggtcatccataggcctacaaggaagtctgnnnnnnnnnnnnnnnnnnnnntcaatcctggtcggccatggtcctaccaggtccatcttggccggccatggtcctgccaagacgtggcaggacaaggtctgcagggtttggtaggacacaatagctccaccaagaggaggccaacctttgagtgtggaggccagccttttttaagttgaggacagctttgtacatcgtttccatgtagaggctgttggaaattattttac

SEQ ID NO: 87449 - DNA, 570 bp, Cannabis sativa
  modified_base (529)..(535): a, c, t, g, unknown or other
atatgatctgatgtagcacctttttgcaacttttatgtagaactcctctgaaaacagggataacattattaatgtagggagttttgagtcgttcaagtagaagtaatatctttaatgattttattgggttggtcttttatgatggggcttcctatttattttatggaatctgatcattttactttgatcttaatttattcaaagcattatactttctataatgaattggagcctttacaaactattatgattttcaaaatttcttagtgatatattaaagaagttttttcatttttttatttttaaacttcaaaatagtttgtttggttttattttttttttgtttgtatttttacggaattctacataaaaatccccatagaaattaacggagtaacctaaatcgcaactaaaatccacataacgacccacatagaaactaccgaaacaaccttaaccgtaaatttaaaaaaagttaaaaaatagtaagagaagtaatttttcaatagagtaaatactattttggacnnnnnnntttgcaaaagttaccaattgaactctctattttgt

SEQ ID NO: 87450 - DNA, 610 bp, Cannabis sativa
ggaatttcgtgccattttgtatggttttagaattttactacttttagtgataaattgagtcttaaaatttttttttcttgttatttaaaataataaaaagattatttgattgatattttaattaattattccaaaatttaaggaataataatttatcttttatcagatactatctcaaacttaaatttaagttggtcaattaaaatttaaaatagtacctagaatatttatgttattattatttgaattatataatggacgcgtgatatatatcctttgcctatttattttttttctacactgaaacacttagtatatgataatcactagttatactctcaaggaaaagaaatttccagtgtcagcgtacatacccaaaaataaataattgaccattcatatgccataaatctgtctaggcatggtgagattttatttttcttttttttttttttgttttggcttataacatgatatatatatatatatatataatatttaaatgaaatgtgtgttaattgtgacttgatatatatatacacctataaaacaaaaggtggtattacacctttttttatttaacttttcatatatatatatatctttatat

SEQ ID NO: 87451 - DNA, 705 bp, Cannabis sativa
  modified_base (437)..(450): a, c, t, g, unknown or other
  modified_base (531)..(532): a, c, t, g, unknown or other
tgcctttactaatccaaattactaaagcggtcattacaatacccctacaacaaacttaaaagatgaagtaactttggggtaaaatggtccgacaccataaccccgtctaaaatccaatattccaaatatttcttatgtataatacgctaaaagaaaggttctaactaacccatgtgataaatttgccttccattgcattttttattgtcgccaagcgaaaaacataaaaattataaattttgtatatattctaaataatacacttaaattaataaaatctccagaaatgagaaattacaactccaatgcctatttatgaaaatgggacccacaataaatataaattcataaaatatcaataattaatgctaattgcttttactaatccataattgaatcatgcggtcattacaataacggtaagtttatgatatctnnnnnnnnnnnnnnatcggtccaatccaatgtatacttcatacatccgatactgacatactttgtcaatcccctagaaaagacataacacttatnnaaggtgtaagtataccttatcactgattatcatgtcagtttaaatccagtgtactgacaaatcgtgagatttgaactttttgaacatataaacatgattatattctattgtgttgacaacactataatcatgaataaatatacgttctggacttaatagaatttatacactaa

SEQ ID NO: 87452 - DNA, 650 bp, Cannabis sativa
cactaagcatggaagttagcagagttacgattagaggggactctaaacttgttattcaacaagtcaaaggggaattcgctgtgaaggaatcatcattagcaatatatcgaacaatggtccaagaactagcgaagaattatagcgaatgtcgctttgagcacatgccccgaacacaaaataggtatgcagatgctttagctactatggcttccaaaattgaagtgtcagaaattcaattagtggttaaagtaatcaatcagaagtgtttaatcacttcaaggtacaagagagaaaccacaggcaaagattggccacaccaaatgatcgataaaattacaaaaccaaaaatgactcatcttaaggaaatatagcataatgtcatcattgaaggaacactttaataccgatcatcagacggggtgttggcaagatgtttaaaccaagaggaggttgtcaatcgaatgaaggagattcagaacatcacgtgtggaataaaaggtcccaaattatcaagaagattgcagagggcaggctattattggttagaaatggaggaagacgctgcaaagttacaaagagattgcccacattgccaactcatgtttaatagcactgaggcaatcttaatgactgaggttgatgattggaga

SEQ ID NO: 87453 - DNA, 2138 bp, Cannabis sativa
tccccaaacccgttgaacaatagacagggaggctacaactatgatccacgggtttcaaggcaggatggaagggggagagctgccagatcagtttctcctagagctatgcgaaatcaccaacaaggtaattctagtacaacctttgaaaaagacatcattaataacttttcttctagacctccccccaatgaggctgataatggtattctcacaaccattatggccaatattgggcccacttataaccaaatggtggaaaagcctcactctgaattatgtcaatctagacaaccccacaaacaccctgagcccactcacttcccttggcccatctatgctgaagagattgggctgactgaagaacttatggggccggcccaagtggataaatttgaacccattcctaccttatttcatgacccatctgatgtctctgagttagtgcaccactgcccacaacccagaaaaagaaaagccactttaactttaattccctatgtgcaacacctacccgagaatgcaggagaatttaactgtgaagtccctgatctccctgccttttcaccatcacccgattcatcattcaagctgggatcaggtgcttcaacgtcttccctgaaaaatgataaaagaagaaggaagggttcaaggtctagactatcaatatccaagcaagataagaagtctattgtgtcatctggtggaggaggagaggctaacagaaatcttataaattctttgaatttggtggaagtgcaagttgaagtagctcagaatttttctgtgggcgaggaggcggcccttatcaagcccccaaccgccccatgaagtgcctatcttggaattgtcggggcctcgcaagagacccgacaccccaagctcttgcggcttgggtgaagaaatacaaggtggattgtatttttctgatggaaacaaaggttaataaaagtaagatggagtccatggctcggttcttaggtttttcgaaggttgtttgtgcggacgcctctggtttggcagggggttcgtgtcttatgtggaatattaataatgatttgttggtaaactactttgatgatgggttctttgaagctactatctgggattatcaaactcaaaaacactggaaactttttgcggtatatggcactccctatcctagtaccaaggaggtgttttggaggtctttggaggaggaatgcccactgttctctgccgtgggtcctcttaggtgatctgaattgtgttcgaaaccaagaagagaaggctgggggtagattagtgaatcatacagatacaaaatggttgaacaattttttgctaaacacaggtggtattgatcttcgtttcattgggaacaaattcacttggcaaaataaaaggtttaatggaggcctcatcagggaaagattagatagagcagtttgttcccctgattggttattgtcttatgagcatgctggtatacggaatatgacaatttccatctcagatcatgcaccgatcattcttgatactcacctgtttgcggtaaaaggtttcattccttttagattctttgaggcatggtcttgggaggcttcgtgcagaagggagatagttaatgcttgggtttgttctggtaataacgctacagactcctttattcgaaacattaatagttcaagaaaggctcttcaatcttggaagaaggcaggccataacattaatgaacaagacattcaaaagatggagaagagattagaatggatccacaaccaacctatctcagaagctcttagagaggaggaagccaaaatcctttctcagatacaagtagcttggtccaaactcgaatgtatgtggagacaaagatcaagggaaatttggctttcacttggggatagaaacacgagatttttccatgcagcgactgttatcaggaaaaggcggaataacatttgggcgatcaaagacagagaagggaaaatttggaaggaaaggaagcacatcggagatatcattaacaactacttccaggatcttttcacgtcttctcggcctcaactgaatggtgttttggatagcctgtttgtctctcggattgatgagctctcaaatgaaagtatttccagaattccctcagaaacagagatcaa

SEQ ID NO: 87454 - DNA, 1872 bp, Cannabis sativa
tttccttaaaagaagaggttatttagttggcaaaatgcactataatttcaggccattttacagagatagagagagagaagcagattcagagagatagaaagagagagaagcagattcagagataaaatgggttgtggaaatttgttgttgttgacgactttgataataatctcagcaaatggtccattgaagcaggatttcccaggtccatcgacaacttgttcgatttcgatgggcccagtggacaaatcaaagaggctgttccacacggcggtgacggcgtctcactccgtctacaacacgtggcatgtactacttgacaagttagttaggattcagtttataccgttttctaactaacttccagaatctcttaggaagttgtatcgtttcttatgcatgaattgtgtatgactctattgtataaagcttcgctctctcagtctattgatcagaactttcattccttatcttcatctctctcatggcacctcctagtcctaccagaacaactccagaagtttcttccattgacaccgtaggatctcctctccaaaacaactctgttactacgactgtttcttcttcagacgccgccatcggatctatgacgatcggctccggaaccactccgttcgttcccattccaccgacttctgcttccactcaatctttcaccttctcctctgttgcgagttctttgctgccgtctttctcggctccggcgactattgaaaatcctccgattgctccaccgattcctcggatcgctcaacctcaaacgaatagttatttttatatttcttcaaaattttatggaaaaggagaagagatatattggagggatgaagaagggaagttatgtggttttaatctcagatcgcttggtgaattggaaggagacaactttaactaccattctttctgtaatggactactttgctactctcgggcatcttctacccaagctttcataatcaatccacttaaggaggaagtacttttcctcaaacagtcaccttcaccttcaagtccttcactaagaattgttaaatcatccttcggactgggtgtttgtggggaatcaggtaatgagactttcaaaattcttcttcttcaacgtgctaaacatacgaacctggctagtattttgaccttaggatctgatgcttggagagtcatccggtacccctctgttgtaaacgtagatgacttatatttctttggagagcctgtttttgagaaaggattcatttattggtatgcgccacttgaagacatcatcgtctttgatgttgagcgtgaaatattctcaatcatggaagctccaattgatacaaattgcaacatatgctcggatatggagtttcgtcttctaagtttaggagaccgtgtaggattcgtcaaagcacactgtggagttttgggaatttggtatggtaagaaccacaatagtgaaggaaaaatcactgaatgggaagaatatgaccccattcaaattattcatgagggggagctgtttgatttctcacaggctttacaagttttaggagcatggaaagacgaatctagcatgttggtctgtagctcgagtttgcctagagtttttttctgctataactttgttactaagactgctactatggtgaatatttccaaccgtcctgagaattttgcgagtcacagctttagagggtcgtctcttttgcttacggagttccatggtagttctgaactagtgtatctaccacctgaacgaaactacaacacgaggtacattttcaatcatcttttcaatatatttgattatgtttaatttatattatgctaatgattatttttattttctataacagccgaagtggtttaata

SEQ ID NO: 87455 - DNA, 908 bp, Cannabis sativa
  modified_base (447)..(451): a, c, t, g, unknown or other
tatcctggttcgaggaggttctagtgccggtggcggatgtgggcgtcgtaaattcatgagtgattctaattactttgtcaaaaaaaaaaaaactaattattatctaaatgtttgaattatatcatgagtactaaaagtagggtaaatactattttagaccctgtgttttataaaatttatcaattggacactctgttttgttaaatgacaaaatggaccctacattttttaaaatagtaaaaataagatcctgagcttaattttcaaaaattttatttttttaatataaccaactttaagacaatttctatcacaaacgattatacagaaaaagtaacgaattttgtcataacaactctagatctaattattattaagttttattttgataaaaaatcagtttagggtcctatttgtagaattttaaaaaatacatggtctattttnnnnnttaacaaaatagatagttcaattgataatttttgcaagacaaaatctaaaatggtatttactcataaaaagtatatatattacatgtatttagttaaattataataaaagtatcagtaaataatattatttaaggaaaattgttaaatgtatgtttttttatttcataaactaataagttagttatatataatatttatgaaaaacacttagggtagaatcacaaaaaacgtctgtacatacagatattttttttcattatgtgtcactcttatatttaatactaatatttaattaattcattttatatatcaatatatttaattaattcttttatgtatcaataaatttaattattttttttatgtaaaaataggtgtcaaaagcatattggttactaataaatattttggttgacatttcttttttgtaagcatagtaaaaattagaaatatttt

SEQ ID NO: 87456 - DNA, 1026 bp, Cannabis sativa
agtaaaaacgacacgtcgtttaacattctgaaaggctgctaatgcatgtagaaaatgacacgtcgttttccacaaggagaaaaacgacatgtcgttttctcaacttaaagggctgcccacaacgacgaaaaacgacatgtcattttctacaggagaaaaacgacacgtcgttttggcaaacgacagcagccatttaacttaaaaacgacatgtcgtttttccactttgtggaaaatgacacgtcatatgggtcgtcttcctcagccaaactgggtcgttttgacctgtttttcagtcacgcgggtccgacggacccgacccaaacctaatcggaaaagacaattctgttattgctaatgttagtaatgtatccgaacatttttttactgatttttataacaaaaaataaaatgatatttatgaaatagaataaaaacttacttctattgccttttatttgttcaagtcttgtatttccaattccgaaccatgtttttgtcatttgttttgttttactaatgttatgaaactatgaaaaaaccgaaatgcaactattacgcaacgttttaaatttattaatcaaactaaccatctgtccaagtattttctctctttttttcttctatcaaaataaattcctgcaatgttgaacacaactattatgaaatgatgatgcaactataaatcaactttaaaaaacttacaacttaactccaattaacatagttgttgctttattatattttaaaattaaaaaaaaaggactatgcaactgaatataccttatatgtattgtttatacttgatttggattgattgggagctcttgatcttctcgttatttcaagtcagttgttaccaattgtgaaccttgtgtttttcatcagttctatttgaattagatcttttttttttcaactattatagaactaatatgcaactatttgcacaaagcttaccatgtataattgctatttcgtggtccccgttaaataaaattcttgcataatatataaactatcataa

SEQ ID NO: 87457 - DNA, 538 bp, Cannabis sativa
tactattaattttacagaaccttctccaatccatcgacaaagctcaattgtgagtttcttagaagatgcaagaacactttgatcttcatggtcaaatagttcacgcagtatcttcaggattctatttggaggcacaactttatcaccaaactctctataaaaagtgaaaattaacttagttatatcacaaaataccataatataactgaccagaagataatcttataaacaaagtactagccttaaaactctgcaaatcacatcaattgcagttacgacaactttgacaacatcgtttcttatagctttctccatcatacgctggaatgcaacataattcatatgtcaatgccaaatccttaagagtaagagtttaatcaaatcatgcacactatatattatgatatcatccaagtgtattaaatcacacttaccaactattagatctagtgttataccttgccatgaacaaagatcagagaaaaaagaagagagaaaggaaagagaaagagtgagctgaaagagtagcttcattgaa

SEQ ID NO: 87458 - DNA, 1331 bp, Cannabis sativa
tttggcaacccattgagcaaataacaaaatacacaaattatttattgaaattatttcaaaaatacacaaaaataacaaaaaaattataaaaatacgatttcacagaattttaaatatttttacgatttttttattttatttacagtaaatacggtctttttatgttgtactcttgtaaatttgttgttgattttttgttatctgcatgtaattttttgttgttagtttaatattatttagatgttatttttatgttatttttatatagctttcttgttgttttcgtgttatttttatagaaaatcgtaaaatgtaaaaaaaatctattagcgtaaaaatgtaattgttttacaaaaaattgtgcatcatgtaactatcccttatttatttattattgtatttgagctctatctctctcatgctcatcttcttcttccctctcctattcatattcttctttatttttttttttcccttttttttcccaattgtctacaacattactcaaataaaatctaaccctctccttttgtagtaggtaacttaaaaaaaataataataaaaaagagtatgtgaaggaggaagaagatttgagaaagataagagtgtagttgtttgtgtgtgagagaggtgaagagcttgcaagcccaccctctttctcccacttatcctatcagttattgatttattttgttattgttttaaggttattttaatgtttttttcttttatttctttatcacatttatctaaatattattgtacttctctatttttaatagtaataagaaaataatgaaacttgtatgtaagttattttcttcagtatcctatattccaatatatgtttagtttttattatgttgttctactattattttttagttgttctgtttcttttcatttttgatgtcttctcctgtatgttctcttgttgtgccctggctcccttattttgttgcatttgttatgttgtttcttttcccagccaatttccatcgtttttctttatctttaagatttcacaattttaatgggaggtaaaactattattgtatatgattctttcagtctggttaacttaaacaaatattcagtggttggtttaacctgtgtaatttgaaaccaacatttattaaacatacgaaacaatagtggaacaacccaaaaacaacattataaaaactataacagctccagtattaatggatttagtgtttctgcttcacttcgccgaaattaatagtttttttctagctgttctcgtgttgctaaggtggttctgtctgtgagtatggaagataaagactttcgttttttttttttttttt

SEQ ID NO: 87459 - DNA, 790 bp, Cannabis sativa
cctgttcttcccaatctgtagtcctatttttgtgttgctggaagtctgtgattggacgagatgagtttgcaattcattacccacaatttttaatgaagaaaccaagtcaccagcagttagaactttagcatcgattgagccatctttctcgtaagtacttttatattgtcgtggatttatttgctctattggagagccacaaatctgcgattcagaggctcgattttgtgattgagaaataaggtagtcattgatgagttttctttcctccatctcatctctaacgagattgcaagtatgatgttgggtctgcaattcttcttcaacaaggaacgcctgggctaaaacatcaacgagtgtcttaggcctttgctcccgcaccttaatcgccatctccattggaagattcccaaagaagatatctcgcagaaaagtttctggaatgtttggcagcatggttgcaaccatctcgaattgagtccagaaatctctcaccgagttttcatattgtagcgccatcaacttcttgtacggatcctcttcgctctgactacagcagttgaacatcgcgatccgaaactccaaccagttcttgaatgggtcttgtgcatccaccgcttgaaaccatcgccaagcaattcctcgaagacaggctttagcaaccgagaccttcatgctttcatgaattcgatgttgtcgaaaatactcttcaatgttagtgacccacgcgtatggatcatcgccgtaaaaaatgagcttcgagttctccatggtcgccagatcgatttgc

SEQ ID NO: 87460 - DNA, 658 bp, Cannabis sativa
  modified_base (38)..(69): a, c, t, g, unknown or other
caatccgcacaagtgcagattttaaatttttcaatccnnnnnnnnnnnnnnnnnnnnnnnnnnnnnnnnccaatccgcaaaatgcggatatatctatatataaacgtacgttcttcactattaatgtttgagttaggttgtgaataggccaaatagtacgtggttataatgaaaattattaagatatatatagttttttggtcctctaattattgactttttccttccaaacattttggtttgcataaattaaatacatgaactttatattatacataaaaatgtcggtagcaatattatcaaaattttactattttggaataataggaataagacatgtatatacaattaatggaatggaatacgtacagcaataattctatgacataaagctaatattgtaatttaacactttatctatatactggaaaaatctttacttggaattaaatgtatttacgaagcatactgtatctatttataatattttgcaatttttttaaaataatttacatacgagtacttaagtactccgttacatgcgtgtctatttttactacacgcatagaaaactatattttttttaactatttttgacactctaaataattaggtatttcttgcaaaaaaaaaaatataaaataataataataacaac

SEQ ID NO: 87461 - DNA, 596 bp, Cannabis sativa
ccataggttcgatagatggtatcccaagttccatgtccaattaacttgtgataggtcatactatggaattgttgaacaatatggtactaacaccaatagcgttgctagttcagactgggatatgtctccacttaacccctatgatatcttcatgatttctagttgtagggagttttgtaattattataacagtccttcctcatctaacacttttggtaataatataggttggagttttgacctttgtagatatggatagtttggaagatcttctctacagtcccagtgtcccagtttgtagaggtaagaataggaacgctcctgtggaagttacttctgagccacaacatgaagctcccaagaagaagaaggggacaaataggaagaaggctacataggttggcattgtcattgagtctaggacagtcactccagccaacttcactcatgcaccagcatcttcgagcataaatgggtaattcttagggtctatccatcaagtctaattttttgtgacccaactagagatggtccttttggagcattcctaccccttaccaaaacatatacgtatcaagggttctcatgcttgctca

SEQ ID NO: 87462 - DNA, 866 bp, Cannabis sativa
gaaaaccaactttatcgcaccgttttacggtctcgatctctttctcagtaagtttttcagcaagcttctcctcaaactcatcggcttggactttgatggtcttctgggcctcttccttcgtcttcttggcttcctctttttccttctcgacttccttctttgctttctctacttcatcctttgtcttctcggcttcttgcttgaggtgggtaatctcctgttgggcattgtctcgtttttcacacatgaccttgcattgggatactaatttgtgagtctcgccctccaaatactcgagccgctcagagagtagtcgattggaagcaaaagaagcctagagaattgcaaacagatgaatataaaagaggtataaaaagatattataattataataacaaagtcgacataccatgaagtgacagtccaagctccttaaaagcatctcttttggactcctaagattgagaaaatcccaatcagggggaaggagagtttgaagtttacgccaacaggggaccccatatgcctcggcaaattcagacccagcttccccagctgcgatcgaccaggtctcgatggtcttactcagggaggcaatagctggggtcacctcaagatgaggggcattggtgttgggaacaattcgaggaggaacttgctcttggatctcgttgtccgaaacctcgagatcgataggctcggccagtgatttcatcttatgggcggtggttttcctttgcttattgggaggaaccacttcgggagtagtggggattgcagggttggatgtcattttgttccccttatggtccaagatgttcataacccatgtctacaaaacaagacgaggcgttacaatcattata

SEQ ID NO: 87463 - DNA, 656 bp, Cannabis sativa
gtttagaggatcaatttccacattgttctttcttggtttcgtctttttctattctctaatcactcatttattactccttcacttcactcctcatttcatttattctattaaatcttactgattgtttttagatttagttgtttatttcaccttttatgaaattactaaaagcttagcatatttaaaatgcatggagagatacaaaaatgtaaatgtatgcttaccaaaattttatgtttcattaaaatgttctctatttttaacttgtataggtgtgataatttattggtttattgtaaattaaacaattgcctcattgtatattagtgcaatgaaaatactttaaaacataaatagtacaacaaatattttaattagtacaatgaaaatatatattgtaaattaaaaaaaaaaaaaaagtgccttcccgaaacgaggtaaccatttggagaagtacttcgaaactaggcgaccgtttgaaaacacactaagatgccttataaatatcactttacatatttgtaagtctcactatacatatttttcagactttttccttactcttcataaacgatcaatacaaccataatggcaagaccattttttgttgttttttttttatagtcgagggactggtatttacaaatcataccata

SEQ ID NO: 87464 - DNA, 1608 bp, Cannabis sativa
  modified_base (1572)..(1574): a, c, t, g, unknown or other
agtcaaaacttttaaagctagactcgtcgcaaagggttatacccaaagagaaggtgtggactatgagggtacttttagtccggtccccatgctcaaatccatcaaagtacttctctacatagctaccgcattcgattatgaaatttggcacatggatgttaagacaactttccttaacagaattcttaaagaaaccatctatatggagcaaccagaaggttataagcttccaagacaagaagagaaagtttccaagcttaataggttcatttatgacttaagtaggcttctcgctcttcgaacaaaaggtttgatgaaatgatcaaagcctacgactttcaccaaaatgaagatgtaccttgtgtttacagataatcaagtggtagtatttctagtcctttatgttgatgacattttgattattggtaacaatattaagaaaatgactgacattaaggaatggcttaacactcgattcaaaatgaaagatttgggagaagctggttatgttcttggtattcaaatcattacaaaatggaagaacaaatcacttgctttctcgcaagtagctcacaatgataagctgctagagcgattctcaatgactaacaccagaggggaaattatgccttccaggcctagcatccgtctatctaaggagcagtgtcccactgatccccaagagatagaagatatgagaaaggttctttaggcttcagcagttggaagtctaatgtaggctatattattcactagaccagacattttctatgtagtaagaattgtgagcaagtatcagacaaacctaggagaggaacattggactgtagttaagcatattatgaaatatttgtaacatacaaggcattatgtgttagtctacaagggtggtgctttaaatcttgtaggctatactaactcatatttccagtcttgtcttgatgacaggaagtctacatttgggatggtatttactcttggggtggagaatttgtttggagaagtgctaagtaaaccacaacatcagagtctactatggaagtcaaatacatagctgccgctgaggctgctaaggaactagtctggctaagaaggttcttcacataacttgttgttgttcctggaatggaaaacccattagttttactttgtgacaacactggtgctataactaacagtaaagagcttcgaagccattagagaaccaaacaaattgagaggaaataccacatcatcagagaatatgtggcaagaggggacatactagtggagaaagttaatggtgaagacaacttagctaatccattcaccaaaatttggcctttaactgcatttgaaaagcacagactgaatctaggattaattgaaatgtactgattgttttatgttattgtaagtgggatttgttgggttttatgccctaaataaaactctatttccatgtaatcttttatattcatttatcaataaagaaatagatttgtttcattacttatttaatgtgttatttggttcatgtgatcacttgtttgattgttaaattcatctaaatccttatcacattgatattcnnntttattgtgttgtcaacacaatggaaagtaatca

SEQ ID NO: 87465 - DNA, 530 bp, Cannabis sativa
  modified_base (480)..(505): a, c, t, g, unknown or other
gcaacactttaggtggattaattatattttggtttaactaactatatggatgccaacatctaataatttattattttttttatttaaaaaaaagtaacttaataatttctgaattctcttatatagccacattttatatagaatagacatatttatgactatgggataacttattgaaattttttgcctcacttttcactctatatatacatatactgtatacacatgacatcttccacatctatatattgcttgaaaaccctggataaattttcaacacgtacattagcgtttaagaattatcattacttcaattaattctattgctagctagatatgcagggaattctcacccatatattgctttatgtggaaatacacaataaagcaattaatagatagcgacttgtatttgtttactctgacctatatttctctatgctgataaaaatatataaactgttataaaataatataaannnnnnnnnnnnnnnnnnnnnnnnnnaagaagaagatgaagagagaaagag

SEQ ID NO: 87466 - DNA, 991 bp, Cannabis sativa
  modified_base (936)..(939): a, c, t, g, unknown or other
cgattgtaatcatcaactaagaaaatattgcttcttggagtgattaggcaccttgtatggcccccaaagatcagcatgcacatattcaagtatcttcttagttgtgtgccttgctggagtgaacttcagcttatgttgtttccctgaaacacaagcttcacaaaatggtaaggcacatgaatttaaatttttaatgataccttgtttgtgtagttctttgaggcctttttcattgatatgtccaagtgtgtgatgccacaacttcatgtccaattctagtcctttcaccatactttctcctcctgctaggacaatttttccttagacaacatataaaccattaatcttctctcctttcataataatcaaagaatctttggtgatcctcaagtttctatgcatggatttgtatctatatccttcatctttgagcgcacccagggatatgaggtttcatctaaggtccagaatgtcccttacatttgtcagcaccttgattctgtcataatactttttgatgtccaccttcccgattctaatgaccctacaagaatgatcatttccgatcagaaccctacctctataaattgacctatactcaaaaaatgactatcgacttggacacatatgataaatgcacctggagtcgggaatccactcactcttcattgaagattctgagatggagaataattctctgcctgtagaacagtcatctctatctttcgcgattgcaacagaatcattcccgtggtgatggttccagaattctttcctatctcaatttgagatttgttaaagccttgttgcttcttgtgcttcttgcaaaatctttacaagtgtccagaccttccacagaagtaacacttccttccttccttccttttggacttcgatcttgattgagattcatggtgtttatgttggaaattattnnnncaggatcttagatctactcaagatcggaagagcgtcgtgtagggaaagagtg

SEQ ID NO: 87467 - DNA, 559 bp, Cannabis sativa
atgatatgaataactctttcatgataaaaaacatgttgatgaaagatgttattatatatcggtccagtcatgtataatcaaattatacagagtacctttactacatgtgtttatctatatatatatataaatataaatatgatccgcatcaaaatcacatgtactagagtatagtgcatagcaaaccacttgtaattccatattaaagatttcataatttaatacacactaccaacttgtttaattcatattgtatgatcttaattttcttatactaccttacaagatcatacgttctctatatgaatatagaatttttagatatttattaattatgcttctataattaatttattaatttatcttattattttatttcatgtattctataatatattatctattaaatactttcttttaggacataaaccttaacaatctcccacttgcactaaaagtaagtgtaatgtagtctacaactcttatcgatattatttctcatttgattattcatactaagtcttgtgaataatactctccacataatgtagttacagat

SEQ ID NO: 87468 - DNA, 511 bp, Cannabis sativa
taataacaattataagaaaaatacagtgatgacaacatctttgaatgtagaaaattaataatatatctataataaattaatttattaaaaattattatttattgagttcaaaatatttaaaataattaagactttacaatatatattttttatgttattaagagtaaaagaatgaagatttagtagaataattactttatattattaaaaagagtatacaacaaaaaaatatcaaaatttaaaatttagtataactctaagtgttttgcttggtgtaatgatttggacgctttcttagctgatttggctagttattactttcgagttttcctaagacatctctagttcatgtctccgttcataaattagctgtgcatgcacttagtgggtggatggtgaacgagcttggattgatagttttttatcatttcttatagatattttaaactctaattattattaataagagttttatttcaaaaaaaaaaaaagttttttcatttttacactt

SEQ ID NO: 87469 - DNA, 706 bp, Cannabis sativa
taaaaaatagttattattaaaaaactataacaatattaaaatataatatttcttcgtatatatgataataataatgtaattaaaatttatgcaattacatttaaaaaaaaatgctattaatgaatatatgtaatataaagaaccatataacactaaattaatgttaactatttataataaccaaaataatgttatagtatgctatttaataaaatgtaaaaaatattattaaatatcaatacttttaattacatacgttatcttaacagttgcttaagtgttataaaatatatttaattatagtttttaagtatgtaaatatttttgcttgtagtgatatattaggtggatgatcacctgtgggagcatatccatcaaaggtatcgagagtgggagtaattcctcactatgctaaggatgaatcggagatgagatggttcgatgcagatcccgatgcagatcccttcttcaccccttcggtcatattggcaatcccggagacctcatgtcagctatagggccttatatacctcaacctgccttaattgaatcattgataactacctcaagggtcatattggcaatctatgagatcttatgtcagctataggggtcttatatatatacctcaacgtgcctttattgagtcatgataactacctcaacggttcttatcactgagatgataccacctacaacactaagc

SEQ ID NO: 87470 - DNA, 628 bp, Cannabis sativa
ttacaaacacatagggcgcacttattaagaatattataaaagtacatataaaaattttactaaccatagttttgtctcttttgtgtatatggtaatcataaacaccacatgaaaatcaagaaaaatgaaatcacagagaaagatcaaaacaaatattttttttttttgcagtaatactcaagtgaagaaaaaatgacaaaatgagcagtagagagatcaaaaagaagtaaagcaaggcacagagtctcgtctacaaatgaacttatataatgattaatttaaacatctataaatttgaagaaaaaaaattcatagatggcagatcttaagtaactaagaaataaagaaacaaacctacaaaatgatgatcgaaattgcggaactcttaagagaggagtagagcactacacattgttcgatacctagctaaactccatacctttaaaattgaaaccagagttgaatcaataattgaaatgaattgaaatctaaaaacatgaattggatacctgtaaaatcaaaaccataggtgaaataaagcgaaatctaaaaatatgaatctgataacagtaaaatcgaaactagagctggaactaagttagagatatgagagagatagatatagatc

SEQ ID NO: 87471 - DNA, 655 bp, Cannabis sativa
catgaagacatcgaactatggctggctattattagtctaagtcccaagtctctgttacacaaaaacaatggttagctgtattgaatgtgaaatatgtttcaaagttttttttatgcattaggaatgcacatgcttttagctaaggtgcccacctcaatgttccatgtcttcgtattaagcaggctaaccacttttctctttttttgagtgctcatttgccacaaaagtttcaattattgtcataacaatggagaaaagattatttttccatctttttttctccttttgatgttaccctcacaactttttcccacattcccaatgtgtactagtacttcattgttttctccttccctctcaaatccataaaaaagcaatttttttaattaatcaatttcattaatctttaaaaagagaagagagagaaagagaaaattgcatggtgcttaaccaggttacgggttacctagttatcaagtatataactgagtcgataactgtagtagtaacagttcttgatatataactgtacatatgaatctctgcaatcaacatcccaccaagtggcgacatcaacaccactttgcatggtaatttttatttttatatatgaaatttgtttggtttcgttttttgatattagtgaagggggatt

SEQ ID NO: 87472 - DNA, 820 bp, Cannabis sativa
tgagcaaggcctaatcagcaccccttacatactaggatagctccataaacctcatgtagtactcattcacccgcatctattcttgttggatattctcaaataaattttctaaggccctatgatgactagcgttaaaatagttggccttgaaaaatcctcaaatttcacccaatctattgctctttcccctcaatagatacatacagttttccaccaattcatagcatcctccatgaattattttatattgaatcaaccttatactcatttggagttccaactgcattaagggctctcttaacacctttaaccacctatcagtgaaaataagatcaagtctaccatcaaacttattctggaacacccgcgtgaagttctttaggttttcattttttctaacaactgcattaatatgatcaaccatgggttgtttttgaggaagagcttcacgcataacattttaattttctttgatttttctttccaagaggcatttttaatctatacaccaatatgtcaaaatgttagaatgacaatgatgcatgttaatcaaagaaatctataagtactataaacctagcctaagtacatggtcacattctcaagtataaacttcggctttgatacttttttttgtcatgactcgggctctaagtagtgactaaatgatagtctgaatcatttataagggttcttggggaatttttaaactcctttggctaaagattcaaaataaaataaatattcaaaacaagtaattaatcatttctataaataataaaattatcaaaattttaaagtagaactaaaatatatctat

SEQ ID NO: 87473 - DNA, 569 bp, Cannabis sativa
cataaaccaagaatttcagttatataggcacactttatatagaatagatatcccgtaaaaagttgcgcactatttcttttgtttttgttgtgtttatgattttttatttttcttctttcttccctttgtgttgcttgttttcacggtatttttccgccataagcgaggttattcaataaacttgggaagagatcactcatgaaaatgtgatcttcttctcttctaaataaaaaaaatagtattgtttagtataattaatagagtgaccagggacattaattgtttgtctcttcttcttttagagtacttttagttgttcttattagttttttttttttacctgtttcctgatatagcaggacatggtaatttttgacatttgactctgatcttattcttcaatcctatgataaatcatgtctttggcccaactttagtcaatgtggttatttgcaggtggaagagtcactgttgaaactgttatatgtaatttgtatctaaaaagctgatgagactggggaaatcaattcagtttctgccttggacttagctgtaaactctctcttctt

SEQ ID NO: 87474 - DNA, 660 bp, Cannabis sativa
  modified_base (459)..(464): a, c, t, g, unknown or other
aaagaaaaaaaaaaaaaaatataacaacaatcacaacagtggaggaatccataatttaatcctcgacggttaatacatttataatttggtgggggattaattacattttttttctttccaaaatttgaaataataatattgttgtaatatatgacctaagtaattaatattatatactttgtttgcctaatcaattttctgcacgtggtttacacttataagagataatgtaactttaatgtggtctactttgttctttaaaatgttttattaaatttttgtttttttatttttaactcatacttttatattacaccatgtattaaatttatttttttaaaaactttttatgtaatttaaatataatatcggtatatattttattaacttaaaaaaataaaaaaataaataagacgttaacaaataaataaccccataattaaacccaaaaaattaaannnnnnttttttaaattaaaaaaaatatcttacccacatatctctctaacaaatcctactatttttttttttgaaattaaagcctctctcaatttcacctactgaaacagaatgcaaattattcatttatttccttcggaactcataatataatacttaatataaaacataacatacgtgcatcgcacgtaacaatatacta

SEQ ID NO: 87475 - DNA, 781 bp, Cannabis sativa
ttcaaagctttcactaaaaatattaatttgtgaaatttgatgtgtctttgcattcttgattcctcaatattgtttcaagatgcttggtcaactctttataattccgcctaccatgtccttttttgtgacaatagtagcacaccacttctaagggcatgaatgagcgagattgatgtctcttctatcatcatatcttcctctcaatgtactcttacctcgacttgattatgatcttgtcacaaaagatagcaggaatactatgataggcttcaagaggtattattttcttttcattagttagatttaatctatatatattatggtgggatccttcggctcatagttcatatttgataaaaaactatttttatcaaatctgcttccacttttataactctgatatggacaataaaaaccaacaaatacaataaaagagaaatgaaacaacaagttatctgaatagcatggatggagcatcagccacctactgattccccatccttttctgaagcagtttgagtggaggtaatttctccatcatcttggtctaagaacacatatattctccttgaatattctgtgtcattttgaactgaagacacttctttcgacattgtctgagataagatgacaattgcattctaagcagtttcatcatcctgcttcagtggcattgtccaagattcatcagcgaagccagtgtcagcatacacatgctagcatgacatgatcaacccaaccttccgaaaatttttaatactaaaaagagatcatcgatctc

SEQ ID NO: 87476 - DNA, 600 bp, Cannabis sativa
  modified_base (412)..(417): a, c, t, g, unknown or other
ccactcattgccaattggttttgagatgaaactccatgattctcaacagggtttgaaaaggaatgtttgttgtgattattgtattgaagaggaggtattggatgtttatataggtattattaataagagtgaaatgctttgtttattaatgacatggatttctatctctattgcttttatgactacacaactacacatgtgctcgtacgctggacaagcatacataataagtacatttttacttacacatgtatattttagggaaatttagatggtatagttatttttttacaaaaatattgttatacggtattttttatttttttactgtattttttttataagtttcatattacagtatactgtgttaagttttcactgttgttatactggtgttttttagttgttctannnnnnttttgagttgttctattttgtgttttacttgtgctttataaaaacacagacgatatttttgtaaaaactaacccaaattctaatatttttgtaaatttccctatattttattacctatgtaagacaacttagaatacgatagctttgatggttgagaggggtatttgcatacataaggaggag

SEQ ID NO: 87477 - DNA, 1274 bp, Cannabis sativa
  modified_base (555)..(557): a, c, t, g, unknown or other
  modified_base (1230)..(1248): a, c, t, g, unknown or other
cctcataactcaaccccatctctctcgcatttcagcacatgcattggactccatcagggtccccatcggacctgtcggacccacaaatttttttagtataaaaacataaaaaaaaaataaaaaaattgtagtccaatggtggtccaatagtcaactaatgctactttttttatgtacaaaaatataaaaaaaaataaaaagaaattggtagtccgatggggtccgatggtcacttgatgctacttgtttttatgtacaaaaacataaaaaaaaattggtagcagatctggtctgatggggtccgatggtggtccgatggtcacccgatgctatttttttatgtataaaaacatacaaaaaaaattggtagcagatatggtccgatgggtctgatggtggtccgatgggtccgatgggggtccaatgaggggtccgattgtgtaaatggggtgatgtaaatggacggtattttgaggatatcataaaagttgtcatatcctacaaatatcagttgttatttgtttagcaaatttttttttaaccaaatgtaagcannnaaaatcaaatttccctacaaatattatactgttgtctttgtcgaagtaaaaaaaaaaaagactaaaatccaactattatgagtatttttatttttcttatctacaacttttagacaaatattatctttatttatcaacaatttagagattgatttttattttttttttcttattttacacaaatttaagttgtatttaattgttttattatttgaacattaatttttagcttatttttggattaacttaagagcatattactatgaggatattaagattttttaaacgtattcagtatttacttttaattatcaacattattaattacattatttgaaaatacataataataatctcaaacaataactaataatattttttctttaattatttattgtattatttttaaataaaataaaaaatacttaacataaaattaagtatatgtgcctcgcacgtagctttttgatagtataatatatttgtgtatgaaaacttaaaatataatcatgactgagataatacaaatattttgatactgtgaaattaattttaatataaaaataaacatataaaattgatatgtaaagccgaataaattatatatggggagttatatttgtaccccttaaacttataaatacaccccattattaaaaaaaatataaacttnnnnnnnnnnnnnnnnnnnctcttaatattttttttaaaattttt

SEQ ID NO: 87478 - DNA, 1255 bp, Cannabis sativa
  modified_base (304)..(317): a, c, t, g, unknown or other
tctttgctaagtgagttcagagcgaaaagagaggtttttggcttcaagtttgctaaagtgccttcatcgaaactgctcgttggtttgacgttacttgaatctagacatttgattcttgagtaagttctcaatttcctttatgtttacttttgcatgtttagtttttgaatgcatcttctactttgttgtagaaaatatgtaggaaaccctaggtttagaaactctgcgattcttctttgtcatttcttcatgcaattttacagtccataatgtttgctttctgaactgcataatgcctgtcttnnnnnnnnnnnnnnctaagcttcatgaaattttttgccttaactcgataaaatttcgaacttcctgagttttgacttttcttcaaacattcttattctttaatttgttgagtactcctggtcggcatatttgcttgttttatcgttcgatattccgaccaaacactcatcttgtgtgttgtcttttatagatgaacccaggtgagttttgggagagcgaacatcaaatcgaccacgacttgcttaaactcttgcacgaggaccatcctcgtctctgttctagcccacctccttccagtgaaaggcattctccctcaaatcttttgtccagccatagaaggatggctcgtactaagaagacaacgcgtatggccgacgcgtgtgaccctcaagttgctcggcacgccactttgcctagcgccaaataggatccaaccgtccaggaggagggggatcatgaaggggatgctgaggttcaggagattgaggagcaggacgacgtacgtcctagcagtccctccgaggcagaggaagaggaggaggttgaacccccaaactacgggggatacaatgaggctggggagccagtcgatgctgatggagacaacctgttgagggcatggactacgtcagtgaggaacttactgctgcggttcctcacagaagacaaggtgccttgggtgccaggtgggtgagtcctccgtccagggttactaaggcgcacctgcggtctctcgaccagggtggctattgggcgaattggtctgctaattcccgcccacaataatcgtgccgcaaaccttgaaagagggatgtgcacttggtcgggtgctcatgcccagcgaggggcatttttgcctttgcaccagtactttaagaatgtggcagacttcttcggcctctacccggcccagttcactcccaagggtattaagtatctgtctgccctcttc

SEQ ID NO: 87479 - DNA, 570 bp, Cannabis sativa
ggcataaaacccaacaattacatgcttggactgataagatcttttctgttggtggtaaggaggttctactaaaggctgtcattcaatcgattcccacatatgcaatgagttgcttcaaacttcctgttaaattttgtcgagaaattgagagtatgatgtcaaattattggtggggcactactacggataagaagaagattcattggaaacaatggaaatttttgtgccaatctaaaatggaaggtagtttaggatttcgtaactttatccatttcaattaagctcttctagcaaagcaagcttggaggttattccaaaatcataactctcttctattccgtgtactaaaaggtagatattttcccaagaatgattttctctctgctgcaacttgtggtgcctcttctctcacctggcaagggatctgctggggcagagaattactgaaaaaaggacttagaaagaaagttggtaatggtcttagtatcagctgtgcaactaacccttggattcctggaaatttgatattcactcccatattttatactggtaatccgaatagtgttgttg

SEQ ID NO: 87480 - DNA, 833 bp, Cannabis sativa
gtcttggaggaggctcccaagccttggattcttgagctggggaagaagtgaagatggatatcccttccatcatcgctgccgaccgagataattgatgagatcagtagtggataactcatgagaggagtctactatgacaagcctactagggacccattggcacacaacttagcatttaagttaaggagtggtaaacaaatcgagcaacctgtgttacaacaaaaagagggttaaagtaaagatgtacctaaaaaatttggtacaattgaagaagagctaactgaagatagtaaaaacttaagagtccacctattatgtttgattagcatgtgcatgtgccatatcctcaaaggcttaggaaaactacacttgatagacatttttctaagttttcggaggtgtttaaaaagcaacatatcaacactccctttgctgaagccttggaacaaatgccctactgtaacaccctaatagctagggcacgttatggtgtttttcttaattattgtgctaacttttgttaattaaatggtttcaacatataaagtatatttaataatttttttgagataattacaactttactaaacaaaaccacttttataaaatattacaatctagaatcctgaaatctagttacgaaacacatatgtaatataaagtatcaaaagttgtcatctaacgacttaaccaaaaagatgttagtgttgtctcgaagtttgcaaatctctaggcttagactactggatatgtacaatcttcaccaagctcatctctcactgcgattcaaccttggctttgcctttttctacacataaatatatatatatata

SEQ ID NO: 87481 - DNA, 622 bp, Cannabis sativa
acaaaaatataaataaagtaaagaaaaaaaatgaggataaaagttacaactcaatgctaaaaataacaagttaatgtaaagaatatatataatagagtatatatgatatagaatatatataattatatataatatatattagaaatatagagtatatataaaagtgtatataataatatatataatatattactatataagagtgaaataaaatatacaagtatatatggaaaagtaaaaaagagatgaagaatatataatacagagaatagaaagaaagaaacaaatgaagaaaagaaataacccaagtggtgaaggaagatcatcatgaacaaggtttcaacaccgttgtctaaaagtttatttttctctttataaaacatttagggttttgtggaaatgcttttggaaattagcaactctctagactagactttgaagccacactcacccgctagattggcgatgatgaaaaagtagttaagtaattataagaaagacacacaacgaatttatagtagttcactccttatatatattaagatagtaatggaactacgtctacttcgagtttttatttttcacgagatggtaattacaacaatagactaagtgtcaaaag

SEQ ID NO: 87482 - DNA, 631 bp, Cannabis sativa
cacatagtaactaccggagcaacccaaatcgtaaaaaaaaagttaaaaaagtatatagggtgattcccaaaaaaattatatgtattaaattggtaagaaaaattatgtctagttgttgactgaaattttttgcaactattaattagagttgtttgtagtaattaatggaagttaaagaagaggattttttatgtagttggggcattaatgagccttagtctacgagttactattattaatgagtatttttctctttcatacattattgggatatttatagactcataatagtggtaaaaaagccactattgtcgtgtatatacgaaccatgctttgtataattttctagatttaaacatagggcatgattgcatgttctttacggagtatttaggcttgttataggcgtttagtgagactagacttgtctcttgataatgatttgatagctcataatgtagccctcaaatgatgtatgggatattatgaaatcaaagaattatgggtttaaacccttgattacgtattttcagagtaaggtgtagggtgttcttccccatgctgcattaaatgtgtgtacagtgattcaacgtcgagcggcaaactgtgctccgcatttcccctatctctt

SEQ ID NO: 87483 - DNA, 619 bp, Cannabis sativa
ttcgactgtcatcagaggtcatcgtcttgatggtttcatcaatggcagtcggccatgtcctgctgagttcattctagcaccaacaactactgaaggtgaacctggttttggtctcaccatgaatccagagtatgaaaactggattgtaagtgatcagctcttaatgggctggttgtacagctctatgacagaaggcataacaactgaggtgatggggtgcgattctgtagccactctttggaagtctcttgagaatctctatggagctcattcaaggtctcgaatggatgatactcgaaccctgattcaaacaactcgaaaaggatctacgtccatggaagattatctgaaacaaaagaaggcatggtctgactccttagcccttgctggtgagccgtacccagaaaaccagcttatctcaaatgttacctctggtttggacatcgagtatttgcccattgttcttcaaatcgaagctcgaacttcaacaacctggcaggagcttcaaggaattcttcttgcgtttgataataagatggagagacttcagaatcttagtctcaacagcaacaacaaatcgactcaccctcctgcatctccaaatgccaatctggctaat

SEQ ID NO: 87484 - DNA, 693 bp, Cannabis sativa
tgcctttactaatccaaattactaaagcggttacaattttactccacaaagcatggacaacatggttgaatatatgttactaggatctagatttactaacaagtttgtttatgaacatcctaaatataaattatctaaaacaatgtaattaaacacatataaagtttaagtaatcttacattgatggcagcagaataatgtctcctccactcaaatctttaacccttgtttctttctgtcgcagagtattatcaagatctgagcctgattctcctttaagtgttggatttttcatagtcttacacaataagattgagtacttgacttgatatgggtgggcatgtactctttcactatagggtcgaaatttatgaagagagagagagagagaggatttcaaaataggagaaggaaaggaggctctcaacaacgctagttgtctaatagaatgtaaactaggttataagagttggatgagaacgagaccatcatattccttttatactatttcacctagggttaggatttaaattatatcgaataaaaaatgataaaatagtagcaaaaataaacacataatggttgaccatatagatgggctccactggttataattttacaatttttcaatcatttattttttatttcactaatgccatatttttttaaattttaattctataaatgccaaaa

SEQ ID NO: 87485 - DNA, 557 bp, Cannabis sativa
gagcgaggccgacttgttgattggggtcttctcagggggaacaacgtgcacctgctttcttggttcttcgacagagaacgaaccaaaattgttggggaggcttgtgttcttcaccttgaggacaaggtgaaactcgggcggccggtaatgttaggacctaggattagggtggtgtgctagcatatattaaataagagggtaattgagtctttgtattgagggtagtgttttggagggaatacaatagtatatatagaatattaaagggaattgagtggtatgcaatgttttgagtaaatctctatttgcaccaaaggggcctaagggctcctatcctttgtaattggatttctcaatacattcaatatacaattcctattatttgctactgttttgctcttacttttgttactgttttattgaataattgagttggggttctcgggtcttatcaatgtggtttcgtaaattgtcattcttgatcttcaaaaaaaaaaaaaaagatacttttgaatccttctgtccatttgtacagttcttgctaacataaaatcggg

SEQ ID NO: 87486 - DNA, 779 bp, Cannabis sativa
  modified_base (366)..(370): a, c, t, g, unknown or other
aaggcattaacagttatagatcactttggagtgtaaaagattattaatgaataataaatgctcaaatttaaacaataataaaagattaaaataattgactattgagcgaaatattcttcctatatttctcatagagtattagttgaagacagatccaagcgtgtacgctgagttgatgcacgtaccatgtttatgaggacttggtcgaggagcaacacaatgtgactgagcagaggcttgctagtttaactaaagagcaaggctttgcagatgtaattgaggaatagggttcgcaggtgtaatcgtagcccagatcttgccggagggtcgaggagtaggtcttcactacaaatttttttacttttnnnnncaacaaaacttgtgattaaaagtgaaaaaaattgttactaattataagttattatttctatgttgtgactaaaaggtccgtggctataggtattagtcacaaaaattataacttgttgtaactaaatgtatttttaatcacaatacttgttgtgactaaaactaaattagtgacaacttgtaaataaatactatatgttttaatcacaagtaacattttgttgtgactaaaagtcacatttagtaaaaaacaaatatattatgactaaaaagttgtaactaaaagtaacacttttttgtagtgcttggggtgtacttgaacactagtgttgaggatatatccaatgtgacaatagtctcatgatccgtgttaattctatttttagtatctttaatttgaaaaaacattt

SEQ ID NO: 87487 - DNA, 749 bp, Cannabis sativa
ttcgtcttgggcccatatattttcagggccggccctgcttgtaagagatttaagatttgatattaaattatatttaaaaaaaatctaaaaatacataaacaacatcaaacaccactacaaaaatataatgttattagttatcatatggtaaataacaatgctcataaattatataaatatagatgatctttgagatctttaaacgaatctctcctttatagacaaataaactaagctatttaaattctaattttttgactcaataaattaccactagaaaagagatttaccattcccctacaaaaaaaaaaaaaagagatttactatagccaaccgcgtgacatgcaataacaatatgaacccttttaacttttacgttgacagatgttgattctccataactaatcactatacctttcaaacgacgacgtttagttatttataaattctctttgttaacgtgtcacatttctgatgagtgatgatacattgataccccaaatgtaaccccacgcgccacgcattccactcgctacctcgaacgttcagcttattaagtaaaagaataaaaccaaaaaagtaaaagcaacacaaaattgaatgaaacgacgacgtaaagctcttaattaataaataaataaacacaattagtcaacaaaattctgacttaatggacacgaacctaaaataaatcaacccacgcgccatgagattaaagtgggccctatctccaaacaacacgcttcccg

SEQ ID NO: 87488 - DNA, 737 bp, Cannabis sativa
aattttgttatgtatatagcaaatgaaataatctttattcgggttaaagaccaaatcttgattttggtattttttggaaagtttccctatttaaataatcaaatttaatgctgcaaattaagagttttttttaagaaagtctcttcaactagtttcaactttcaaacataaaaaatgctcgctacaatagaagtatattttctttttttctaatggtttgaggtcagtagtttaatttatagactaaatctatttttaattttatttttatcgagaattactacccacattggtattggtagctgcatttaagccgtatcgaatcttatcttttatattaaattaaaatattatatgtatgagcattgttattaggcaccagtgatatctagcaccttcttgacatgtcgcgttgcgatactcctaaaagctattatattaatttatatgggacccgatacttaattggaccaatagcgatattgatacataaaagagtgttaaacaccactggtaccctttagcatttctctatatgtataatcccatgttaaattataccaatagaggtgctgatccaaataaattgtggtaactggtaagacagaagttgaagtataagaagttgtccattacagaaaccaagtaatgcttcggaatgcactgtacacaagcattgaaaagaaagtgtttatccacttgggaaccttccgtacaaccacagtctagtctccaaa

SEQ ID NO: 87489 - DNA, 1537 bp, Cannabis sativa
ttctcttttgtaagtccacgaatggggaagtaactcgtgtgcttcaactgctacaactttttgcaatggctactggtcagagagtaaattttgacaagtcctcagtattctttagcacaaacacctcctcgtcaatgagacaagtcatctgtactaggatgggcatccaggaggcggctgagcacagcaagtatttgggtttaccaagtacggtgggaagaaataaaaatgttgtatttggttacctaaaggataaagttcagaagaggattcatacatgggataacaagttcctttcaagagcgggcaaggagattcttattaagtcagtggttcaagctcttccagcttacaccatgaatgtctttctaatacctgttggaatttgtaatgacattgagcggtccataagtcaattttggtggagaacctcttcaaaaaaaggtattcattggatgagatatgacaagctttcgactcataaagttaatggtggattgggttttcgtgactttcgagactttaatctagctttgcttgccaaacaagggtggagacttctcacaggaggtaatagcttaatgaaacagatttttaaagcaagatatttttcttcgggttcttatctcacggctacacttgggtcaaacccaagctacatttggcgaagtgtcttagaagcacaagggttagtccgggcgggtgttcgaaagttagttggtgatggctccactactagtgtgctcttagatccttggttggtcgatgatttgaatccctttgtggagtctagacatcctgcacttactggtgcttttgtgaaatctcttatgaagattgatgagaacgaatgggatgaagaggtaatctcggatgtcttgactgagagagaccaggaattaatttggaaaattcctccctctaatggtaacagcagtgatacgtggtattggacgaaagaagataatggtctctttactgtcaagagcgcttataatcttcagcaagaaatcaaaggcaataatgaaatggcggcaaatttaggcttttggaaacaactttggcaattgaaattgcctccgaaagttcttaatttcttatggcgagtctcaactaattgcctacccactcggtttcagcttagagttcgacatgtacctatcaacaccagctgccccttttgtaatgctgctccggaaacatctttgcatgttctggtgcgttgtcgatttgctcaggagtgctgggctttgtctcgggtccctgctgttgctggggcagcaatgactttcactgcgtggttcgaagagggcttggacaaatggacgatggctgagagattagaagcttcgatggtatgctggtccgtttggaagcatagaaacgagctggtttggaattccacaatgccgactgttagtgatgttgtcacttcagctaaactcaactttattgaatggtataatgcccaaaaaaataaccaacctactcatgaagataatggttcggttgatggtaacttggagcattggacccc

SEQ ID NO: 87490 - DNA, 548 bp, Cannabis sativa
ttttgagccataaaattgtgtaagctttctcaacaaaatcatatcataaaatattgaaaaaaatatatatagaagtattttcaagaattaattatattattaattttaaatattatgttatcataatttttgaataaagatgtaacgattaaaatttatgtacagcgatgattttaaagactattcagacctatgttttaaagagtttggcgatagagtgaagaattggattacactaaacgaaccattttctttcacaactcacgggtatgattctgggacttttgcaccgggaagatgttcgtcgttgtacgttgctaacaactgcagcggtggcgactcgagcaccgagccttacttggttgcccacaatcaacttcttgctcatgcaactgcagttaacctttatcgaaccaaatacaaagtacaaatatttattaagaaataattcaaataattatttatttattatcaaataatatattttattaattaattttataattttatagtctcaaaagggtaaaattggaatttcacttaatggt

SEQ ID NO: 87491 - DNA, 669 bp, Cannabis sativa
tggcagtgacttgagatgcattgtatcctgttaagagtatatcatctacatatattatgacaaaaaggaaggcatcaccgtggtggtaaaagaatagagaactgtcaaaggaggagttgcgaaaaccaagagcaagaagagagcttttcaatttatcgaaccaagcacgaggggtctacttgaggccatacagagttttattgagtttgtagatagccgtgggattggtagggtcaacgtaccctgcaagctgttccataaatacttcctcatgaagattgccactgaggaatgcattgtttatgtcgatttgttgaatttcccagttgttagtgataacaagtgagaggataacacgaatggtgaagggcttaacaacaggactaaatgtttcaaagaaatcaattcttggctattgttaaaatcctttggccacaagacgagctttgaggcgactgacgaacccatcaacattgtatttgatacgatacacccatttatttgtgatgatatgcatgtaaggttgccattgaacaagaatccatgtgtttttctttttaaggtgaatgttttcatcattcatggcagcaaaccattgagggaaacgaagtgcttgatcaaggcaatcgggtgtagtgtcaactggtagtatagatgtagtggtgagaa

SEQ ID NO: 87492 - DNA, 563 bp, Cannabis sativa
cattcttttggtttttacttttatttaagggataatttaaaaaaaaatacaaaaacaacaaaaagttacaaaaatacagttatatggaattttaaatatttttacgattttatttataaaaaacccggtcttattttaatttgtttttatgctacacttttgttattttgctgttgattttttgttattttttattattgtttgaatgttattttcttatagttttcttgcttcttcgtgttgtttttatagaacatcataaaagtatatatatacataaaaaaaaaattgaacgtaaaaatcttacataaaatagtgcttcatctaattatccctttatttaattgaaatagtagcaagagacttgattccaattttatttgcaaaactaaccaaatattttatggacaataacatgatatgttgccaaaatttagtcagagtaatacatagtaagttatcacacttcaatttgtaactactatggtaaccaaaataatttaaaaggcaaccaatacaaaaatactagaaattttgagaactaagatccattggtacaactt

SEQ ID NO: 87493 - DNA, 829 bp, Cannabis sativa
aaaattataatttgttgttattaaatgtatttttagtcacaatactcgttgtgaataaaattaaattagtgacaatttgaatctaaatgctatattttagctataaataatttttgttgtggctaaagtcacatttaattacagaaaaattatattttaactaaaaaattgtcactaaaaataattgttttttacagtgtcatcacatagatctacaacccaaatattttgagattgtgttcgacttatttattttgtgtgagaaatgctaagagacaccttaaagtgtcaaacattataagatgtgtcatacgtactactattgttatattataatatcgaatcctatctattttattttaataaaacctctaatttattataaagcgtcactggtgttaagcacttaaaatatcaaataagaatactcattttacgtttatgatctttgtattgaggtggctaatttatctgaactttgttctggtgaacaattaatattaaagttatttttgtttcctgagaagataactttgaataaaaaaatagtatgcatgggatcattaactacgagtataaaaactaaaaataactttacctagagatattgttggccctggcattgagggagcctagctaatagcaattatatatctccataaaattagaatatatggtccttcaatgtttcttttaaattaattataattacatcacctaagtcatgcatcattcggatgtgtttagcccaatctaattgggttgctttataattagtgtttctttccagtattccacccaaaaagaaaccttaattagtcttttggat

SEQ ID NO: 87494 - DNA, 1865 bp, Cannabis sativa
  modified_base (1836)..(1839): a, c, t, g, unknown or other
ctggtataataatttccaacagttatgtggtggagtgtcctttcaaacgctctcccaactcagggggccctactcaaacgtttccacattgccgacagcctgtgccctatttgtggaatggaggaggaaaccatggagcacctctttccttcattgcgaccaggctttccacctttggcggtcctcaccttggggtatgtttcctgtctctggaacagggatccgtatgtgggattgggttaaatttttatggaacctaaagagcagaaacataaatactaatgaggtgtttctttatgcctctattgtgataaacaggatctggcgggtccgaaatgataaggtacatgaccagaggattgataatgtgaatcaatgtattgaatctatttctcactcatatgcagtctacagagattctctcatcccacctcttgcaccaaaccaactcgttgtctaggagcctccccctcaggactggattaaactaaattgtggtgttagagtgggtggggagcattcatgtgtagcagtcatcgcaagagaccatctgagtaaggtgatatggatgtacacgacaaaactggacttttcagacactctttgtggtgaagctgctgtagtttgtttggcgcttgaagtggcaaaggacaaaggatataatttcatcctagttgaaagcgattctaaggtagtgatcaattcgctcaatggcttcgaccctagatggaaaattgagaaatattctttattttgtaatagaatcatttcatcttttgttagctgtgtactatgtattactgccagaacctgtaattttatggctcataatgtagccagatgggcgttttcccataaccgttttgggtgctttgatgtggcatctatccctatgaatattttatgtaatgaccgtgaggtctaactttatgattaatgaacgttaattttcaaaaaaaaaaaaaaaatacgttttggcaagtttatctttaaattttattttggaatttttttatttttatattttaaaatattttttttttcatttgtagggaattttacatagaaactcgtattgcaactaacagagcaacttaaattataactaaaattcgtatagcaacatacatagaaaccatcaaagaaaccacctaagaaatccaaaccgtaaatttaaaaaaaaagttaaaaaatagtatatgagataattttccttttattttttagtaaatttaatgtttttattattttttaatgtattttactttaatttcttttttgttaaatttaattaatttcatatttttattttaatactttgattaaataattatattaatatattttattttttacatattcatataatatttaattttttattaaaatatttcaaatatattttattcatagatattatttaaattttatatgaacgatagtaaagtataagttaaaaataaattttataatataatttatttaatagtttataaaataatatatatgtattatttttattttactacatatataaatagattttatattaagttgtttcatatatttaagaatgattcttttctaatggtaggaaaaataatttgagaattttaaaacttttattgatttatatatggtagttttttaagtgcatacacatcaactatttgataagaaagaatatttgcttgaagtgcagaggaattattctatagcggaaatattttgtgtaagtgttgttcataaaaagataaattatcggttcacatgtagtagaacctctattcaagaatacacttgggaccaagaaaataatattctaattgagaggtnnnnactaaatagagttacacttgaaaaaa

SEQ ID NO: 87495 - DNA, 556 bp, Cannabis sativa
atatgagaactggatgatgccatatactgtagagagacaaacaacccaccacaaagaaaccaaacgcacgacaataacagaaccaaaaccaagatcaaatgacaaaatcacaccatgtcagaggacatgacaaaaaaagataaaaacttaaatattcagatgatttattgtatagagaatgttatcccactctcaatagtgtagattgtacaaaatattaatagttgggacaacatttagtcataccagaaaagagaaaaatctctagtactatgttgatttgatacatttccgtacatataacacctgcctatagatgactgaatgattatatgaatcatgagatttttgtggaatagtttaccatagttttgtatgctagagaaactttttcttttttggctgcaaagtaaagaaacttcatggttatggtaatgtgattttgatcgggaatgaacaaagaaaaaacaaggaaaatgtagaaaaatatgaaaaaatgattttttttttttttttaatttcttttcttttattttattacattttctttttatta

SEQ ID NO: 87496 - DNA, 950 bp, Cannabis sativa
attttttatggtagttgatttaaactttgaattcattctatatatatttgtctcattattacaattaactaaaatataacaattgaataaaaaaaaaaggtaaatatatatatatatatatatatatatttgtggtctgttttgacgggttaacttgaccaaaccgacaaatttcattgagcgagttactattttttttaatcggacaggttgcacttaaatttttgtaatccaatctttacattgggttgaataaaatatagcataattaactgacccacgtgagcatctttaattatgctctctacatacactatttatagagagtgtgggacttgaaaaatgagcgacaaccatacaaaaaatgactcagtataataaagaatggatagggaagaaactccctattttttgttaaatttttttaatattattttaataaaaaaaatacttactttttaaacctttttttttctttaactattttaactaaaaattcctcttaaaaaaaaaaaaaaaactccagtatagtgtctatatcatttttctttttgggagatagaatgctatttcatataattcaaagaggtgtctttatcaattttaaacaatacaaattaataaatggttgaaatagtctatttaaccaaattattcatagccctaaagacatgcttaacgtatctatatctatatctttagtattattactaatattgacaaagtaaagtactaattatatactagagaagaaccaacaattcaagcgattaataggagactagtcctggtaattagatattttgaaaattgtctagtatgagtatatatataattatataaatagttactttggcaactttatattatatatatatgccttaatttttacattatacataaaataggtcagttctagtggtagttaaagtaggtccgaacttaggacc

SEQ ID NO: 87497 - DNA, 584 bp, Cannabis sativa
tacagctctttaatataatcatattctaatagttgccgaaaatctcggtcaacagtactgatgaacagtgacttgtacgttaagaatattttgtgaagaaacaaccgtaagaatactataaaccaacgtgaactcaaccaatgttaaaatatgaaaaaactgaccgtattgttttttatgagagccttgtgttggattctatatgaaatacatgcaaataagactaaaatcattatagcattatcagtttgtaattgtttataagtcaattattagagcgtcaataaaactgatgaccaactgtaatgcaactacataaaaacaaaaaaaatcaagacaatgttgctagatccatggcacgagatgaatacaaatttactttattcgccgcgatcagaattgaaagaatctaagattgaaagtccaaaaaataacgttaatgcaacatgtatactattagctactgtagtgatacatattttttgaattatacctgatttagattgatcgggaactcgagatctatttcttacaagtctacatcttctgaatctgtagattgaaattaggagaattagttttat

SEQ ID NO: 87498 - DNA, 505 bp, Cannabis sativa
  modified_base (464)..(469): a, c, t, g, unknown or other
cacatcaaaagaatagttttttttttttttcaaaactcccaaaaaacaaaaatttttggaatcgagatttcttataattttttccattttcggtaattgttttaaatttcagtatgtatgctgacgtgtcatattagtatttgtgtaaataattttcttaaaggtatttttataaataaaattaattttaggtataatattaaaaaacttccttatttattttatttctaatgagaatcaaattttagattcaaaaagtgttagttataattatttagatagagtattattgttataaagaacattatttatatctttaacatttctagtaagttcttctggctcacacttatgaagttaaaattgcttttatttcgatgtcataattatttctgtagtgaatcaaacactcacagaacataacaaacatcaacaagaccaattaatgttgggttttatgcccnnnnnnaaactctatttcaatgtaatccattttattcaacat

SEQ ID NO: 87499 - DNA, 903 bp, Cannabis sativa
catttatgaaaaaagcccttaaatttaatcaatataaaagtatgtacttaaaaattaataaaatataggaccctaaataaaattcccatttcttataaataaatattttaaatttgatgtatatataattgtaaaaggctcttaaaatatccataccctaaataaaattctcatttcttaaaaataaaataaaaaatataaattagtaaaaactaacaaaaacaatcggaacccataagtgaaagtaacaatcacaaaaattaagcaacatataacaaaaagtcttaagaaaagtcttaaataattagtacttatgaacaaacaagatttctaatgtctaaaaaaaatgtcattttaattcaaagactttttaataattataaacaagtttctttctcgagtcttgcttttattatgtggtgtcttaattttgaggttatttgttatcatcagtatatactttcattttagggagatttttaattatatacgtaaatctgtaaataattatacaaataaccttagtttaataattctaataaatatcgctgcttatgccgaaataaaatgtttggctttttgagttttaagttttttttccgtctatttttgggtgagcaatcctcaatgccctatcgttttttttttctttaattaattcttttgtctcactcttatgtgtattccaccattttcttttataaaaattatttacctccttaatgtcttactgtaataccccaatattttatcttattttacaaagtgctaattttgatgcattaattaaaaagattcaaaactgtttgaaaatacaccatgagttttacaataaatatgcaaaaaggtgaatgatcattcatattaaaacaaaataagtagttgagtgtatttttcttaaaa

SEQ ID NO: 87500 - DNA, 649 bp, Cannabis sativa
ttttaatattatcacgatttttaataattaattattctactaatattaaactagtttataaaatcatagacgtggtgtccctatagattagggcgtcacagaacttatgacacgtggcagtatagctcgctaaaaggaagaccaagtcagcatccgaaccaacgaaggccccagcactcaaacggggatcgagtgacaatccagctcgctctcgggagcaagctagccacccctagtcatccctatggccgaccaggccaggaaacagcttcatcgccagccagcctggccagcaaaaggagatggctgaccaaggatttctcaatgggtccctcaggacatgcctacacgtggatatcatatgtaggctgggaattggggcccaaaagcccaacacacaggccgagaagtatctagaatctaagggattttcggtcttatgtaaatatcaagttaactatcctactttcaaggaagtcagttgtaaacctagggtttaggccttctatatgaaggctttaacctctagttgaaaacctaagttgcctaagcctccattaagctacaaacctcatattctctaagtgtcggactctatctctcttcctcacactcttacacgccaaagcatggctataaaagcactcgt

SEQ ID NO: 87501 - DNA, 690 bp, Cannabis sativa
  modified_base (488)..(500): a, c, t, g, unknown or other
atcaagattaaacaatcttggatcaccaatacaatcatcaacatcatctcaaaagatggatacacaaaagaaaagtttgggtctcaccaagtgggtactgtagaagagtacattagagaggaccatcgccaaatcggaaccggtggatttgaagagcaccttgcaaggattcaccacccaaaatttgagctaaaatggatgagaatcaaccacttgatcttcaaagtaaaatggcaaaacccttttctctctctagctttccctctctttttctttcttttttctttttctacctagctactcacgaagcactcttgtgcttgctgcctcttttttttttttcttttaattgaatcgaataaaatgggccttaatccgttattggtccaagcccaacaaaaggggcggacccaacattatagatatagaatctatagcttctataagtatttagaagcgaaaaaataatttcctttgagcttggcttnnnnnnnnnnnnngattgaggcctcatttcagtaattatatgaattaactgaaatatcatttataggtagctaagtgcttgaaggataaaatacgttgaaggctagaacggtaaatttgtccctattcgatgtggatcatccatagaggatcttcgactattaggattgtaataatggatattcataacgtatctatatcttg

SEQ ID NO: 87502 - DNA, 633 bp, Cannabis sativa
  modified_base (26)..(28): a, c, t, g, unknown or other
ccactcattgccaattggttttgagnnngaaccccatgattctcaacactgcgtaaggttcatgaatggctcggattcacaatctagccaatagcttttttagatttgaattggatagcttggttccagtctacaacatcatgtttttatggttgttatggctgtagttgtttattttatatagattaatagatatttatgtatttttttttaacatagttcttatgttaagtatgtaaatgacttgattaggtagactaataaaactaaattttgttgcttaaggaagtcttctcctaaagatatttacatcattgatgttgtaaataattggttatgttttttttttttttagcttgtttaggatttgattgtaattgtattggttgatttcattcaaaaaaaagtgaaaaacgaataaaaggaagaaaaaaaaaaaactagagagggtggaagatgaaaataattaataagtgaaatacagaaaagaaaaaaaataactaaaaaaaagaagagaaaaattaaaataaaaagaataaaaattatgaagaaaaagaataaagtcaaaatgtatgaaggcaaataaaaaaatataaagataaataataactaaaatacgaaaaaaaaaaaaaa

SEQ ID NO: 87503 - DNA, 686 bp, Cannabis sativa
gtgactttcttgtacgctacgaaatacatttcatgatattattgtgccacatagtaacaataaaaatataaaacacaaaaaccctaatcatcatacaataactccgaaaaaaaaaaaattataaagacgcttctatatatataaagtaactatgcagcgtgaaaatattcttgaattctttctactcatgcgaccgttgccttaatcagagtttgtagaaatcccactatccaaatttcagcttaatttgggtaagcctgctcatgagtcatgagactcatataccatatcttttaggctacaccgacccccataccctatacaatttttttactttctattattgatccttttaggtataaaatttaataaaacataattgaacaattcaaacttgagttaccttacagtgggaatggtaactcggaacttatttacctctgaattgctgaacgaacccatgattcattgtaaagctttcctcaccacttgattgacattctctaacacgtaacatctaacatatacgtcaggcttggcaggtcagaaaattaaatgttgtagtgacaagtcgattcataattctacagccaaaaataaagggaattttacaaaaatactgtttttggaccaaaactttacaattatactgggacacggcaaaaataacatttttactgccccag

SEQ ID NO: 87504 - DNA, 897 bp, Cannabis sativa
  modified_base (27)..(29): a, c, t, g, unknown or other
actaatcagattgtaaagagttttatnnngggcataaaacccaacagtcacggcttcaacgacatccaagactggaagcacttgatcagccatcggcacctcttacaaacgattgaccgaggcggagtactaagagaaacattctcaggggctttgctttagatgtgccaagaaatttcaccttggccgtgaatgtgaacagaagctccttcaaattcttctcactgcagacgaagaagaatcggattcacccgatgaaaaccctcctctctcaccagatttaggcgagacagtggtcaccgaagagactctcgccaccctttctctaaattctctagttagcatctccaccgccaacaccatgaaattggctagccaaatcagccataaaaccgtcactgtactaatcaatagcgaagcaacccacaactttgtttcaatggaagttgttacggcagtaggcctgcccatatcagccaccacttgctatgggatacttttgggcaccggtggcaaggtgagaactgagggaatttgttctcaagtggagcttgatttgggagcaattcaggtcatcacagatttccttccattagaattgggggcgtagatgttattttggggattaaatggctggaaacactaggaaatatgcaagtcaattggaaaacgatggtgatgaaattcgaaatggcgggaacatgggtgacattgcaaggggacccgagcttatgtaagtcacccatctctttgaaggctatgatgttaacagtcgaaaaaggggccgaggcatatatgattcatgtcgggacgttgtccgtggctgaggatcaacaccactcactgatccctactcctattagtcagcttttggagcaatacgaagatgtttttgag

SEQ ID NO: 87505 - DNA, 594 bp, Cannabis sativa
  modified_base (558)..(567): a, c, t, g, unknown or other
tcaaaaattttgagagtaatgagaaggattaagagagtttgagtgagattgagtgagaatgagtgagattgaaagagagggatgaaggaggaattgagagaaatgtttttttttttctaaaagtggtcatatatgccctaaaccctaacgcaccgttttgttaatcacttaatgcgccggtaaaagtaatcccacctaccaccactttccacgcgggattttttccccccaaattttcccgtgggcggtcaagattcccaccaaaatttgccaacttttaccggcgcaaaattgcgccggtaaaagccttacagaagtggaaatttgttcgtgccatttggcggttcattgttgatcttttaccggcgcatatgtaataatacgccggtatttactaccttttgccagcgcacaattgcgccggtaaaagttattgctgaatccaatatgaagttcagcatttcatttatgctgacaacttttgccggcgcaattaaacaattgcgtcggtaaaactaggctttcttgtagtgacagttatttattttaaggttaaannnnnnnnnnttgggccttgtgtgagagatgggggcc

SEQ ID NO: 87506 - DNA, 1438 bp, Cannabis sativa
tatatatatatatttatgtatgaagtagtggggataagagggtatgagaacaaaatttaccataaaagagtataactgtatataataattgtagcattattaatacactattgtctgaagttagaaataaaagcttaaacattgaaagttatatacttgggttgaaaatctttggggttaccttttttttaaccccgtaattttaaatcaagttaacagttgttataataaatagctagaatcttttcagataaatcagaaaaaaaaaatcgaaaactattgagattgcataaatggaatgtgttgttgggatcatatccctaaaatatttaattcaaaggtaatatttatgaggttcctttcttttaaatttaagaaggtaaataaaaataacatacagtagaaaagactggtaaaaaacatcggtttcaaataaaaaaattaaatgtatgaaaaagtactattttggtctcatatgtcttgactaaatgctcaacaaaaatttcaataataaatattgtgttcacaaaatttactgaagtttttttatttttatattttaaaatattttttttttaattttgttggaaatctacatagcaatttatattagagcatctccaataaagtattaaatatgtggtgtattattattttttagtacttttcaataaaaaatttctccaatagtgtgttataagttgtgtcaaatttaccacatgctaaaaattagatcaaatttgataaggaaacttaataagaaaaaaacatactatttaaaataaaaacttaacatatattgaattaccataaaagatattaaaatactctttatcctttatatttttttaaaaaaataaaatgaaacaaatgaaactacagtgatcactggagttgtcatcagtgccggaaaaggcactggagtttgttgttggcgttagaaaagccatcggaattggcattatagtttcttggtaattttttcggcgccaatgccaattccgacaaattttttggaatttgttgtcggtactgaaaaagtcatcggaatagctgccggtgatagaaaagtcgtcaaagttgctaccgacgcaaaagtcatcataattggcattgtcgtcgaaaaaatcatcaaaaaaatcaccaagaaactggtttcttcatcaaattttttcagtgatttcttcatcaaatttcttgatgattttttcagtaatttttccggcaataatgcaaattctgacaaatttttcggcgtcggtagcaactccggcgacttttccagcatcgacagctactccggtaatttttccgacatcagcagcaaacttcaataatttttccagcatcagtgacaaataaaagtacctaaacaaataaaaatattaaatatgggatttgaaaacctaatttgcatagggaaatttgaaattatatg

SEQ ID NO: 87507 - DNA, 554 bp, Cannabis sativa
tttatttaaattaatttttcaataaaaaatttaaaatttaatgatgactttgagcaatcaagaactgtcacgtagccattaacttgacactaaacgacgagctacttgcagaaattttaaaaatataacataaattttattaccgtcaaaaattaaacttaagtattaatttacaagtaggattaaacttaagtatttatgccgcaaattacccttttacttattttagccatacaaattttattgaaatttaaaattattttatgtaacgtttggtaacaattttatttttaaattttttatcacaaaaatgcaagtaaagtttttgtttctaaaattatgtttttgaaaaataaaaatgtgttttataactacttttgcttttcatatttaaaaactattaacaaaattgtgttctgtaaattttatttttatttgctgattttatttaagtcgggtccgagtctcagacgagatcgggggtcaatagtaaaggtctggggacggggccaaggtccgagtccaggttccaaggcttcgtctaggttagagtc

SEQ ID NO: 87508 - DNA, 618 bp, Cannabis sativa
gttattgcttcataattaagtgttaaaatatttgtaagtttggcctcaaataaactttttgtaataactttgtacggttttgtttgactttctaaccctagcttgaatgatttaatcctcttacctttaaaaacaagtgttattttaaattttaataagggagctgccaatatataaagtagtaattaatattaaattaataaattatgtttgtttttaaatggtgggacacaaaaaattaggtaaaaaaaaatattgttattgggtaccagtagtacctagcaacttcgatttataggtggcgtttcacaattagttaaaaatattccttaaatgctattttttttaagttatataagactcaatacttaattacgctaataataacatggtaccaaaaaaaaaatactagacactaataatatcttttattaaccattctctaaaagaaataaaatcactattactaacttatccaaattaattagttatggcgactttgaagcattttcaattataatcagaaaaagtcatatatataaaagagggcatgtatctagactttcatcccattggtcagtcacaatcatataattataactatataaatatatatat

SEQ ID NO: 87509 - DNA, 3758 bp, Cannabis sativa
aataaaactatcatctatacatttcttatatatacaatgatctttaatacttagcttctttttagctaagttgtacaatctacatctcaacatactcaatatttctttacctaaatacataggagttcgagtaaatccttcatgaatacacttgttcctatttttccacacagtgtagacagcgacagcaagaagacagttactaacagcagctgtcatacctgttctacgtgtattaatccagctcctcttgtctccataatgcctcggccaaaggcagaagccactccaattgaaaatgaggttcaccacctgagtagaaacactacaatcaaaaaaataaatggtagtgactctcatcatcaagaccacaaaccgaacacaaggggctgtcaataggattacaaaattttggtaagatatcacgggtaggcaattgagtgttcaaggcttgccacataataaactgatgtttagggaggctcaatctattccaaacattcttataatactgcactgttggggtatttattttgctgttataaagcttgacagcaatgaatttccctttgttgctagcttccttgatgttatcttcactgaaaatctaccttaagttgcaaagcttcctccaataccaacttgtattttgtttcagcgaatagcgccaggattcaatacctttgaggtagatagtgttgacccatttgacccataaggtcttatgattctccataatagcccatatatacttggccagagtagctttgttctagagaggcccttttctaaaacaaagccctccaaagcctttagggaggaaaactttcccccacgaggcaacatgaattttactcctatttcctttgactccccaaagaaatccacgacaaagtttctcaatttccttgataatactctgaggaaggacaaatatgctcatccagtagttcctgaaacccagaagcactgagtggataagttggacccttctagcaaaagaaaggtgtttggtagcccaagtttggagtttgagtttgatcttccttaaaatagtgtcacagtcttccattctccacttagtaagtcttagaggaactccaaggtatttaagcagaaagcttccttcttcaatttgaatttcctgcaatatggctctcttaacatcatcagaaacacctgccagatatatgtgagatttggctttattaatctctaagcccgaagccttactaaagtcaattaaggcacttttaagatgttttactgcatgagcattacccttacaaaaaaggatgaggtcattagcaaaacaaacgctagtaagcttcaagtgtttggaaagagggtggtaccaaaaagtatcctcctgagcttctaggttcaatcttctagtcaaatactccataaccagcacaaagagaaggggagagataggatcaccttgtctcagccctttaataccttggaagttcccttgacaccttccattcatcgtgattgtataagtggctcctttgagacagatcatgagctagtttagaaacctggaagggaagcaataggctttgagaagatcttcaagaaatccccagtcagctgtatcataagctttacttaaatcaatctttatggcacacctagctgaaacattctttctcccataatctttgatgagatcttgaaaaataagcacattatgggcaatatatctaccattgacaaacgctccttggttttgatgaactaaagtaggcagaacttcagaaagtctcaagcacaggagtttagagatgcatttgtaaatggtagagcaacacgctattggccgaaaatcaacggccttagaaggatttttaaccttcagcactaaggaaatagcagtgtgatttagattagaaggcaataatccagtttcaaaaaaatgcgcaatagccctactcacctcctgccctatttcagcccaacaacttcgaaagaaacctgatccaaacccatccggacccgggcttttagagcttggaatgctgaaaaatgtagtcttgatttccttctgagtgaaaggcctgagaagttgaagttgctgctccattgtcaacttgttccttgcttccatacacttgatattcagctttgtaacagcagtgctcttgctgcccataaacccatgaaaatggttaacaaagtgctgcaccacttccctatagttgtccacaacttcaccttgactattgacaaagctagctattcggctatcctccccctcttcttgatacaagcatgaaagtaagcattgttttcatcacccttccttagccaatttagtttacttctccgcactaagtacttgtgaaacatttcagcttttttattgtaatccttagcagcttcatcctcatttctcatacaatcagcatcccttgggttgacttgagcacaagtacgagcttcttgatacttctctttagccctgtggtagttaacttccacatccccaattgtgttcttattaaacttccttagaacatgttttagtctcgtgagcttcaaatagatagcctgcagcccaatgcctagaataggtttcatccaactagccaaaactacctccttgaagtctccatattcagcccaaaagttaaagtatcgaaacggtttaatgccaatattttggggacgagcaaaagtaaccaagcaagaacaatgatcggagaccgtttcccattggaaataagctctagaacaaggaaaagtatgaatccactcttcattcttgaacacatgatcaattctcaaataaattctatcctcgccttcctgattatttgtccaagtataatttgatcccgaactagaaagccaatcaaccaaccctttagccaaccaattattaccatcttcaatctctttcttactagctctcttccctccattcctatcagtgtagttgaaaatggtattaaaatcccctagtaaaagccacggcttagtagggaatttaagattagctaagtcacgccacaactccttcctttcctaaagagcgttagaatcgtagacaaatgttgtgcagaagtcctagttaacccctgccattttaatgtaacaatgcacatattgattcgtttcagccaacacaataaccctcacaaaggttttcctccaaagaatcaataaccgcccttctgtaaccacactagagtaagccttccaaccgtttaatctagtggacatcatgttctcaattctactactgctcattttcgtttccaacaacccaacaactccaacattcttaactcgacaaatatctaacaccatatcctgcttcttagtgttattcaatcccctaatgttccaacacaaaatattgcagcaatccataatcaattagtcaaataggaacagccttgccccacatccacaatctcctcctacagtgcctcataggcatttttcatatttttggttgtatgtatctccatttcaacaagctggattttctttggttacttggaacgtctttgaattgtcttcctaggtgtctgccatttaccatttttcaatcctttatctaaatcaactacctctccttcacttctctcttcctgagtctctctcacattggttggtctagcttcctgttcatgcttttcattaggaggagccttttcttccttcttagtatgatcttctataaccttttttgcttgagttttctccccttttcgacaatccatctgttgggttttatgccc

SEQ ID NO: 87510 - DNA, 744 bp, Cannabis sativa
tggacagaggctctcgaccataatgttcccattttttttttcactatctactgaagattcaaacaagtagcttctacatatacaagttgttaccctttaaatctgctataaatctccccaaaacgaactgctaaacctaaccactgccataattgactaatgcctatacaacatcaatcaaataaggataatattttcttttatacattaatacagtttatttctaggtatggagaatcataccaattgcatcaccaaagttgttccagacttcagcccgaatggatttatcaccatcagcaataccaatgacctcaacaaaatttgtgagggagcccggtggagatcccttcacaacaatctgattatcatctgttgatttcccaatcacagctccattctcagatcggataacctgaaccagtgcccgaacctttcttccaacatacaggcgcagaagctcggcattgacaaaaactgctgggttcgacgtgtccatatcctgaaagcatagccaaaattactataattcaagaaaaagagaaggacaaaaaaaaaaccttgatctgagagatttagggcacccgaaaattaaaaaaatataaaataaaataaatgcaaggatgatcggagagtggaaagaatatagttagggtttgaagaaacatacctgatgggcggccatgtgagagtttgaacagggagaattgagagtgagacactataataggcggcaaaatgagt

SEQ ID NO: 87511 - DNA, 1359 bp, Cannabis sativa
ccccaagaaaatggtcaagttgaagcaatggtcaagttgaagcagtgaacagtcaagttgaagcagtgaacaagacattgaaggacaccctaaagaagagacttaaggacgttaaaggacattggccagaggaacatcctgaagttatatggtcataccgaacaactgagaaaatagcaaccggacagactgtattttccatggcatatggatacaaagctatgctgtctgttgaactcaaaccaccatcccacagaagattaacatatagccaagaagccaatcatgtactccttgcagaatcacttgatgaaattgaaaaaaagcgaatcgcaggaaacttaaaactaatagcccatcagctaaaagtagctcattattttaacttttaacaaacaagtgaaaatgcagaaattttttgtgggagatatggtcctaagaacactaaagacagtacggtaggtgtgctcagacctaactgggaaggaccgtacgaagtggtcgaagttttggaatctggggcatacaagttaggtaagtatgatgaaaaaatgtaactcgttctagtaccaaggtattggaatggggaacatttaagaaagtattaccaataaaagtactaggtcagatgaccataccaagtaaaaaataaaagaacatttgctcttaagtgaatggccttctgggcggaccacgcccaaaggtttggataaaatttttaagtactcaggtcggatgaccaccattaaaagtatgattttaattttctgcaattttttttgttcatgttaagttaaagatcaaatcagatcaacataatagctttggtgtaagttactacgttaacatacatatttctgatctataaatgaataaagatgtttattttgatttcaaattgagtcgagtttattagaatgtatttaccatccagtgcgtacaaaagatttggtcgaacccaaaactccaaacagacaagaaagtatacttgtaaaaataaataaaaagtgaccaagagtcataagtctgctcggtctcttggggggctactatacctatacaaagcatttggtaaaaaacaaaacaaatacaattggacgatgattataaacagagattgaaattcattaaggataacaaaagcattcaaacccaggattagaagctacccggtcagctagctggttgaaaatgaaaaatatatttcaagtttagagaccgcttaactagtcaccttgtcttaaaaaaggccttatggctaaacagaaaaagaaaaagaaatagaaaaaggaagcattcaaacggctggagttccagactccttgtatgggtcagaaggagctggaggatcattagtct

SEQ ID NO: 87512 - DNA, 566 bp, Cannabis sativa
atcctggtagattgcaagcttggaaaaaagtaaactacataaatccttaattcaaatctgaaccaagacatatctatcttggtttgtctacgaatggagtaaatccacatagatctctaagtagtcgtcataggtcatggcctatcttccttattatgtataatcgtcttccgtggttagtgatgaaaaggaaatttaatatgcttatgataatgatatcagacccacaacaacttgaacgtataatatcgatgtatatttggaaccattgatagacgatttaatagaaattgtatgagaattgtgttcaaccctatgatggttttagaaaagaattctttaatctgaaagcagtgttattgtagacagttagtaattttttagcttatagtaatttatcaggccttagcacaaaaggttacgaaggttgtccagtttgttgcactaacacatgggctcgtttcttgggaaatggacacaagacggtacttgcctacaaatcatcctgataaacggaagaagaaagcattcgatggtactgaagagggagatatggctcctttgcc

SEQ ID NO: 87513 - DNA, 846 bp, Cannabis sativa
ataatttaatttagagaagagatctaatctaggaaagaagaagacttagttagttgatagtattgcattatcaaatagcagcagttgctatggatcaatcaggtacgcaaaatctaattattatatatagggtaaattgcgtcaaaatcctcaaaccttttattttgctttcacttaacccccaaaacccaaattcgtgcggcataactcccaaaaatgttgtactgttagttaaaacacacctccatccccctgaccccgttattcgtttacgtggctcagtccatccaatgccaggtaaactcgtgctcgccatgtcattaataatttaatgacatgaaaattaaaaaaagggtaatgaattttttttaactaatggctaattaaaaggaaaaaacaaaaggaaaaaagtaaacagaaaaaatacatattaaaattaaaagacatattaaatcattaaaagacacattatgttaaaacagaaaaggtattaaaacaatacacacaaaattaaaaccaaactataattgtaaatctaaacataaaaagagatagagaagtacttaagaaatcgaaagaaactcagaaaaaccaaactacaaattatcaccattttcgtgagaaatcaaagtaaacccaaaaaaaaaaaaaacctttttaaactggtagagaaagcataaaggggggaaacgcgaaacccagccagcccaagaagagattcatcatcctcgtgggaaatctaagaaaacccagaaaaattttggaagaagaagttttttgaaatggtgtatcatcatcaaggtgaagaagatgttagaatttatttttccaggatcttagatctac

SEQ ID NO: 87514 - DNA, 925 bp, Cannabis sativa
caggctatggcacgagcttgcttgattaggcaatgcaagtacaagattatcatatcaaagcatcgactttcctgattacgcaatgtgatgtaataaagatggttactttatgaggtaacatatataattatattaataaatgaatatgacttctattattagtataatggttttgtattaccgaatatctatattggcgtttaattatgacagagttagtaataatttagattttatcttatgagtaatgtgtgatcgtctgattctaattgtcttagtataaataatgatatttgaataatgaattatatgattgttgttattacttttctaatcgagttcttgtgactcacgggtgttatgtggtgtagataataggtagagatgtttggacaaccatgagttaggaatcttctccaccaaatatacatatcagcttattcggcaagtggtgctgagttgttagaaactgtatttcaaatattctgaacttttaaatatattttagaatattattataatggcatgtcttacaatattttaattaggagatccccaatcctaaaaaggggactaggccatgatttcatgatttaaattagttggtaaaattttaatttatgtattattcattctattttaatttatataatgatatacacgcatacacgtgcaatgcatgagtggttgcactagtatacattaggagtgttcgtggtgcgggtggtgtgttttttttgactattttttcaaaccaacttaacttacatatgcgaattttctaatttctcaaaccgcacccgcatcgcaaaactaaaaaatcatagaaatcacactgcaaaaaatagtatggtgcggtttttgcagtttttacagtttggactatcactaataattaaactattacaaatacaataaagtttga

SEQ ID NO: 87515 - DNA, 858 bp, Cannabis sativa
  modified_base (285)..(301): a, c, t, g, unknown or other
cactaatttaggagaaaaaagaaatagattgatattaaacataaatttttatatatatataataaaatactaaaaaaaatagatatttaaataaaaacaatacaaagaaaatacttatttatctataaagacagcaaaaaaaaaaaaaagatgctaatctagaaaccataaaatccattaatcaataaaatgaaagaaaaatagaggcatctgctccaaatgctggtgtttttattgtaagttttggagtaatccaaattactttgtcaaaataataataataannnnnnnnnnnnnnnnnataataataataataatacaacgtaatataacaatcaaaattgataaaaatgacttgataaaaaaaatcctgaaattcattgatgaataaaagaaaaaaaaaatcccaacaaaaaaataaaataaaagaaaagaaaagaaaaaaaaaggagaacacactagtttaatatattgagtgagaaaaaaattagagcaacaataatatttgtaatgactgcatgattagatatagattagtgagattatatatatactaattttattatcatttatactactattgatggatatatgtgaacatttataatttctgcaaaatatcttgttcttgtaattttagctcggtggcgatggaaaatacgacgaaggatattttagtcacatgggtaaacatagagccttttagtgatagaaaatatgttatgtgagctcaattgttggtgttgggggggttgtggtactgtaccattttacccctaagtcgtttcttgtgtttggtttaaatgtaagggtagattagtaaaggctaattaggatttttgtcccctgaactttgac

SEQ ID NO: 87516 - DNA, 1949 bp, Cannabis sativa
  modified_base (55)..(67): a, c, t, g, unknown or other
  modified_base (1024)..(1029): a, c, t, g, unknown or other
actcaaaccggttataattaaatataaccgattttgtaacataatgaataaaaannnnnnnnnnnnnataactcaaaccagttataattaatatagaaccgcttcagtaataatgttataatgaataaaaacaaataacatgaaataactcaaaccggttataactaaaatagatccggttatataacataatgaatacaaacaagtaacacgcaataacttaaaccgattacaattaaaaaacatagagaaaatcagttcctaaaacactgaaacataaattacaaacaaaactagttccacaacaaaatacatcataacacataatacatcataaaatcgattataatttttttaaaaaaattatggggatcaatgccaaaaaatatcgaggcataaatatgaaaagaatcggttccctaataaaataaacaaacacaaaaaataacacacaataactcaaatatagtatatttcagtaaaaaaaaactcaagtataatataaagaaaccggttatatttagggaaatttacaccccatactgtttattcctattttatttcaattttattgttgtaataaaaatattacatttttactgtatttttctatactatgtatgtgtagtgttttttatttatttattttttacttttttttagttttgacaaccttcctatctacattatatatataaatatatatatattatataaactaacaaaagtaaaaaaagtgtggtagtggcagatttctttttctttttctttttttttttttaatttttttgattaaaattatattatattttaaatgatataaaagtgtgatgtgatttgtcttgtcacttttagtgatatatattttttttttaattttcttttaattaaaattgatgataaaaatatgataccccaaatatttaatacaacccattcctttcactttaatctcactttcccattattctctcttactattcatcatcttcttccttttttcactctctacttcctcaagttnnnnnnatttttctccattaacatataattttttttttatttttttcttgtccacatcttctttatcttcttcttcatttttttatttattttttgaagttcttagccacgtttttggaaaatataagagttagtgtgttttttttttgttctaatattccaaaactttcttgcaaatatagtgcatctagtattgaggatgtgcagaaaatagttaattttttaattattttttatttattttagtgttgttttactgttgtttttcataatttatttattcgacgccaatttcactgctcttgctccatctcgctggaattaatagttattttctgggtgttctcgtgttgctgtggtggttatgtccgtgggtgtggaagatggaggctataaatgcatttcttcttcgttctctttggctatttttgtagttttttttattctggttctcctataaatacatttgacgagctcactgacaaaaaagttttaaggtgtgtggttcttttatatttttttaagtggttatatttgcttcatttgtttttacatttgtttgtttgtttttttaatcatttttttcttttgttttgtttgatttgttttagtgttgttttacagttgttttgccatgattatttatttgacgtcaatttaactgcttttgctcaatcttgtcgaaattaatgattgttttccgggtgttctggtgttgctgtggtggttctgtctagggtgtggaagatggaggcctcatacttttttttttgggaaatttacatctcaacacgtttacgttaaattaatgtcaatattaatgtcaatttttaaattattgatattaatgtattgtattaccctttttttatatataattaatatattggcacatgcttaacataatcaattttcacatgtctaac

SEQ ID NO: 87517 - DNA, 980 bp, Cannabis sativa
ttttatggatctaaaaattgaagtaaggacattagttttatgcaaattaaactggatatctggttaaattttagtttcatagtagtttttttgcaatttttttttcatgaatacgaaatagctcatgttttaattgattctagtcgtcttctcaggtgaagtcgccggaattaatagtggttctatttctggtttgattttcgtttcggttgtgttgggtttctgcatgtgtctgatggttacctagaaaacatggatcctgagttgaaggtgtgtgtaagagatatttgtgtaattttttttatttgggttgtatatttatttatttggccagctgaaagtatttttgtaatattgttaccttttttgattaaaactaaaaaaagttattttataaatatataaataaacatatatatatttataattttaatatattaattattttcaattaattttctaaaattaacaaacacataaaattaattatataaatataagtcaatatttatgttttgatatattactaaactttaatacaaaattagaaaaaaatatttataaattttgtttacatttcaaaaacagtgtatgtatatatttcttaagggagtttttcaatattatacttaaaattgattttatttacaaaaatacctttaagaaaatcatttgcacaaataccgttgtgccacgtcagcatatataccgaaattcaaataattatcgaaaatagaaaaagctgaaaaaatctcatttccagattttttcgctttttatgagttttgtaaaaagcaaatttattttagaattttacacatatataaataataaaataattattttaatgtgtgaaaaatatttacttttctatcttcaagaaagacgattaatattaaaagaaacttttttgttttttttttaatatttttagactatattatgttattttattgttaaagatacattgaggttacttt

SEQ ID NO: 87518 - DNA, 619 bp, Cannabis sativa
atatcactaggctctgcttttcgttttattgggtttcgatcaactaattcacccaaaattccttctttatcaccaggctcctacattacagtgttatgagtctttattaggaaagaaatgaaaaatcattggatagggttttattgacaaaaaataacattttttttttcttttagaaagagagaatatgtgatttcatcaaaaaaaaaaaaaaatagaaagagggaatatgtacttcaaatattttagtattaacattgatgtggtcataggcatgatatgatattacatgttttctcacaaaaaaagaggtctcaaacttgaatacagtctcccaatctttttttgtaaaaaaaaaataaaaaaaaaatcatttacattgatcattagatatttgtacaaaaggtccatctaattttttattttgttaaataagaactagctaattaattaatctatattttcaaaaaataaataggagttccaaatatttttaataatgagtacggttggtggcggaataaagaattgaataagggggccgaaatattaaattaatttactttgagctaaatgttatacatattgaatataatattgcaactagtgctgcaactac

SEQ ID NO: 87519 - DNA, 1496 bp, Cannabis sativa
  modified_base (1412)..(1438): a, c, t, g, unknown or other
atattaaaatgggttttatttaggtcacaaaacccaacactctgaattcgctctcaaaatctacgtccatccctgtagagacaaaagataaaagatcaatgaaacaacagtggtaaaaaggaaaaatgacgaattcagatcagaccaccattcacagaggatgatgcttaccctcaaaaacctcttgtggggatcgcctgtaacgatcgacaatacctattggatttggattaatcggttgatcttcagccttggaatccttcgtttccaatttaaattgaggattaaagcctttgagaacgtatggagaggaaaagcaattagtatattccggtggtacgggttttgagggataattttctgagtttggatgggacatcttggcaagagaatgacaatctaatttctggatgaaactcaccaaaaaccaaaagggattatgacgaatataccctctgtaagcatttaaaaagaacttttaaggggcaattattatacccgaaattcagctaccattttaatggaggacacgtgtcaagttaaggagaatatggatcgatgcatgtaacagtaattacatttaatggaataactcattaaatgtggaagtaacagagtatatttgcaacttgctgactataaggtccatgcgagataaaagatatgcaaactgttgcttcatgtattaatgagaaactatacgacattggatgcacaaggtgagacatcaacttcgttatgcctggaaaaacgtaagcgatgcataatgactgtaaagacacttagcgtataatatacaaactaagtacaacagtcgggcgaacctaagcaactaatagcaaggcgcctatctcgctataagaaggcgcattcatgttactttcaccaatcaattttagatatctttcagtgagacttatagtcttgacgagtgagaagctgacattcaaattatgatgactgctgaagtaatctttgttattaagaactgcaattgtcaaaatgagatgttatgccttcaagcgaagaagcaacgaggcgtacatcttcaacctcggaaagataggggaaaatctctagctcgctatcaagttcattagtattgagttcatgtcaagacatcccagaacgttatgatttaaaacgtgtttaaatacacgatcattttgacccagtaaaagcgaataaatcacaactgtgtgttattcaaataataaccgcatttatactacgtgatatgtaatcaaaccccatgatttcagggaagaattgttataaaagattacagtcaactctgtaagtaactgtttcctatgtgattataaatagacgcaagttagactgaaaaatggacgaaaaaatcaaaagaataaaggcccttagaaaccatcagaaatctaataagattgacnnnnnnnnnnnnnnnnnnnnnnnnnnnaaaaccacgtaaaaaacctttgtgttcattttcttctctttactgtttttatttttct

SEQ ID NO: 87520 - DNA, 1525 bp, Cannabis sativa
aaaaaaagaaaaagaaaaaaaatccctggttgacattgtaaataaacaatcatttaggatgatgtacatggtaacctaaattttcaaatcatgcataattcacgaaacacaacttttcctaacatattgaacatatgcagcctgtacaaaatacaaatacaatcttaaggtaagcagtataaaagtttataagttctaagtttacagctctctgggaagtagagaaataaaacatagaaacttggtctgttagatcaaattagtaagcacgttgataaaaaaaaattgttaagtctcacctcatacaacgatgtgatcacaggtatatctttcaaccaaaaatataaacaataataatgcttataaactaataattggtcttttagaacatgcaaggcaatcctaaaccaataataagaatttcccagcacaaaaagaataagatatttttttttcatttgaaaaatattgatagaaaaatatttcttgaacgattatcatatgtcaacaaatgccaactctgtaaacagcaacaacttttataagaatccaatcaaagcgtcattttggtaatttaatatacacattttctcgcctaaactagaaaatgaaactaaaaattcatgcaaaatccagattttcttttcctggagagggtcgatataattaacttcataccgtaaacaaaagaagtgcaaccattgcctgaagggtttgctgaagaagaacccctttaaccacggttcctttagagaccaaattcttctcatcctcctctttcttcgagtgtaaacggtaattctcaagagaacccagaagagcgtaaattccagaataagcccaataaatcaaaatcggaacaaacgttcccaataattcatccgaaatctcaaaacccatcttgaaaatcaaagaaactgaattcaaaatccaggtatttgcatgagatttttcacaactctcaaatacccgaaactgtggatgacgaaaagatcaaaaggaaaaaagaaaaaaaaaattgaggaaaaacaaaccctatctcccaatttcccaaatgggatagggaaatatatttattatttattatttctataaacaaaagtatgagttaggccaacccaattaataagtaattgaaaattcagccaacattgaattatataagtagaagattcgaatttgacaaagttggcgagttgtaagaaagtgaaccattaataaaatgtttaattaataaagaagaaataaaggaaagcataccatcattattgatacagagagcctgataaagaaataacagaaatattgtttaaaaaatataaaataatagaaatatatgtttttttagcaaattattgaaaggggcagttgacccactttaatttgtgtgtgtgcatggtacatcagatgttacaatagataagtatacttatttgtaactcataaaataattataccttattataaaaaaaaattaatttaaataatttttaaaaattacgttttgttataaaataatataaag

SEQ ID NO: 87521 - DNA, 854 bp, Cannabis sativa
tttcattcctcccaaccaaacatttttctctttagtaagcattcattatttcgaagaagaaaaacccatctaagaatcttacattaaaggtaagatttgagacaatgaatagcatttttgttcattgtgagtttgcaatgtccctatggtccaagtttgagacagagtggaataaacaactccaggatgttgtaattagtttaagaacagtgtgtaatacttaggtgagagcatcacttttgctctcattggtgagggcattttttcagcctttgatttttaagctggcagtaatggtttctttgcttatgataggtattttgtatgggattgttaacacttcaacccacgtatgatccaaaaaaaaaaaagaaaaagaaaaaagaaaaaatgaacccacgttcagcactcaattaaaaaaaaaatcaattcaggtggtacattattcaacattttttgtcattatttattggctgtagagtgtgacagaaattcaacaatgataagtaggatgaaaatatggaatttaatacatataatgtgaacaaaataaatagttagatttggatgagataagtagaatgatcttttgaaagttggtgttttgcccaaaaaatattgtgaaaaagagaatagaggtgtggagatctcttataaaaataaaaccaaaagcaaaacaaaccaactagacgaacaataataagatcaaggatacatttttttttttagaaaaaaacaaattaaagaaaatagtttcatctcaatcctttgcaacatagagatatattttttctgccagaaacagagaacataaaaagcgatataaaagttgtaaacaaactccaattaaaaat

SEQ ID NO: 87522 - DNA, 920 bp, Cannabis sativa
aaaaaaaaactctttgtattctaactcttattcctttgtctatatatataagttaaaattttgtggacattcataactttgaagtttttcttatgttttttctttttactttctaactttttatgtcttatttttatattccttgacatggctattaatatttgaagattttgttatgtttttcttttcatcttttttctaattcttaatgttctattttcacgttattcattggcaaatctctcaaatagatattttgcacaaaaactattaggtaattttttttcttactttgaaagattatcactaatctttattgtttttattttcatcatatatctctctttctactattttttttttctctccattctactttttcttataaacttgatgttcataagtttaaattttccattttgatcttctattttgattttttgttatttatagatacatatatataaactatctgaatctcatctcatattaatctcttatatattaatctcaataagagataaaaccataatatatctaatttggataactattggaagtggtattacaaattttatttagtttttgaagattttcaatcttcaaaaatgaaaaagtctaataaaatttcaacaatttactgttataattgttatataatgccacaccacccttcctaaaattctcatttttagatttatatagattgtaataaaagcgtgcgtacattatttaaatttttatattcattatatattatataattatataaagaaaatcacaaataaaagtaacatgatagactttatgatttttttttttatttcttgatatctcaatttttcttattatttaagtatttatttaataaatttttactagaaatttttacaccaaaaaatacaatttacacaatttat

SEQ ID NO: 87523 - DNA, 838 bp, Cannabis sativa
tatattgtatattatgtattataatatttatttaatctctttgttgatccttatattgtattacaatagagttataatatcttaattttcttccattgtgataatatctctaacataagtttaagtttagtagacacatgaacaaaatacattgagagacaacaagatagatggacaccgacttatacgacaagagaagttaggttgagatttatttgcaagaaatataaataggtggcattaaggtttgccaattgaacacgtcaatttgtataatcggaacacaaatatgactagctcagaggaactgcacccctagtgcatgacactatataatgtgatgagagttttttttttttttttgaaagaaatgtgatgagagttttattaacttctattgttatgtaaaacctaatttgggcaattatgggcacactatttggagttaaaattagttatgttaatttaccactaccactagaactaataaatatgttcaaaggagacactgtacgctttatattgaagtgttttaagttaattttgttgacgtacctactatacttgcattttttaaatgtacataatacgacaattctttttttaaatagaaatgtcatatgttattaactaggcaaaataactgtattttgcccagttattatactaaatgaatatttttatagaggtttttttttttttaatttacaattactatattatgttatgctacaaatatctttttattgtattataaaaaatatattaattttatattaattttaaaataataacaaacaatggttagtttagtaaaatttaacaattttattaataa

SEQ ID NO: 87524 - DNA, 596 bp, Cannabis sativa
aattaattaattctaaaaaaggaatgtctacctattggtaacctactattacagatcaaagaaaaatgtagtcatatggttaaaataaaaatgtaaccatatgaatgaaatataataatttttttaaaaaacatatagaattttggtgaaatattttaaagaaattgatgtatagtgcaatgtaaaaatgtattgtaaaatagagaaaatagagttttaatgatatattttaaatgctagagtagataaactaataggagtactctaattagagatagcaaaatatgtcaatgaaatcggccactcgaacatgataatttttgtaggtcaaggataaaaatgttaggtgtagatcgaaagtaggctcttatgtaaaattattaacaataaagagtttgttatagttagtcttagcttctcttagttatacagatatattgtatcagtatttagtataaatactccataactactcttttttcaactaatgaaatcattctgattcattcttccttttttgttgctctatgagctaatatggtatcagagctctacgtttacttcctagttcgttttttttttcgtttcctctcctt

SEQ ID NO: 87525 - DNA, 533 bp, Cannabis sativa
attcaaatttaattagtacaattttgtcgatttgataaataattgaaatttaattagtaaataaataattaaatttgaatgtaaaattcataaaattgaagaatttgatcgtattgataaaatcttatcaatcaaatttgaattcaaaatagaaaatatgtctaattttaaaatatactaaataaatattattaaaaatataaaatatcatacttgaatttagataaaacacgagatattacgagatattaaatgtatagtcactttttatttatttaaatttactattaaagggcgtaacttagtgaatttgtaagtatatcaactcctcttaaaagaaaaaatctccaaaataaattgtgtgctaaattttcaaaaaatagaattaaggaagaaattaaagaaaacaaacaatgattaaataagtttcagacataaatttttacatagttgatacattaacaaatttagtccacgagttagtgaattagagttgctatagattacaacaatgatggctccaaagatttcag

SEQ ID NO: 87526 - DNA, 1150 bp, Cannabis sativa
caacatatggaagtattgatttaggctctgatttgttagggttttgtttaaaattgttttagtagtttagtattgatgttctagggttgtttaagctattgttggtgaataattttagggttgagcaattttgagttcctggaactcaaacttggctcaataatggcatacagagcttttgtgctttttggctactgtttttgggtggattttattattggatgttggtgcaggtgttctagaaagtttgatgaagtttgggattgatttgagggaatttcgattttgtttagggaacctggtgtaaaacaagttaactagttttacaggccctgtaaactggttaactggatcagggggcaggattcctgaaaagtccattttgtcaaatcgtgttatttttagagcctttgtttattgtttcctcaggttatagtcaattaattatcgatagtgaaacctatagttatgagtttcggttctcggattaggttttcgtatgttatttacccgtttacgtaaatgtgacttagggaatccatccagcatgaggttttccgttcaggtcggccaactcacttgtttctgaaacagggtaagactagcatagaatatattatatatgtgattatgggtatgtatattatatgcatgatgtgtatgtaatttgggaatgtattgacttgatatcatagcggcacaaccatcgtaggccccggttgccccacccttttgctggccatgtctatagggcaggtgtcagtagtatgaggtcctccacacagcttgcaaacaacttgagcttgtttggcttgtgcagtcaccagctttgtcaatgcctccacttggacagtcaacttggttatggcatcgacttcatgcatacccgcatcctttttagattagcctctctctgttgaccattgttgattagtgatggccatctcttcaagtaattcaaaggcctcattagcacttttcctcataaaagccctaccagctgtggcgtctatgagtgtcccggtatttctcactaatccattgttaaagttatgcacttgtaaccacttttcaatcccatggttcaggcacttcctcaataagtccttgaatctctcacaggcttcataaagagattcattatcatgct

SEQ ID NO: 87527 - DNA, 548 bp, Cannabis sativa
ctatgatatcaagtcaatacattcacaaattacatacacatcatgcatatattatacatacccataatcacatatataatatattctatgctagtctgaccttgtttcagaattaagtgagttggccgacctgaacggaaaacctcatgctggatggattccttaagtcacatttacgtaaacgggtaaataacataccaaaacctaatccgagaacctaaactcataactataggtttcactatccataattaattgactataacctgaggaaacaataaacaaaggctctaaaaataacacgatttgacaaaatggacttttcaggaatcctgccccctgatcctgttaaccagtttacagggcctgtaaaactggttaacttgttttacaccagtttccctaaacaaaatcgaaattccctcaaatcaatcccaaacttcataaaactttctagaacacctgcaccaacatccaataataaaatccaaccaaaaacagtagccaaaaagcacaaaaactctatatgccattattgagccaagttt

SEQ ID NO: 87528 - DNA, 1359 bp, Cannabis sativa
tgtgttatattatggttatgattaattaagaatggggattagggttattatcctgaagtgagcggttatatggcctatgattattaccctagcgattaaataattttgaatgttataccatgctatatatgttgaaataaagaattatgtgctcaaggcataagtatattagactcggtaagctagtactctaagtattataataatgtggtctagggtaattaccttaggctatatatgaaagtaagaaagcaatgatgtatagtaacctttactaatcaagtaaaagcatgaagtagggttattactctctatatacgttattttgagcatgtcataaagtatgttatatgggtaattaattagtatgcaagttagcgttattaccctaagatttcatatattatagtatatgttgaagatgttgaatgtgtggatatatgtcaacggttttgtgaataagacaaaaccgggttaggcctgatatacatcatcaggataaaccactgaaggaacataatatgtggattatgtatatatgaataggattatgtgggcaaggcataatcaggttagactcggtaactataaccaagataaactctactaaggccttgtgagtgtaacatgtgggtaacatgtgggtctatgctataaagacaaaaatagatgtatgagggaaacacgtgggtctatgctacatagacataaatagatgtgtgagcgtaacacgtgtgtctatgccacatagacataaatcatgtgagcgtaacatgcaggtttatgtcaaatagacaataagtgaaatggcttaattatataggtgttatgttaattgatatctatgttatcttgctgagcttggctcacaagtgctctactgtgcaggaacaggtaaatctatctatgatcagccatgagtgggagagcttgccgatgcttgtacatgttctggccatactagaccaagcgggttggggtctaccagtgttgtattttgtaatcttgattttgtcgcttaggtcaacacgtaaaatagacttataatattttgtaaaaatatttgcgggatcccgaaacttgtctcttttagtggactattaaatttaaaattattacaagtttattttcattatgtttcaattaagtttaaatttctcgcgcttaaccttctagtaatcccattttaggggattagggtttcataatctgtgtcgtggtgtgcctaattgttagggtgttacagatttgtttcagagcgtcaaggtttttaaacattctgtagactggtcgaacatgtacaattatcgtcagagacaagctcggctcgtggtgcagtaagtgttgagagtaaacgct

SEQ ID NO: 87529 - DNA, 578 bp, Cannabis sativa
aagagtaggagcaaagaaacattgttgttcttgcttcagaacttgttgaaaatactgtaaaacagagtctattattcaaatgtgatatatctaaaacatagcaatctaaaataaccagaaatatagaaaaatattcaaaataaaggaagatcttatcttcaatggataggataaaattatttctaaactaaattatagtgttagaaactaggctgtttcattaatcatcatccttgagttagctcccagactatagtataaagtagattaccattgagattctaggaatcttttataacactcttccttaagctgagttatgcatatgaaacaatctcagcttgctacatagattttgtgaaaggaatcattaaaaggaagccaccttaagctgagttagattctttagaaccttgcttgcttaaacttgcaagggttggtatctcttgactatagtttttttcttaactgaaattcaatttgataccattcatagaaattgatacagaaagaattgaattcacctcgtttcaaaacgtaaatcaaaatactgtacaacagagtggtattgagaggca

SEQ ID NO: 87530 - DNA, 1194 bp, Cannabis sativa
  modified_base (808)..(810): a, c, t, g, unknown or other
aagactgactcctctcctccctcccatcagctccactccagggaagattcgttgtcagcgccggccagctgctcacccacttcaggaaccaaccagttcatgtagtgagtaagcatctccttgcctcttttggcttctggatgcattggcaaaggtggggtaggagcccgcatctgctcagccgcttcagctcggatctgccctttgactgtttaggcttatctgaggttcctcctcgagaatctttggacttagtagctttcggagcagaagggtccgcgacagttagctcctcagaaagatcaataacctccctggccgatgccttttccttggatggggtcccctcactgcccctaaatttcttggcaggaggagatgagcttgagcttcctccaactctcttcttcagagcattgagcatcttctgagacatgtctgcatgaaataaaagcaacacgattagaagaaaaaaggcatcagaagtataaaagcatgataatcaagaaacaagatggagtatcctaagcttcatgagaagcgtttgtccgagcaagacacggaagctcattgtcacatgataagtctcttatctccgccaggaaggccttcctttttcctagtacgggggaaggtggctgagcaggtaaagtgggctccctgatctgaatggcatgttcaacgggcctgggctgggccataagtttcttcctccttttgagcggagtcacctgctcttcctcagcctcatcttcaggatccgaaggctcatgagcatagtgttttgcccttgcacctcccttcaacnnngcttcacgcttaagttgaatgagttcattctccttatgagctcccttagcccggttagcactcgatttcctcttcttctccttcacaggccgaggaatgaaatcctttgggtaaagcctgtactccacaaagttgtccttggaggtcaacaaagtgatatcctgggcagcacccgacaatagagcaggcttctgagctctatcccagagggcatgtgtgaagggaggacggtgatatgtggagatctgctaaaaccaagtgtaggtggtgcccatgccttccacgttgaagtactcatcaacaaaatgtccaattttgctaacggccttatcctcggtgcccgtcaaccacttgaagtctagttgagaaaaatagaaatacccc

SEQ ID NO: 87531 - DNA, 865 bp, Cannabis sativa
taaaattttattattttttttttttttttacaaaatacatcaatacaattttttttttttagttttacactttgaactttttaatttattaaaatacattttcagtgaaaataatgaattatttttttattgttttgtagtttatttatagctgcattatagctgtcataatttttttttttagttgttttatatttgtcgtaaggttgatttcacattgttttctagttttaaatttttaacttttgctgaacaaagtgtatttttgtaattttaaaactttacaagagtatttttgtaattaaaaattttaggccaaaaaatcataaataaaacataaatgaagggtattttttgaaaatttcccaataattaattgattattaaagtgtatacatgtaaatttttgaggtaaccaaaatatatctcaaattatataatataaaagtaatacttttttatgaaaaatttactcattggtttctcatcaacatcagaagtaactaaaattacttttgaaatgcaaaaaaattttagaaaaataaaattccgagattagtttcatttcaagaatattattttagaattaaaatattttttaatagcgtgataaaatattatcataattaaaatttattaaattatttttgtaattatttatattttaagtatatttttaaaaaaatatcgaaaaatcgtcacattttccctcaaaaaggattttaagcccaacctcagccaccataaaatagacggtttgggcctctaaaaacagtacacgtcgttatatctgcaaacgacgatcgtattgatgcaggtgaaaaatcggttcaatcagtgagcggggacactttcggaaattcag

SEQ ID NO: 87532 - DNA, 581 bp, Cannabis sativa
gccaaaaaaaccgatcacccaaaaacccgtgtggtcgggtcgggttcaacccgaaaaacactccaaacaggttttgggtcggtttgagtatttggtttttttctggtcgggttatgacccgtaacccgaaataattaatatctaaatattaatttatatacttaattactaatgtaattaatatacttaattactaatttaataattaatatctatctgattattcgtttcgtattcttcaatatacttaataaacttcaataattaatatctatctgtagaaaatactaaatagtaataatattactaatctaatcaatttcaaacaaaagctaagtctagtccattcgtattctcttcttctcaatactattctgtgtgaatgtgaatgaaatgtgaatctatatacagtatatacttttaaaccagtgcagtcgtcgacacgtcatcaccgtcgactcacccacaccagtgaccagtcgattcgacaccatccacccccacgcacgataggcacccacccacgacagcgactggttctcttctcggctcagtttggcgtcccgtgtccacccaccagt

SEQ ID NO: 87533 - DNA, 650 bp, Cannabis sativa
aaaatgcaatggaacatattttttattgaatgcaaattggaattttcttaatttgctaaatcagccaaaagacaagactgtaattcagtaggaacaatccctctcattgagaactcgatctggaaaagaattgtgcacaatcatattagcagatcgtttaactaaaaacaaataaacattgtttaaaatagatagaagctttcgacagttcatatcagagtcattgattttgatttcatgttttttaaaaaatatttgtcgaattcgatataaatcttaaactccaaatctcaacacaatattacataatataaatctaaccagttagattagaaaattatctcttattgcctattatgattttcttgtctcttttcatataatattttgatcatcaaatccagtaatgggcttgatgaagaatcataccatgtcttccagaccaaccttaacactcacgataagagtgggcttatagatttaacaggataaacaaattttctgatcacagtgtattctcaactcgtgatacactgtgatattgagattggaaaaaacctcaccccactactcaaggttgagtggcgtgtagcaaggaaaaaaagagggggagagagagatgtgtaaggttttagagagagagagagaga

SEQ ID NO: 87534 - DNA, 509 bp, Cannabis sativa
gagatgtggttattttagattattttaataagttgtattaatttgtgttttttgttcagcttctcaagcaattgttggtgattaataagattttttcttcttggttattatttttttttttgtgtgttattttaattctcaaatttatatattattttgaataaaatcattggctataattagttatttttaaagtaattcaatttatttatttgggttatattttcaatgattttatactattttattctagttaaacattatttgcaacttcatcttttgaaaaacctctaatttaagcttatcataaatttgtccaaatcaaacaacattatcattccctttaaaataacaatcattatattacaactcatttaccttaaagaatatatgtaaggaaagttattatctcaatttttgttgtttttcctttttagatttattattactaataatacaagcatctagaaatgcaatttaaaaagtaagtaagttgaatataacaaatt

SEQ ID NO: 87535 - DNA, 888 bp, Cannabis sativa
gatggatgctttgatgacttacaaatgtatgttgataattatatatataatatagttagaagattttgtcgctgccacctattaaacagcttgtgaggaattgaataatggtaatgatagtgacttaatcacttgcatttgcacttgcacatgctttttctaagacctttactgaagtatatatataatatgactttactactttacattcctactcaacttttctatcaaataattacgtgtctgatttgggagaaagaattaaagaaataaccaagaaaacaaagtagacatcttacaattacaagttggttaagataaaagtaaaagaattatttaaagaatttggtaaaatttgacataaagtccattttcaattgagggtgtaaaatttgtggaaaattattctaagaaaatgagttaatactatacttaatttaaatattataattgagttccgatatatttacgtaatcatttaatttaggattatttattataatttctttaaattaaaatacaaatataataagtacgtaaaatacaaatgttataattttttttttttacaatatcaataaaaaaaagcccaaagtttataaaactattctacatattttgtgatagtcaaaattatgtgatccgcaataggaaagatcgagagttgtgcaatcccacattgtttaaaaaatattacgtatgataattttgagattgcgtaggtatgtgattacacagttgaaaatgatttaaatttggattaattggtactacctatatcaataagatgtattttcggtatcatatcttgaaagaactccaaaattaagagtgtttgacctggaataatttcagtatgggtgacctcttgaaagttttatcaagaaa

SEQ ID NO: 87536 - DNA, 3799 bp, Cannabis sativa
  modified_base (78)..(80): a, c, t, g, unknown or other
ggaaggcaaagcttatcccagctctaaggttgcaaggcgccatggtttcctttctcaaatccccaccagaaatcacgnnncaagccatcaatcgttgcgataagtctattagagagcttagtaatttgcatcacatacataggcatggacagtcccacaaacttgatcagagtagcacaacctgctttagagagggttttagccttccaaccctgcaattttgaggtaagattctctacaacaaagttaaaattagcatccttctgtctagagcgaaattaggggagccctagatatttaacgtttccttccgaccttccaattcccaaggcatcttgaatcccttgtttcaattccataggggtatttctactgaaaatatatagaagatttgagtccaagaacaacacttctcaaggcaatcccagtagccttttgcttcaaccagagaggccctacccaccaagattaggtcatctgcaaaaaatatgtgggacagagtagggccacctcgggaaagcttaatgcccctgatattaccattacccatggctttatcaagaagtcttaacaaaatctaagtcgcccaaataaaaaggtaaggtgataaagggtctccctgacggagtccacaagttggagaaatgttcccaacttgacaaccattaagacacacattcagagacgtagttgaaatacattgggaaacccagttacagaataactctggcaccccatagcaataccatggtcaataaactgtcagcttatcttatcatagactttcatcagatcaattttgattgcaaacaagccttctttgcccttcttcctgttgaaggaattaatgatttcttgtataatcacaatgttaacatggatacttctgcgagggacaaaagcagcatgtgtaggacaaataagccgcgggagaataattttaatcttgtttgcaatgattttaaaaatgaccttataggatacattgcgaagggatataggcctataatggttctttctcttcacgttctgaatctttggaatgagcactaaattagtagcatttacttctgtgcatcgttccaaaggtgaagaaatcaaagaccgcttcacaaaaatcatctctcaccaaatccgaataacgcttaaagaagaggaccgacatatcatctagaccaaaaaccttaaaccttaaggttgcccatgaagaacaggattttttgaatttcattataatcaggggtccaaatcagatcttctttctccacataagattgcctatcagtaatgtgatgataatattcagaatcataacatatttcttattacatgctcaacttatgattaaagagcaataaaaccttaggagtttcttaattttaaaaactaaaaaaaacctcataaaaaataagccaaacaagatcatgatttgtatagaaggttctcttttcttgttacaatcaaatataaatatttgcatgcaatcacagctcaacaatcaagtcagtaaaaaataatttgtttagaaggttttcttcttattacaatcaaatataactgcatccaattacagctaatccaacagtcaaatcagtcagctaatcaaattttactctcttcctccttcccaactaatacccccatcaactcaatcaaggagatgggacttcaaatttttactaaaaaagctaatgagtattcaaatattcagcaacaaagaaaaaaataaaataaagatgttaacatcagtataataatcctattctataagtttgtgatcagttgctgagaattcaacaatcctatttcaagtgcttccaggagcatcagtgccagcagatttgcggttcaagtaacgaataacagcgtcttcgaccctgttcaaaagagatatggcttcaaagtcagaaaatgataaaagtttaggttcttcagtgtactactgatggctatccaacctgttgtatcataaccacatacttttggtatttgaaaaaaacatgaaatacccttttgagtatagctattctcatgtggggtatctcaaagaacctcaaccatttgacctatccttttaagtattctatatatggtattcagaagaatcagaacattgctattccagcaccttaaccccaaccccacttgagataaacaatttaatataaggtctcacatattttaatttttaaaaaaacagataagtaagatctcctattgattttaatcgagtaatgttggacaccttaagatgcgacttagcaaatactcatagtatttaagcaagaccggcaactagtttattaaaccgaaatgaaaagcaagcatgacataatcaaactcgggattttatacttttggtttgtaacctgatgataccaattctaaatggcctgtttggatgagagattttggtttcttgactagagttttacttattctgcaaggttgttcaagatataagatataataaacgtggatactagttactgcaaatcatgtacgcaaacccctcaacccggaatccattataatcaagctctatgttagttggcaatccataattgggttgggaagccaagcaatacaaacaggtaaatttactaataacgcacacaatagatataatgatggaagcttaccagggttgattataaaagtcagaacgccgctccttctctgcatttcgactggcatctccagcaacaagctttaaatctttgctctgagaagctatcagagtgttaataaactctgctggagactgactgaaactaagaaagaaagcccgccgcctcctatgttcatgaatcttctttatagacgcagatatcagttcatcgcaagcatcaatttccttattattctcagtacgtgccaagaatgaagacatttctttatccagagaaagaggcacatcaaccaacacatcatagcaattagttccaactggacaagttcccgaaagcttaatcttatgttccagatgtatgggttgtggtggagttaaatgctgtgctaacttttgtgaaactgatgtaaacttcatcttctcatccccaaacactttttgaagaggtggatcacacatgaaagaagtagggtcactggggctctgcaattttctagatttaacataatgccaaattgcagctatgatccttatgcggctatctgcctcaatgccaagaacttccttcagagctggggaaagtttatatttttctggcgtgtaattcatttctagcctaattgctgcagtgaactctttattccctattcgcttcacttcaaagccgtcgtgtagagcaggcgaacgagcactatcccacgtaattacatggctatctggataaagattattgtccaagtatatagttattttcttgaaaaaggaagaaaactttggagtcaaatttggggtcatgccattgccagcaactacaggatctttcccatcttccaaaagcctcccaactatcttaagtgaccaagaaggaggttctgcattattgtgttctgcattattgttctcgggtataggctgcgtctgatttacataagtgttgaatacgtacattctgagtgttttctgaaaacgtggagatattttgaacgactcctggatgtcaattttctttcttgtcaaagcagcatccacacgagcctcgaattcaagcaactgagtataaagcgcagactcgggcaaaaggtctgccaccttctctggtatttgtttatcaggtagctttcgcttcttcctccgagcagctggggtcagctccattgttttaaatgg

SEQ ID NO: 87537 - DNA, 543 bp, Cannabis sativa
agcaactggttatgctttattttgccctgttcaggagagattgaggtggagtgagcttgtttggggtaggtttaatctacctaaacatagtgttatactatggattgctatgcatggaaaattgagaacaaaagaacgattgcataggtttggcatcgttgataatgctgattgtgttttttgctgcaatcaagtggaaacaaaagagcatttatttttcaattgtagctggacattacagtgttgtacaggtgtggcacactggcttcaatggaggagttcgaatcttgacttagcaggtataactaggtggattcagagggtgcgaatgagtagattcaaaaggagagtgatggcagctgcccttgctagcctagtttacaatgtttggagaagcagaaatgaattgatatagcaaaacaaaatccccaatgctgaacaggtggtgaatcagattaaaagaaatgtcaaacaaaggctacttcttatttggccaaagaaagtaagcaaggaagatgtaatgtggtttaataatttgtaaat

SEQ ID NO: 87538 - DNA, 902 bp, Cannabis sativa
gtcgaaaacctcgatcaacaatatggattggattggatcagttactcttacatgtcaatcaacatccaatccgcacaaatgcagattttggattttccaatccaatccgacctcacaagtgcaaatatctgcactttgcggatttaatttgattggatcatgcatattggattggattaagtattttataacaattcttcttgtttggcatgagagattggaggagggaagggatagttggatggagagcaaattcttctaaattccaatttataatccttccattaatggaaggatccactctccctctttaattgttagaaattataattataccatctaaatatattattaaaatattatctataaggacaataaaataatttcaaaaataaatattctctatccttccaccactctatcctttcgaccaaacaacttaaaaggaatgctacttcactctccctctctccttttctacatcgttcattaactctccattctccatctctcatactagacataaattgtaagttttaattttaaattttattaatatcaaaaattataaaatctaaatatcaaataaaatatcacaaagtctaaattttaaataaaaaataatttagttattgaacataatttatgtaatatatcatttttaaaattataaattaatttatttgggttaaaaattataaataattttacaattttaactcggccaatatattaatttggtggattgaaataattttaacccacttaatatataaaattgggcattttttttttaaataaaattggtatctttatcaactaatcaaatcgttaataacaatagaacgtgcttcagaggaacaatcctcaaactgaaacgcacgacctggagagaaacaaga

SEQ ID NO: 87539 - DNA, 950 bp, Cannabis sativa
aaaatatgaggcatcatcctattatttatttattattttttttttttgaaatgaagcatcctattattctatattcttttttctttatcctttttttcttttacatattttttattcatttctgttttaagacgtttgatatacttacaacaataaagtataaataatgatataggataatgcttgagtagatgtattaaaaacaactttatgtagagtcatttttttttaatatgtgtcattattttattttattttcattaaatattatttccttatttaatttttttacatacataattatttgttaaaaattactatcatttttttttttaaaaaaaaacactatcattcacttctctcttcttctccttcatctttttctgtaaaaatttttaaaagttacttatcaaagaacctaaactataactaaaactaagaactttattttttttttttaaagaaaaatagaggttgagactcaagaattctctaatggcgaggtcaaaaaacaatgcaaaaaagatttatacatatctctcctctcaaattaaatccaccaatttttttttttttttttttgtgaatatgagtttttttgataaataattataatagattataattagagaaataaaattaaatatggaaataaaatgaaataatgacacctatttaaaaaaaaaaaggactctatataaagtcatttttaatacctctactaaaacattatctaatgatataatagaatctaattatgtttaaattaatgaatacataatcaattgtttttatagtaattaataataatatcttataataattaaatgaagcaataaaaaaattatggcgatagagtaggaattaaaaaattattttatttatatttaaaaataattaaaaaaataacaaacgatcataatttataatattttacttatttagtaaaa

SEQ ID NO: 87540 - DNA, 1488 bp, Cannabis sativa
cccaaattcaaacgctccttgtttatatcttttgcttcgttcagcttcagttactttacttgttaaagcaaaacccgaagaggaaatacctaaacatttcaaagagtattctattgtaccaaacaagccacaagtgagtgcccttatcatccacattctttgatcattccaccatttttgtaatgttcctccttctatgacaaattccaagaggtcttgcccatatgctccgaacacaagaaaaaggtacaaaataaacaatggttctgaaatctacaaaataaagtgagagcattatagtcattgaagaataattacccaatttgacataaatacccttttcaaattatgattagtaataagcacacaaataaaagaagagcactgttattgggtaccagtgaaacttagtacctgctagacgtgttgttttgtaattaattagtaatattttctaaaaaaatatatgtgacttgatacttaattgtactaataacgatattgatacgtagaaagatactacacttcaccgatgcctttaagcattctcataaaagaataatgaagaagaatctaataaatttttagataaattaatttcatgattactactactatacctataatctttaattggataaagacgaataataaaagtttttgaacattgttacgaagtgatattttatgacctcataataaattgtactaataacaatacggcacttcagggaatgttaaacgccacattattgtcctttaacaattctcaaaaggtatttagaatataataatatctaatcaaatggttttttttttttcacaaattctttgagcctctaaacaagtggggaatttgataaaagcaagaataattacctttgggaagatagggagtccattgagaagagctagttgaggtaggaaagcataaatggcaactggaatggaccaaatgggccataaagaataatgaccataagtgaagcccattgcaaggcccataaagtgagtaccaaaggtaaatggagaatatttagagaaagtaacttcaagtaaacctatggcccatcttttttgttggttcaacacatcaactaggcttattgggaaatcaccataaaatgctgccttaactggattgcaaagaatggctttccaaccctcacattgaagacgatagcctgtgtagaagtcctccactaatgatccatatcttacacccatctatatattcatatacatttcattacaaattaattagctcataatctcaaattaattagagtaatgttatatgcatataatcactaatcaaaattgatatgattatgatgataatgatgatatatagcacttgaaattttatgattacacttgtgataaaaataaagaatattaattaaatatgaaaatttataatatatatacatattaaaaaaaaaaagttttttcatttttacatttcaaagcaattttttttttttt

SEQ ID NO: 87541 - DNA, 520 bp, Cannabis sativa
tttattgcttttcttttattttttcgaataaaactcttttggatatttataattaccaatattaaatttttacttctaataacttggatgttattgtatacagtccgaataatacctagctttttttttcttccttatatactattaatatcttcgtaattctctctctatataaaaatgtttattggaaagagagaaaagaaagtgtgagcgagaaagaaattgagtattgtattgactcagcgagaagattataagaaaagttattatatacatgaaacaagagaataacaacttccaaactaactctactaaaacactcaactaattgtgtagttagttaatagtattaactaactatataactaaccgacatccttaacaaccatctttaaattgagtgtgattttggaaatgacacaatttatctttaatctttaaaaatctggtgctcgagatcaattttgttagacagtcagcaatctgagcagtaacagagacatgtttgacatgaatgtgt

SEQ ID NO: 87542 - DNA, 502 bp, Cannabis sativa
ggtactctttaaaatttagaacaagtataaatatattttcaaaaatatctatgttatcaaaatatataaccatacataaaatgaggtttagtgaccatttgtaactagtggaagaaaaaagacatgaatttatatacaatactcaatcaaaagatgttagagaaataatttatttattttttataattatgttagagaaatgatatattcaatggaaaagtggaaaccaataataaaactcatgacaagtaatactcccctctaaatacaaacaaataaagagaatatataaggaaaattgataaagattcataaacacaaagcaaataataataacacagtaaatagtgtaagaacaaagaaataggaagattaaaattattactatctctcacataatcaaatagaagagaaattaataaagatcgccaatattaaaataatattcaagatctttgtacaaaaaactaaaatttcttcattctctaattgctaagtatat

SEQ ID NO: 87543 - DNA, 891 bp, Cannabis sativa
tatttagaaaattttaatacaattatggaagtagaccaagtacccaaactagcgaaatgtcgcatccttgtggcaaccttggaggataacgcccatgattggttaagccaattacctgaggcatctatatcaacttgggagactttcgtagatctattcttgacgcacttccaagccacgatgacgtacaaactgccttacacaacgttggctaagatcaaataagaagttggtgagtccttacaggattattttaaacgttttaatgctgaagtaaccaaagtcgagaaggccccctagtctttgttggtgtgtatgttaattacaggtgtgttgccaagaataattttgggatggagttacaagctcgaaggccagaatcattggtagaattcttttccatggttgagccacataagagaattaagaattcttaggctaaactagaaagggcgaaggagaaatgcgagtcacctgtaccgcggtcaagtcccgagaagacgcagcgcccagaggcagcaaagtccaaagcttgccaagtccccttctaagaaggaaacatcttcgaagaaaaaaggaggtccacgctttgtcaatactgaattggcagttcctcgcgatcacatttatgcaattgaagagaaaaatggagtctttagaaagcctcccccaatcagaggaaattgcaacataagggatccaaaaaagttctgcaagtatcataaggacatcggtcataccactctggaatgatggttcctacaagatgaaatagaagaattgattagacgaaggaaattcggtaaatacaagaagaacagagaaactcatccccaagcggatgagaatgacgacacgaataatgttgagtggttcacgaactctttgcat

SEQ ID NO: 87544 - DNA, 669 bp, Cannabis sativa
tttccaacttctccaatgtatctttgaaccatctttgttagatccccaccaaaagtttgccatcattgattcaagttggttgcaaaaagttgatggcaaacggaaacaactcatagcatatgttggaattgattgaactaccgctttcaaaaggacctcctttcctcctgcagaaaataatttttcattccaagtatggagcttttgccatattcgttctttgacatcactaaacatttccttcttatcacgctcagaaaaagctggaagaggtaccgttcatgacattcactgataggcatgcccaaaatttggtgaaaaaaatctttcgctgcttttgaggtattgggtgaaaaagacataacagactttgatgtatttaggagttgacccgaagccttatggtaaatgtctaaaaccctctgtattgctcttgctgaattattagttgcctcacaaaaaaggagactatcatccgcaaagagaagatgtgaaactgatggtgtgtgacgtgttaaacgtaagcctttaaggttctgtagttgctcttcactttgtaatagccttgaaagcccttctgagcaaatcagaaaaaaaaaaggtgataaaggatcaccttgcgaagaccccttgtaggttgtacataccccacttcttctccattaagca

SEQ ID NO: 87545 - DNA, 614 bp, Cannabis sativa
ctatattgtacaagtttgtatgattgaggcttttaatattatgaatttcgtttaggagcaagaaggatatttaaaattatgagttccgttttgtactcaaagctcgtgtgattttgttaccaattccctcgtcgtattaagtcttattatatttgattatattgatttggattatatattatatttttatataatattatgttaaactttaatttataataaaacattatatatttaggtgttcatagaaattaatggtaccacatatagttttatttaaaaatattgtataaaatacaatttaatataatattatacaataaatacgataacaaaaccctcaatgttttacatattgagatccaaaaaataatgtttacatattagatatctcacatttttatcaaaaaaaaataataataaaaaaagaatatcttacattctgtccttttttttttattaaaaaaataaaaaaaaaattcttatacatttatagctcatgaatcatgatgtttttcaattccattaagactattataaataggtggtgtaaaatttgtgttaaatttaactaaaaaaatgaatattattacgagactccgagtaatttaggg

SEQ ID NO: 87546 - DNA, 1928 bp, Cannabis sativa
caatttttcttccaatttcttctagtaagttaacctcattttcttctccctctacaaatactagttgtctaataatgaaccaacattgttcatcagacaatttcttaagtgtaatcttgctagtaattgccctcatcattatagtgacctcatcttttcttgttgtcactaatatcctactacccgcaccaccctgcataaggggttgctttaattgttcccactttaatttctcctcagtccatacatcatctaagacaagaaggaactttatccctttgatagagttactaatgcattgcactaaactctctagctcatcataattttgggcatttcctcccaacccatcaacaattgccttagcaactcttttttgatcaaaaggatctgagacacacacccaaattctcttatcaaagtgagccttaacactatcatcattataagctagttgggcaagggtggttttgccaagtccccccattcctacaataggaattatatcaatccctttaccactcttttgactactatcacatatcaacttactcactaaaatttccttatcatcatctcgaccatgtatttcagtttcttcaaccatagaaatagtagtgattcttgatttgactatggaactaggaatgtattgttgttgagcatacattccaatagcccccaaaactatgccatgctcatggccatctttttttaaactatctagctcattagtcaatttcttaattcttttagcaaagtcatagtgcctaatcacttgattaacttttttgaaacaaaaccaagaagagggaagtgctggaaagcataccttctttgcacaaacacgatcactactctcatcaccatcttcaccaataccctttcctccttgatcaaatttctcgatttcgcacttgagaatggcagagttccactcatccagcacatcatccatgtcgaatgatatatcttcgaggtcacttagccactgtttcagccattgagagtccagctgtctcgtcccagcatctaccaataaatcttggatgtatttcagactttttttgagccttttcacatctttcttcacattctggaccaatcccacattttcatcaatctttgcaagggcactagaaacaaactgatcaacaagtgcactggtgaaagcatcagccatagccacaatctttttgcctgaatgtatagttggagaaggaattgataaaagatatgctagacttgctagttatacacaatttatatcaataagtgttgttcacataatacaatataaataaataaatataatatgacttatcattgatatggatgtgtttgcgtataactttataatatttgtagtagtgactttacagcattcgaagtctttgaccgttatgcaatgccaaattcatagtgctacatatatgtggttgttgataacttgatatggtattagtgtttgtttttttcaatctaaaaagtagggtatcccagaacaatctctaaacttttcatcttgtcgactaaatgtctatcctaagttcacacctaatattcttacaaaaaaaatcctaataataatatatactagcaaaattgtatagccgctctagtttagtttaaaatataaatatttgtttggtctaaaggaaagatatcttttcaaaagcaaataattagtggagacatagggctccacctcccctcgctagaaccaaactagtaaagttcaaagaagctgcccagcttgttacaaaatgagcagacttgttcaaaagtcttagaatccaaacaacttcaatagtgaatatacaactaaaggaatctaaaatattaaaaatagtctgacaaaaaaattatttttatatattaaaagtgactaccttccaaatcttggtttaacagggttgttttaacag

SEQ ID NO: 87547 - DNA, 540 bp, Cannabis sativa
tgtatgcattgtgtacttgtctggctcactcttcgaaatccacaccacttcttccatttctacacatatcataacataacataacatcatcaataaccgagttagaaagagaaaaataaggttggtaataactcgcctaattttttttcttttgtattttaatcctgattccgtcactgatatatgataacgaaaatatcctattataacataccataacactatcaataaccgagctagaaagagaaaaacaaagttcgtcatcactagcctaactttttattctcttttgtataagttctaatatttctattatattatattttaatcctgattccgtcactgaatatatataaataataaaaatgttttattataacataatataacataacataacatcatcaataacaaggttggtcatcactattcactagcccaactttttaaggcttttatattttaatcctaattccgtcactgcatatatatatggtgaaaatattctattataatatatcataacataatcattactac

SEQ ID NO: 87548 - DNA, 867 bp, Cannabis sativa
agaagaagaatcacattaaatgggaatgaagaatcgcatatactgtagggatggagaattactgggattgaaaatcgcattatggttttgttagagaagaaagaggaatcgcaatatggtttgaatggcattaattaaaaaagttatagtctccgttaaagttaacggaataaaaaataacaaaacgttaaaccaagaattgctgttagataagcatttttaatatataaagatataaaaagatattaatttaaaaacagtccaaatataaaaggaagacattaacaaagaaaaaatatttaataaaaaaatatgttaatttaaagaaaaaataatttcttattttatgtaaagttttttttttttttttggtaaattagttgacaaaatttttattaattaatttgtacttttttagcaattaaagtgattttagtgtgttaaatttgtgcttataattgctcatttgttttataaaaaattcttttctcgacttattgcatttgtttgagaatcttttctttcaagagaagaagttctctttatgaaaagttgtctatttttaagaaatctcacttttcatttttctaattaatgattttaattttgccatgatgaaataatctttatttggcagttattgaagaccaaatcataatcttggtcatttttgagaagttttctttttgatcttaatctgatgcagcatagtccgattttgataatgtaaatcaggaaaattttaggaaaattttgtatagctaggaaatcgtgtttgtggttgtctctagggttgctatgttctataaataggacctagagagcagccaaacgattctcacctcttctagctttatttttcatatt

SEQ ID NO: 87549 - DNA, 1045 bp, Cannabis sativa
actcatgtggtacttcattatatcgtatatataagaattatacgatagatagaagatccatctgtatagatatcatcatctacatccagaaagtcgtatgctttggaaaaagcttgtatagttcgggaaggggttttaattgaccaaaaagaagaatttacttcagccgatatgcccttaggcatgattatacataacatagaaatcacgcttggaaaaggtggataataagctagagcaacaggtgatgtagcaaaactgattgcaacagaggggaaggcgcagcagttgactggacatctaggggtaaagcactctttcagtgcgggccgcgagagtggtaccaaatcgaggcaaactctgaagactagatatgatctcaaaataataggggtcaaggtcgaggggataagcttcatcgtcgagacggaaacagctcgaatcaaccgatcattcataattgaccagatcggtgatggaaaaattatccaaatatcatattcaccctttatataaccatcgcaaactggaataagttctttgaaaaatcaaaggaagagtcctgtatttcttttagagaatctcctacgccattaactacttcatttatgaatttcataggaatagaaatacatgtcctcataaactgcttgaatagaagttatggacccctctttggtagaagtaattctttcttgtaaagaatccattttagtgagtttgttcttttttttctttctttgacatctctaaaatatttctttttcaactttactaatttgattttgatttcattaaaaataggtttaaaaaacaaaatttgttttcgaggagaaccaaaagggaagttatcttcattcttttttattaccttcctcgcgtatgtgtaagactaaaatacctaatctaaaaaggatgttatctaaccgcatttcaagtaattgtatattggatacgactctataatggaattcatttttccctctcagtactgaaatgaattctttacaagaaagaattatttctaccaaagatgggtccataa

SEQ ID NO: 87550 - DNA, 1246 bp, Cannabis sativa
gcagcgggttggggcgggtggtcgagtttttcgagtttgtgggtctaaatgtgcagtcctaattttacaaacaagattaaaaatacaattatttctatttaaccatatgtagtatatggcagcaacaacaatggagttcacaaacttcccttgaagacttttgtgaggagccgagagccaatcactaagatcagtaggtcaatcgaaatagtgaacgcacaatctccaaaaaggtgtttatgagtctctcgaactctagcacaaatagggcataaatcggttgtgatcaaattgaatcggctgagatgatcacgggttaaaagttaattgttgacagcttaccaactaaagaatctgtgcttcgaaattaccatgtgccaaacattttcaacaaactttactttataagcttgaataagagataagtaaacgattttagttttaaacttactttcattttcatcttcaactacaatcttcttgtcaattttatctctaagctcaaaattttcttgaaataccaactagcaccatgtttgaaagccatcaaccaaaagtcttatccctttaagtaaatggcattgatccaccaaacccagagattatcatgcttgcttgcaattgcacaaataaacttagccatcaaagcaacattccattttctaccctcccgaaaacctattccaccaaacttcatgaggagacaactttctcccaagacgggatgtgaaatttgctctggttgcctttggatccccaaagaaaatccctacaatatttttcaataactatagtaattttttgggggagaatgaacaaggtcatccaaaagtttcttatacccaagagcaccgagtgaatcaattgcgctctgcctgcaaaagacaaatttttgctagccagttattaagatttccgttaactttgtcaagaatgactctgcagtctgaagctcaccatttggtgggtctcagttgaacctccaaatacttaagagggaattttccttcttccgtttgtaacatatgaagaatattgcttttacaatcatcattgacacccccaaaataaactagagatttgattttattggccgctaaacctgttaaaacactaaaggttttgaatccttcatggatgatctaacagagtttaaattgcccttgcaaaatataataagatcgtctgcaaaataaagattagccagcttaagagacttacggagggggtggtagccgaatccctt

SEQ ID NO: 87551 - DNA, 1596 bp, Cannabis sativa
aagatgtttgatggagcaattcgaattctcaaagatgtgaggtatgtgcctaatctaactaaaaatctaatctctgttggaacccttgatgatgcaggttatacaaacaagattgaatctggcataatgaagataagcaaaggttcaatggtggttataaaaggagaaaagagacatggactctactacctaattggtaatacagtgactggagatgcatctgtagctacaagtgatgaagattctaatgccatattatggcatagaaggcttgggcatattagtgagaagggactcaaagtaatccatgatcaaggcctgcttgggaaggacaaaatcagcaaggttgatttctgtgaaagctgcattttgggaaaacaacacaggttgagttttagtgttggcaagcattgttccaaaggaattttggattacatccatgcagatttgtgggggccagaaaaagtgtctacacatgggggtaactcttactttctctctattgttgatgatttctctagaaaagtttgggtgtttttattgaaaaccaaaaatcaagctttagaaaagtttaaacaatgggaaactgttaattgaaaacctaacagaaagaaaaattaagaccttaagaactgacaatggtcttgagttttgtagtggagagtttgatgatttttgtaggaaccatggtatacaaagacacagaactgtaaggatcactccaaaaggagctgagagaatgaatagaacattgctgaacaaggtgagatgcatgatgttcagctcaggtcttccaaaaacattttggggagaagccttgatgacagcagcctatttgattaatagaagtccttcaacagctatcaacctcatgacacctgagcataaatggacaggtaaacctcctgatttatctaatttgagagtatttggatgcatggcttatgtgcaccaaagtgagggtaagttagaacctagatcaataaaaactgtatttcttagtatatcccctcaaggtgttaaaggttatagagtttggctcaacaatgaaagaggtttcaaaacaataaatagtagggatgttatatttaaagaagatgtccttgcttgaaaactactaaccatgacaatgcaggaaataagactaaccctgcaggtagcattgaaaatcagatacaaatcaatgaagaagaaatgagagaaactggaaatgatcaaggcactgatcaggtggaagttacaaatactgagggacaaattggaaatatagatcaggtggaacctgatcaggaagatgtaacagatcctcaagactaccaattggttagagatagagataggagggtttcaaaacctactcaaagatatggattttctgctttcacagatatgctggcatatgcttttgtcacagctacagaacttgtaaaaactgagccaaagacctatttagaagctatttcaagtaaagaagcaaagcattggaacaaggctatggataatgagatggggtcattgaaaaagaacaagacttggatagtggttccaagaccaaaaggaaaaagggtgatcagttgcaagtggattttcaagcac

SEQ ID NO: 87552 - DNA, 858 bp, Cannabis sativa
  modified_base (216)..(217): a, c, t, g, unknown or other
  modified_base (592)..(598): a, c, t, g, unknown or other
  modified_base (718)..(721): a, c, t, g, unknown or other
tagtttgtacatccttgtctcgcttaagactgtatagtcagcgagttatagatatactctattaattccacatttaatgagttattttattttctatttaatgatttaattatcaatatatttgttgattcatattccttgagattgacacatgtcaccttctgaagtacagccggattttaggtgtaataataaaagatcagaaatcattttatnntgcatggttcacattatttatttcaggattacatatatatttaatgtataaattctattaaatcaagatcatatatttatcatgattatattgtcgtcagctcagtcaaatataatcatgattgtatgtttaaaagtttaagtctcgtgatttatcagtacactagatttagactgacatgatagtcagcgataacgtatacttgcacattggataagtgttatgttaattctaggatattggcaaagtataccagtatcaaatgtatggagtatacatcgaattggactgatattgaacttggataagatataataaacttacggttatattatctaagtcaatatcactggttgatcttaggtctatagatcnnnnnnntgatatggttaggttcgatcttagttgtattatttatgttcttagagttcttcgttaaagtctaggtggctgaatcttgggaacatggtagttcaatttgagtgggagcgctaatcatannnntggaatctatagtttctataagtattcagcagttaaacaataattttcttagagcttggcttaatagagataaatgattgagatctcaattctgtaattatattagtttacttaaatatcatttatagattgctaag

SEQ ID NO: 87553 - DNA, 648 bp, Cannabis sativa
ttggtttcgaaagaaggcaatgtccaagtttggccagacacattgaaatttgttgacgaccttgattttttcttcaagtatctgtggggcgagtgtgctttttgtaagttgatgtatgagtaaggacatgcaccattactaggagaacgttaagaaggaaaaggcaagaaagttgctcaggaggcaaagtatacctacatggctatgtacctaccatacaacattgggtatattgaagccatagagaaagtgagaaataagcatgctacttgtagtgtgaccaagttccctaggatgataaattggaaaaccaaagagggccaacaaaaatagggcgtgaaggcgagtgacatcttacaattgttcaacacaagcgtaagttcttatatatgcttcatgttgatattttaatccatttttagttgacataaatcaatgttagtttgcaacatatttgtgacatttaaaattttttatatttttgtttgtatttggttataaagaagtgcttgtgcccccgacctagtgaggaggattatttcaagtccgtcaatgagggtgaagcccctcttttttttttagatggatattaatgagatggcagacgacgatggcacaaaatttaatgtttgaaatgcaagccaacac

SEQ ID NO: 87554 - DNA, 759 bp, Cannabis sativa
tattatatttatttttttttattttaaaacttaatattcttaatattagaaactaaatgttatttatttaaaaaaaaacagtatagcaattttcacataatattgtcacttcaattcgataattaggttacatactgcactagttcactcagctatggtaatttggtattgcgtctctcttattttttttaaacaaacagcatttagtttttgatattaagaatattaaatattaaaataaaataaatattgtaatgcatctggaccctccacgtgtctatatttatgaattaacgaaagtggtagtaatagtgcaagagaattgtaacattaagtatttttacctccaaaagtaaatataaaataattattaagtgtataaaatctactacattaaatatttatgccgtaatttatgcttaaatgtatatatagatgttttattttttcaccctcaagccacttggaaaaataaaataaaatacatatatgaaataaaaagagaacagaatcaataaagtagctatagcttagggaccaaatcgatgagaaatttctcgtagctatctaatcaaagatcgattggcatcttttaattttatatgattgataaaaatcgaaaaaattataattatggggtccccttcatcatttttttatattaatcttaattcatttcattaattaattaaggccactctagagcttctttgtccttcttttatctactattcattcatcatatcatcaacaatatcc

SEQ ID NO: 87555 - DNA, 1084 bp, Cannabis sativa
cctgccactggccattaactttcgatacaaggttaagacaatcggtaaagatgaaattgggctgcatctggaggaaaaggcactaagagagaccttccaataaagcttgaccttcagcaaatataggagtaggagcacctggtttttggatggatgcagaagtgaaaacttggttagagcctctctttataacaaaacccaaacctatgacacaattagtatgatccagtgctgcatccacaaataaactaatactgtcattggaaataatgtgttgtgaactcggtttggaactggatggttgctaagttgtgtcagccgaaggtgaatctactccattgatcctttgagcctcctaatattcctgcaaataattcatgacaaactcttccacattttaatactataagactttttatacagtgctttgttcataagtattagtagagaagtccggaagtactttatatgtataaagaattatacatatatgatcatttgatataaaaattaagatcatacaacaagaatgtaacaaatatatggtcttggagtactatcgttatcacaaataaaaatttatattattattgatgtgtaatgttcatattccttaaaattccacacatactcatgaagagttatagtaaatatatggtcatagataatatacatgatattttaaaagtgataataataatcttatgaggtatatcatcaccaacataattatagatcatatgtgcatgagggggagatatattcatgttgcacttttttttccttagctcaagttttgtcccactgaattttcctaataaggtttttaacgaggtaactttaaattatgataacatacttgcactttatgaagcaagtggagaatatgtgagagtgagatcactggcataacatattcagaaaatatatgggttacactcaataaagcagtattaacattaacaattctccatgaaaataacttgaaatgcattgctcaactaaaactataatagatgagatagaaccaaagacattttcaccaaattcttcttactacgatcttcaagaaaatggctatatt

SEQ ID NO: 87556 - DNA, 554 bp, Cannabis sativa
tttacggattttttttttacaaatctttatttacatgttgttctaaaaaaaacttttatttttatgttgtgaaaatatattataaaattgttataacatgaaaataacattgaaatacaaaactgtatcaaaaatgtaaataaaaaaatatgtaaaaatgtaaaattaaaaatttcatttttaggtgtgtaaatttccctatatattacaaaaacttaggaattaattatgatattttgtttgttgttgaaataaacattgaaatataattgataaattaataaaattattcctacattaattagttttatatttatagagaaatggtattagaattactttagttttactttatttaatcatttgtaatgtttttttttaaaaaaaaatcatttgtaatgtaattcttactacatagcttttttgaattcgtttggtacgccatattatgttgtattgtattagtattatttaatataatactatatttagtattgacttgtattagtaagttgtgtaaatttataataatattttcaataaactcaatccca

SEQ ID NO: 87557 - DNA, 626 bp, Cannabis sativa
ttttatatcagcttattatattttgtttataaaaatgtataaatatttacccaaggaggagattcgaaatcccagacacatataatatagttgctaagttatatttagcctatgtttcgggtctaatagttaagcattttttcggttattagtgtctttcaaagcggttttacgcttgattttccttgtttcaggttcccggggcattaaagttcaaattcagtcaattgacgaaaagacgggacaaattggtgaaaaatcagccaaaactgctcattgggagtcagtagtcgcgaccagaaggaagcctagtcgcgacccttttatctggtcacgactagagagatttggcagaaactctgatttttgagttttgcctgtggtcgcgaccaacccttaagttggtcgcgaccaggtacggaaatcaagatttttgacctaattcagattttttcccaattggaggcacacatttcattcctatataaggaacacgactcagaaggccaaagaaagcaagaacaggcctggaaagtgaatgaaagaggagaggaagcaatcttgaagagcgatatcaccatctagtttctttcttttaccctccactactacaaatatatctttta

SEQ ID NO: 87558 - DNA, 537 bp, Cannabis sativa
ccattaaagtggatattagcaaagcttatgacacggtgagttgggactttcttgaagatttacttaatgcttacaatttgccttccaagttcataatgtggatcatgacttgtgttagagcaactagctactcaattgtcatgaatgggagaattcaagaaagcttcaaaggggagaagggtctaaggcaaggtgatccattgtcccctctcttatttatgcttgttatggaatatctaacccgttgtcttcaaaaagttactagttgtacccattacagttatcatcctatgtgtaaagagcttagaattttgaatatttgctttgttgatgattaatgctttacagtaaaggtactcaacaatctgtcagagctctcaaagatgctcttgaggagtttaatgttgtgagtggcgtatccatcaatacttctaagtctcaaatttactttggtggggtggagtcaaatataaagcagagtattctgagagattttggtttgattgaaggaagctttcctcttcgatacttaggagt

SEQ ID NO: 87559 - DNA, 1492 bp, Cannabis sativa
ttctaatgttttttgtttcaagagatccacaaatttattcttaacttcttcgggaacctccttacatggtgcaacacctttcctagtgtgagcatagtgttgtttcaaccatgcaacaccacccgtaataagctttctgcagtatttacactccatgtaaatataatttttcttgttttcaacattttcacctgaagtatcaacttcaacaccatgcttccaagccagatcttttctatttctaagattattattattattattatcatcaacactgccactgcgactagctcgtccagcaccaatatgactcaattttgattttctatttattttcttatctatacaaaacaaagtaacaatcaaataataaatcaccacctaatgaacctaaggacaactaaatatggcttataaattaaaaaaactaaaaaatattcaaatgtttacctatggaacaaagaaaggtagcagcaaccaagaagcacctaactcggacaaggcagcagcaaaccagcaaggtttttttttctgttatgagaaaaggtaaaaggcagcagcaaggtggagtcgtggaggaaggcagtgaaaatggaggagcagtgagaaggaaggcaggggcagggtagtgcaccaattcgaaggaagaaggcaacaagcttttttttcgtgggttgaacttgaagaaatatccagcagctgtgtgctgttgtgaagaagagatgagctgctacgaagaagataaatctagggttttattctttaattttatttgggttcacttaagtattttattgggcttttttattaatgtttattgtgcttatttaaagttttttaagtcttatgttaggcagcagaaaactaaatttaaaataccaatttggacctttctttagggcttacatagcccattttacatacaaaatttgaggtgcacgcctcttacgcctcaacgcctcacgcctcaactcaacgcctcacgacttgaggtatacacctcacttcttctcagcaaggtgcacacgttgatgcacttttcaaatgcctcaaggcgcacctcaaaaatgcctttttaaacacgataaagtaggagttcggacttggcgaacgagctcttgccgcgggagaggaaagcggggcaggcaaaataaccattccggtggttgatagtggttgggtggcctaagccgcctttagttcttactattcatatggtctaccaaaagtttttaatgtgttgtctcacatataaagtataaatagaaagaacaagagagatgttaaccttgggtggattcattaccagacttgaaagaagttgacctcaaattttagagcaaggatttataggtgccattttgtatatttgctcacataaacattttactgatatacctgtaatatgttcaccagaaaatgtcacaggacacaaagtagctacagtatatacatttgttctacacagctgaataaccaaatcaaataaaca

SEQ ID NO: 87560 - DNA, 634 bp, Cannabis sativa
tgacagatgcggtcatgagggaaactatacgcgagagacatgtgaaaggttgtcatgaggaggtgactttggttgtcccattgagggttttgaaaaatgaggactgtaattattttgtcttatcctatttatggtgccatgtcacgaaactcttcggttttcgtgtaggcgtgcccatcactggccgttggataggacgaccttaggcattctagctgccacgtgtcataattccaatttatgagggatacgagtatttaaacttattgatacaaaataacctcctcattttccctctcattcttaacttccttttctctcttttacttagattcagagaaattcccatactctgtgcagatttttgcttcttcctcttgaatctcttcagtttcagaggtgatcgaaaccagccgcagggagaatcatcaaaactaaaggttagtttcgaatccacttgcttttttggtttcaatctaaaaaacaaagctgcattttctgaatttttatgtttcgaaaggttttgaaaatacatgttcatatatatagggctatattcttttgtgtagaactgggtaatcccagaagaaagtaaagctgaaatttgcatagtcgtgaactttaggaagaatgt

SEQ ID NO: 87561 - DNA, 767 bp, Cannabis sativa
tggattgttgtcacacttcctaacggacatcatgccattggttgcaaatgggtatacagaatcaaatacaatgttgatggcactgttgaaagacttaaagcttgcttagtagctgaaggctacaatcaaaaagaagatattgattactttcacacctttgcccctgttgcaaagtttaatgcattaaaattactgcttgctattgcagtcattaacaattggtctttgtaccaacttgatatcaataacgccattcttcatggcgatttacatgaaactgtctacatgacactccccaagggatataaacctcaaggagatatttctccaaatgttgtatgtaaactaaacaaaagtctctatagcttgaaacaagcctctagataatggtttaccaaactcaacaattatcttttatccactgaatttaatccctttcagatcccacattatcattaaaatcacgaaggcatttttcttgctcttttaaaatatgttgatggcattgtggttgcttcaaataatgatgttgttgttctttcctttaaacagaaacttaattctgtgtttcaacttaaggatcttggccctttacgttttttcttaggcttcgaaataggtcgatctccctctggaatttttgtatcccagagaccattcaccctacaactattaactgacacatgttatttaggagcttctcctgcttctacaccaatggaacctaatattcggctctcatatgatattggggaaccattagaaaa

SEQ ID NO: 87562 - DNA, 1315 bp, Cannabis sativa
cggttgcagacacatctgctcaatttcaatcttcctcttcagcatccgagaagtttgattggttctattccaaggatagaatccattgattttgtttttcgaacatctgagctcgaattagagcctttcttcttcaaaattttgcatgaattcaacttccatgcccttttggatcttgtttttgccatagctccaactcaagagctgcaagaaatagagagagaaaaagcttgtatttttttttaacaaaatacaattattattagaaatacatcttcccataaatttttggcgaaaataatctcattaatatctatttctaactaagaaaaaagaaaggctaaatgtgtgcgcgcccacacacacatatagaatatattttaatgggtattacttattgatggttactaaataaatttaattataaatattaattttaaaaaatattaatcattagattttgatccaataacgaataataaaagagatattctatgtttaatttagctacttaattgaataaaaaatataaaaaaatattatttctacactttatcaaaagtatgtttatatatagaaaatatttaagtcaaactcaactttttttttttgccgattgaacaactctagcctatataatattaaaatattttttttttctaattagcttaaaaattaattgtaaaaactcaaatttttctaatatacccatttattagtgatgccaaagtaaatatataatatatatttgaaaattgtaactttcaataagatcaaaacaattcagtaaaagttgagcataatttagtggacaatacatgcacatatttcttttacaaagtgttggtatacaaaatttacacactttgtaggctttcataaaatttatgtaaaaataagattttctttttaaaaaagaaaaattatttatggaaaaaagtaaaaaaagaaaaagaaaaagaaaaatattaagccatatatttgcacattttagggtaatcacttaaaaaatttgagaaaaataatataaggtaacgggttattctaacaaggtaactagttacctttttggttatcctaaattattctttttttcatactttgaacctttttttaacgcatttaatttttttttaaatgtttcccgtaaaatatttttctttttccgaaagaaaattatagaaatgaaaatttctcatagagatgtatgttgtatttttgttttttacaattatttcaagaggaaattacacttagtatgggattttaaaagttcttatgataaatatgacacatttaagtttggccaatttat

SEQ ID NO: 87563 - DNA, 962 bp, Cannabis sativa
  modified_base (28)..(32): a, c, t, g, unknown or other
  modified_base (112)..(113): a, c, t, g, unknown or other
attttttgttgttatttagatgttattnnnnngttaccttatgtagttttcttgttatttctatgaaaaactgtaaaaaatgtaaaagaaaaaattctttaaacgtaaaaanntaatttttttttacaaaaaataaggccttatgtaattatcttttttttttttttaattacttctttggatgagttgagaaatacttttttttttttttcgtatccattaattataaatactctcatattatattttattaaaatttactcatttttataagtgggttgccaaatatactcttaaatccagtacttaatttacattaacctaagaggtataatgggaacattatttataaaagtgtgtatatcttaaaaaatatgaaaataaaagtaaaaaattaaaacaagtaaaataaattaggtagataatacagcttactctactttcttaaatggttaaaggcaaatctaaaatggtgagttttttattattttctgttatgcaattgctactaaaataaatagaggagtactgttataatttcttagttaatttttttttttttgctatgatagtatttgttatagttataacattatctttgtatatttttaaaaaatttcgaacaatgttgaaaataagtttgaaattttttgaacatgcgtggtatattaaaatattaaatattttatttttgatactgtaaattatttaaaatttattaaaaaatttaatattataattataacaaatacaactatgaaaaaaataaaaaaaaatattttgaaatgtgatttaaaaatattaactaaaaaattataatagaaaaagtaaatatcaactttctcactaaacaaataatgtattgttattcaaatggtaaataaaataaaataaatttgtcttgacatcataaatgtagtgtttctttgtcaattggtaagttgtttttaaaagactttgca

SEQ ID NO: 87564 - DNA, 717 bp, Cannabis sativa
aagagctaacgatagtcacatctagctaaatccctttagtgaacaaaaaaaatagtagaattccttagtgcacagcacaagatacttgacagactaaaaattcagcttcaattttgactcaaactatctttgaataacaagaccgctagaccaatagttcgaagaagtcacagacgacacaagcttccggctgaagagtatattcaatattaagttaggacgcacgactactctttatctttaatatttttgtatttagttactttttaacaatgaaaataaaatgtatgcatagaacaattttaacagtataatctctctaagcagcagtatcaaggaccaaaaataccgacgaaaataaaatgtcaacttcaatagttttgctagacctgattcaacttcctagctactacagtgcatccaataggcaatataagcataacctaacatgaatgggccagtagtactatgcacagaaaagtatacaaaattccttattatagagagctgaaagaaaacttgcattgtttcttcaagtccttccaatatcttcaaaatattataagaaagcaaacgtacttgacaggacaaaaaaagactgaagctcttacgagagctaaaggttttaagtctgatgacccatttttcattgttctaatgcagccatcgtttgttggagcttcatatagtatagtaattacttaattagattcttgt

SEQ ID NO: 87565 - DNA, 876 bp, Cannabis sativa
  modified_base (830)..(836): a, c, t, g, unknown or other
tcttttattgataacaaatcagattaaaaagaaatgggttttatttagggcataaaatcccaacaataagatcttgatgcatcttggtagtgccaggatgcagtgaatatggagtggtatgagcttcctcgagaatgtcacttctaagttccacactacttggaacacaaaccctggtcttatacaataacatcttattatctgacatcgtaaaatctttagcttgacacgagaaaacctcttctcagatcttcactaattccagatcagttaattgagcagctttaattcgttctaacagatcagattgcaacatcaaattatgtagttttcctacaacaaactcaatgcttgacctgaccatgtcttccactagctgaggtgaaatcttaatcatactagttactttcccgggacccttccttctaagggcatcaaccaccacattggccttctcgggatggtaaaggatttcacagttataatcttaaccaactccaaccaacgtgtaacgccctgatacttagcgctacagtgatttttcaattacactgccatcttttctaatcaaagaagtttcctttaaaatcttgtctaattaaaattttagatttaattattaaactttataaacttttatatatatatttacaaaagtcgagatcccgtaattaaacttttacataatattcaaattacatttagtcaggttgcacaacgactacaaaataaaaccccagatgtcccgagaccgaagactctaggtcacgccgccatgacatgtacagcatcatcctagttcgaggctcactcctgttcagccttcgccnnnnnnntacctacacatgaaagtagaactgtgagtcaacaaactca

SEQ ID NO: 87566 - DNA, 609 bp, Cannabis sativa
ttttttttttttttttattgaagtttattattcttttcttacttttatctgggttgggttcgaaaatggtgggagtggattagataaggtttttttttttaattattattattactattaattattttctgttagtaatttataatgtaggcaccttattggtattgttgcagtggaaaatgggtgtttcacattgtcttgctgataattaagtgagcatgattttctttatttgttttatcaccatcgctatgtctgacaaactgtttcgttatgatagagatagagatagagttataattttcctaaaattatttaataataacaactttatatgatatgtattcgtataacttttataactaggactggttgctcatggaaagttttaaacgacatttcctgattttccttctgtccttttctttttttgtcaagtattataaaagtctgaattctttcttgtattctgggtttcttttttagaaaacattagccaaacaccttcaattttttgagaacataactttgaaaacaagaacagagaaacaatatcaagcaggtatcctacatggatatattaaatcagtgtcattcataggatattca

SEQ ID NO: 87567 - DNA, 1084 bp, Cannabis sativa
taataatagtgtagtccatgggtaaattatatatatctatatggtggtggtctacacagcttgtgatcaaataatgctttacacaacgcactacaattatttacttatgtctatacacaatacagacgtcttaaatattttggaggctctattttaatttttaatattagctccctacaaaaaaaaatatgtacaatttataaataatatttttttaaatattattatagaattatatatattttacaaaatattaaaaaaaatttaattattttattaaaatttttattaatttctatacaacaaaaaatgaatatgaaaagtttgaaaaaaataattaataacagtattagatttttttaatttgtttttaaatagaattaaaaatgagttttaagaatacagatgaaagtgactaatgacaagtagttagtcccttaaaaaaattggattcattaaaaaaacaatgaaagacattttaaaaaaatattagaccttttatttttttaagccctatctacattatttaactcaacttgatataaaagccggccttgacaatatatatatatatatatagggagataattttgtctcgtgatgtactttcacggaatgtattctgtggtacattagatggatctcagggtacattaaatgagtgtcagggtacgtttctactttttaatcctaattacctctagatcaatctcagtcgtcagatcaaataactccctcatctgacggctgtcgaacatcacggattacaatctgtgaaagtacaataacggaacaaaatcatatccctctatatatatgattgtatttaaatgtgtgggcatccattatatgattttatgatgccctcaagttaagggcataacccgtgactaaatttgaattaagttggtattattaatgttgttaattggattattatatataatatatatataatatagtccaaatcagcaaagtattgttttgttgttatagctttatagggcaatgacataagtaataactaatttcgatctaaccagtaacacttatttgaattcatttaatttgaattgacaatttt

SEQ ID NO: 87568 - DNA, 684 bp, Cannabis sativa
ttttcttctcttaaaaacagtagacaaaaacttgtttaatattgattttcaaaagaaaaacttatagacataacccattttatactcaatttgaaaacttataaatcaaattatcaaaataaatatttctttccatgttaatatcttatgattgttgggtgtgatgtgaagtatctgaattgatgccatttctttctattgtttagtttttattatatattactccactctactaccttaggaaaaaaaaaacacaatatgaagaatatactattttcaatacttttttttttatactttcatgcctattagatattgtacattgtctttcacgttttttttttttcctttaatgttcatatgcatatttcaatgtgttatattagttgtaagtctcatatagtgcatatttatctattgtattttgtgaagtagctcataagttgttgattttttttttatttaaaaataaaaataaaatagaactttcatttgttagttgaaatggttcaaatggactactcttacatatcagataatttttacttttagtagaaatttcaagagaaaattataaaaatttactttttaatggcatcaataaataatactataaggttatgggtttttttttttttttttacatttatatgaaattttttatgccatttttttgtaaaaaaa

SEQ ID NO: 87569 - DNA, 1178 bp, Cannabis sativa
aactaagcgggctttacaataaattttgtctatgtaccttcccaagattaaatatggttaccaaccaggtacataccaattgtggaattagaaaatcgccatcttgggataagagaagatggtaccaaaaaacaatctgaccttgggataagagatccacgaggcaaacctcgcggttcgcacaccaaggggcagggagcaagccagggatatactcaaaactcacaggagacacaacctaagatacgtggaacaccggacaaaattcatcgaccctctcttcaggctcatcagaaagaaagtcgcagaaacccttataggaagagtaagatgaatcaaaccttaaggggaggggcaaggtccaacacgtgggtagaaaatttaactactcatgtaagcaatgaaaatatatacaaaattacaagttcattgagaatatatttgaatttgctcaaaataagatcatttctgatgattgcgaggtggaatcgatgatggctcgcagattgaggaacgggcatataagatgctcgcacgtaaagtaggaaattaactacttaacgtcggaagaaaggacaagtaatggaaatccctaataaactttatccatgtgatagtttatattgtgaacaaaacacaagcaaacatccgcatattaaagtttaaagttaaaaatgtgaggcgttaaaaagcaaagttggcaatccaaccttgcaaatttgtctttacaaaaaaaaaaggcgttaaaaagagaagttggccatccaaccttgcaaatttgtatttacaaaaaaaaaagagtgccgctagaggcaaaccattgtctcggccaaagggacatttttctaaaagaaaaaagggatgtctaggccaaagggccatttttctagaagaaaaaacggagataaataaaaaccaagtttacatgctgagagacttagacaggtcttcctcttcttcttcctcaacctcgtcaactccttcctccaacctggtcttcttgcaaagagctaaagtttcctcttccttctcctccaagaagctggtgtccatattagggttccaaaggcaggccctataaaaagtgcgaaaaccaaccttgtcgcaccgttctctggtctcgacttctttctcggcaagtttttcagcaagcatctcctcaaactcatcggctttga

SEQ ID NO: 87570 - DNA, 1051 bp, Cannabis sativa
tcattctgcttcaacatgctgcaacagatactgctagttttaaacttctctccacccgctgccactatttcaactttggtaaaagttgatcgtaaccgacaaagctttctccaatactaactagtatccatgctcattctataggaccagaaattactccccttaagataaaccgagttaatcgacttaacccacaataaatcttttttgttcatcgaatcccaaatgaacctagttaaagaagctttattccatttagtgccatccttgaacccaagaccatcataagctttaggaaggcacaccctttcccaacttatcaagtgaactctagaccgattatctttcaaaccccaaaggaatccgtggcaaagcttctcaatctcctttatcacactttgaggcaaaaggaagactctcatccaatagttccttaatcctatcaaagtagaatggattaattggacacgaccagcataggaaagatgtttattagcccaagaatgaagcttattcttcatctttttcaaaatcggcccacaatcctcaagtctccatttagttgatctaagagggatcccgagatacttgagagggaactctcctatggaatgatttaatttttgagcgagcagaattggatgagcaactccaccaatatacacctgggatttagcaaaatttatggagaggcccgaggtcttgctaaaatcatcaagcagagatttaatggcattgagagaaccctcattccctttacaaaagattactaaatcatccgcaaaacaaagatttgtaagtttcatttttttgcataagggatgatacttaaaatccttatctctggccgctttttggatgcttcgagacagatattccatgactaggataaaaaggaggggagagattgggtccccttgtctaagcccttgttcgcctttgaaagacccctgaacttttccattcatgagtaaagaatacgacgtatttctcacacagttcatgatccactttacaaacttttcaggaaagcaataggccaccagaagat

SEQ ID NO: 87571 - DNA, 741 bp, Cannabis sativa
ttcatatttaggttgttaaatcaagatacttgtgagtagatctaagatcctggtaaaataacttccaacagtatttgtacccgtttggggttgctttctggtatgctttctttcttacctgtgcattctaccacaatgtgtgcaaaggcttggcctttgattgctgttcggggttggaaaatgatttcatactggcttttgcacaaagtctatcacaaagtctacctcccacttgagtagccatcaagaagcttctggcttttgcagtatttggcgtagtggttggtcagtgtatacccgaacaggataagcttggaaatagggcctcaaattccttgttgctagaataaggcagtaggcgagtttctctattaatgggtatcggtcctcggccacaatgagtcttttactgttttaatagattgggtgttgtacgctgttctcttctgtgatcagcacgccacttagggcatgttccgtggcagctaagtatattcccagttcttctccatcaagtggttttgagagtacgggaggttttgcaagttgtgcttttagctcttggaaagctttttcacactcttccatccatttgaactgcttatttcctcacagggtgttgaagaatgggatacacttatctgttgattttgaaacacatctattcagcgcggcgatccgaccaatcaggctttgcacttcttttgtttttgttggcaagttcatatctaggagggcttg

SEQ ID NO: 87572 - DNA, 2719 bp, Cannabis sativa
tacttataggaggattgtatttttttatcaatcatgataaaaaatatcatgtatttttttaaaaaaaaaaaaaatcgtacctcatatttgtaaaagggttagattcgattttggttaatatttttaatacaattaaattaattttttttactgtcaatgtgctcaaaattgaataaaaaaaagaaaagaaaaattgatcatcctatttataaatagtttggcaaaaatcagatttagagacctaatttccaatatttttacaaaacacatgcatgatttaaaaattgacatgtattttaaaactaccgagttcaaatgggtaatatgatgtacgtaaaacacaaagtgcgaaaaagtatatattaatgttaaagttaacttacagatgatgttgctaggtcatttgtaagtcgtattattatggcactgtgacgaattatggtaggataataaccatgttccaagcattcgaaaatctctttattattatttgaatgagaaaaataagcatgcacaataagaactggtgctcccactgagatccaaccattttctatatattcttccaatgttggtgtgtatctactatagtaccattttgcttcttgtagaaaacctctacacatatctatccactacacaataaatatcattatgtgattagattcgatcgataataagtacttataagaaatttttagcacatattgttattatatcgctatttgatacaaatcaatattttgtatgagcgttgttgttcgacaccaaaagtatatgagtgtcgagcacctcattaggctgccgatcgattgattcaacatgtttgatgctgaacaacaattctcatacaaatatgagaattgctcatatataaagcctatgcttatttttatagctaggttatacataaataataaacaagataggtagatatatataatcataccgttttcttaaggtattgaatgttgatggagatgtctttgtctcttaatatctcaaatactatttcatttattgtattgtgtaaaacaagaaaaggcatcttcatgtattctggtaactcatttatcattgtcacatcccatctgccaataaacaaaaatacacacatataaatacaaagatatagatatataaatattaatatatatatatatatatatatataaatatgggttggagttgttccatcgattgaaaaaaaaaattttaaaaaatattccagtaaaaaagaagataaaaaaaagttgagtttaatttcaatattttgtgtacaaacatatttttaatatagtaattaaaaaatatattttgatatattttttaattaagtagttaaattaagcataaaattcaaaattctcttttattattcgttattggatcaaaatttaatagtttaatatttttaaaattaatatttaaactctttcagtaaccaatggatatataatacccgaaaagtattatatataaatatatttatatatacacactataacatttaagacttgtagaagcggacatctccgccagtattaatgtccaaatctaccaatattgggtattattggtggaatcagccgataataatccgccgatataagtagctaatatgattatttgcgaccaaaaaatatacatataatactctaatctaataattgttaatcctctataataacacaacttaattagttatataattatttctttcttaaataatatatatatatatatatgtactaacctctcaacagctttggtgaaaagctctaattcatccaatgttccataaacatcatatatatcatcaattaatgttattagctcatataatttggcagttgttattctaaaataactgaattttggctcaaatcttactccaaccttccataagaaacattccatcaatcgatctcttgcaaaattcaatttctccccaagtttagtatgcctccaccaccttaatatatatataataaatcacttcattagtttaaataaatttaatccaaaaaaaaaaacccctttgatgatttaattacaatatcatcatcatcacctgaatatatgttttagatcgtcatgatgtgttgattgtatcatgttgaaatcgagtttagcaaattcaagcaaaataggattcatgtcttgttttttctcatacgcgtcgatgaaccacttagcttctattcttgtagtcctccaatgaagtgggagctctaatgcatgattcactacttcgaaattataatcataatcattatcaatcattaatttcttttcttgcgatatcattatagtgtagtcttcgagatatttagttgtgaaaattctagcttcctctaaaatactttcgccttttttctcatagaatgaagcttcatataaggccaatactcccataatatcatcactaattatgtttgccttgaattttcctgtctcgtccttaaaatgattaaaaatctctgcaataacacataattgaacaattattaaatatttaataaaaatttagttcgcaacttggaataatttggttaatcaattaaactaaatcaaacgatttttaattattttaaaaatgttagaaaatatcatggaacatatgtaaaaccaaatacataagtacttcaaacactagaagaaaataattttataaaagtcctaatagaataaaagagtctcatatatatatatatat

SEQ ID NO: 87573 - DNA, 1093 bp, Cannabis sativa
tcctccaactgaagcacacaatctgtagaaaaacaagagtctcttgccagcaatgagccaacttgtttgcagatcgtttaacaaaacacaactgaatatatgagaaaactaaaaacaaattacgagcatcttgaacaagtaaatcaaattgagaaatcataaaaaaaattattttggatagtttggacacagaccaagctatctgtttccaaaataacgtggtctcatgggtgatatgcaatccaacttaaagcttctttgatgcctattatttccgcaatttcaggttgaacacgaccaatcttccctttagtgaaagcttctagcatattaccatgatgatcccgagctacgcaacccatatcaaacccaccctcttgatcaaacaaagccccatcaacattaactttgatcttatgtaacataggtgcattccaatgctcagaatgtcgcccccttcattcaaaggagacaaagaaagaccttttctaccttgagcacatttatattgatcaagcatgttttttgctgatgcaacaatatttgatgtagcccaactcaccacagccgcttcctccatctcactaacacgtcccctaccgaataataacagaagccagctactaaatgttgcagagccgcccctaacatccaccgagctgcgattccaggcagcagtagcaacctcacaccccaccaaggcgtgatgcacagtttctgcagcaacattgcacaaaggacaagcagcattaacagggacatgatgttttttaagctgaaaacacgttggaaggacacctgatgcagctctccaaaaaaaagttactgacctttggaggaacattcaacgaccataaagtcttctgaaaacatgtattgccatccacactccaagctccttttgtttcttgcaagaacttataaatagaggaatatggtaaggcatttaagataagagaaaacccaagttggcttacaaatttgtctttacaaaaatgccactaggggcaaactattaagccattttcctaaaacaaataacacaagattattcatgggggttggtgagctcaagaaagaccgtctacacata

SEQ ID NO: 87574 - DNA, 654 bp, Cannabis sativa
  modified_base (42)..(49): a, c, t, g, unknown or other
gaattccataaataacagcaataaattatttaaatagctatnnnnnnnnttcataattaatcataattaaccgataatttccaaattaactaagcgggctttacagaagtattttgatggatttggtaggttatcctaaagacttctcaatctcgaataatggaatgttactttgcaaggctcgggtttgtgttacgagcagtgatgagctcagaaaagaaatacttgctgaggctcataatacgccttattcattgcatttggcaaccaccaaaatgtaccaagactttaaatcctattattggtggtgcaaaatgaagagagacgtatttgaatacgtgtcaaggtgtttaatatgtcaacagattaaagcagaacatcagaaatcggcagggttattacaaccagtaacactccctgagtggaagtgggacgatgttacaatggactttgtagttggattaccaagaaccacgggaatgtatgactcctggactgttccacaaagttagcacattttttgtcggtaaaaataacttatactgtgaattagtatgtggagctatatgtaaaagagatagtacgtcttcatggagtcccaaaatctattgtttcagacagagatcgaaagtttacatcaaagttctagataag

SEQ ID NO: 87575 - DNA, 1265 bp, Cannabis sativa
aaacttctaaggattaacttgcactcttccacaatataaccgaacccagaattaagcttctcattgcttcgaatagcatccacacaaaccagactatcggattcaacaacagcgtgggaatagttatgatttttcaaccaacttaaagcttctctaatgcccaaagcttctgcaatttcgggtgcaactttaccttgctttgcaccagcaagaacggagatcaattcaccttcagtatttcgaatcacacagccgaatccatgcttgagatcttgttcaaaaagagctgcatcgacgttcaacttgatgcctacagtcggtttggtccagacctctgagccatcaccaggtttcggaggcgacaatggaggtaagttacttctgccttgagccttcaaaaactggtgcaagcttgattgagcaaaatcaaccacactttttacacttcgaacccgattcttccaaaggaaatcatttctggctgatcatattgcccaacacaacatgacgactcggcttaacttctcatcatccattcgggcagcattaaagctaagccatgacagcaaggaaacgagatttctatcagctgcattaaacccagaaaactcccagcaagcccaagcaaattgacaagaaactaacaaatgcaactcagtttcggcaaaaacaccacacaaaggacatttgttatcagtcagtaccttcttgatgcagaggttcactttggttgctaagcagttcgaagccgctctccacactagatctttagttttgggaggaactttaagtgaccacaatttattccaaaacaggtggtcttctgtaggaattggaggctgcttatgatcttgaatcaattgataggcacttcggacagaataaagtccatttctctccgcaaaccagtaccaaaaatcatcctctaccgcctgttttatttgaatgcccaggattaatgcagcgtcatcgggagtaaaaagatcattaacaacatcagcatcccaggagcgactatgggtttgaaacaagctattaaccgtgaagttctcaagtcccgggacattgggaattggagttgttctgtcaagagaaggcagccaaggatcggtggttatttgtacagtcaaaccagatcctattcccttccttaaaccgagcttaactgtgtcctttgcggcaaatatactgctccaaatgaagctaggattagaacccaactcagcagataaataatcaccttgtggatagtatctagccttgaa

SEQ ID NO: 87576 - DNA, 845 bp, Cannabis sativa
agatcctggggctgaaaataaagtgatgttctaaaaagacctcaggccacataggacatgaaaatagtgttttaaaaaggctctaggccacataggacctacagtttcaaaaaaggccataggacacatggaatgcaaagtgagtaatgttcctaagctaagatgccacaggccctagaaaagtcacaggatatgcagaacatgaaaacagagtctatacaatacaaacataatgttgaatactgataaaaaatttatctacatgtttataggggcagcaagagctgaatcttgagctgccaagtcgagatctgcagagtccaggccggccccatcatcactatgcttgccagcctggcgggcaacatcctggccagccacctcctccattagtgggtcggcccacacctcgtcacgagtacctgatgatgacccctctcgataagcatcggtctggtccatctccatctggctctcaaacaatgtcctcccacgggatggtgttctctctacaaaggctggagtgcccatgtatgacaacttggctttagggttgtccaggcagaactcgtaagtatgttcagaggacaaatcaaggtaatattccttaatggcatgttggccatcaagagcctcctgtaacttcttcttgtgttcctcaagatatgtctgcaacccagaaatgagagtagcttggttaatgttcttggtgttcctagcactcagcatagtctccattcccgagaccattctctacttctctgctaaaagaacccccagctcagcattggctttgtcctttgcagcaatagatgcctcaaagaccttcacccgctcctagaaag

SEQ ID NO: 87577 - DNA, 573 bp, Cannabis sativa
ggtgagttgtactgtcacgtggcaaagcataccacgtcatgtggacgaaaaattgggataacatttgttccccaagtccatgtgcggataaggactttaccagcaagattgatgttttcgggaccgcaattacttttgctgaataaaaagtggtgcgcatgttgaagcattttgtcttaattgtttagtcttgttgtaatagagaaataaatattttatgtgcctttatgaggagctggtgaagtaagtgagaaaaagggggccacacataagtgagttttgggggaaaaacccttttttcacttttattttaaacttttactttctctcattagaacttggctcttgaaaaagctcctccttctctctaaatggccgaacctcttggctttaatttccttggaatttttgcactatttcaacaatccaagcttcccgtctttgtcttcgtcagaatctagttgcgggtatgctttatattctttttctatcacttgatttgaatgatttttccatgaatgcatgaatattatttcttattttgaacatgctttgtgttggaaattattttac

SEQ ID NO: 87578 - DNA, 650 bp, Cannabis sativa
tgaaagaacaactctaatcaactcagtattcattgctttacaagcataatggagccaaattgtgatcatgccaaaaagaattttgaagtcaattgaagccatttgtagagctttcttatggaaagggcaagatgtgttttatggagcaggtgctgttgctagggacaatgtatgtcaacctaagtctacagggggatttggtatcaaaaagcttgaaacttggaacagccatgtccaagtacatttgggctatctcgaacaaccaagaaagcctatggctaagatgggtgaacagtgtatacatcaaaggccaaccctggtggagttacagtgcttctatacactccagttggtattggaagaagcttgtctccctcaaaaaccagatttttttccttaactgacattactgaatttcaaaggaacaaatatacaattgcagcagggtacaagatgtttagcactcatcaaccaaaaatggcttggagcaaagaggtgtggtctcgattgaatacaccaaaacataatatgattctatggcttgtaatgctttaataggttgaagacaaaagatctgttgattaaaattggaattcaactgcaagagaagtgtagcctatgtggtgagcacaatgagaatattcaacatt

SEQ ID NO: 87579 - DNA, 742 bp, Cannabis sativa
ttctgttcgagcttggcgatacacataagtcaatggtcttgccatgtattgattgcatctagggcaaatgacagttggatcatccgatacaaacgtattaacacatcgacggacaactacctctatggctggaccacaagagtatagttgttttgaatttttggaagatgtgttgacaacattggttaaggagagaagaccacctgggagtgagggcatggacctaagaagggtgtctttgttgagattagattggagataagatgggcttagtttttctaggctttgatagagattgcctatgctaccaaccatgtcaataccatcactggccaatagagttgtgattgtaccaactggcatggatagaagagagaagaggagatcggtaaagtccttacctgcctcaccatacaacactcttcttctacttgtatcgatcagaagcttcagtttaataacactttgaccaaaatttgccattttttagaaaagttatttcttctctgttcttcctttattaattataggccttattgtgacttcgtgatggtactatatatatgcatattaattgtaagaatttgaaattttctaattagagtttcgagaagtatttgttttgattggaaacaaggaagcggctataattataattcttaattcacgcgcgcgtattaattaattatcaaatgcatgcatgcatgtatgcacgtcgtttcgtttttcaatattaatttgt

SEQ ID NO: 87580 - DNA, 1007 bp, Cannabis sativa
  modified_base (360)..(360): a, c, t, g, unknown or other
gcagtcaacaagacattgaaggatacactaaagaaaagacttgaggatgctaaaggaaactagctggaggaacttcatgaagttctatggttgtactgaacaaccgagaaaacaacaacctgacgtactccattttccatggcatatggatatgaagcaatgctgcccgtagaactcaagccaccatcccacagaacattgacgtacagccaagaagcaaatcacgtactccttgccgaatcacttgaggaaagcgaagagaagaaaaccacaacaaacttcaagttgatggcccattagcaaaagtagctttgtatttcaacaaacaagtgaaggctcgaaaattctttgtgggagatntggtcctaagaagagtatttctaagcacctaagacagtgtactcggacctaacagggcaggatcatatcaggtggtcgaagttctcgaatcaggagcatacaaattgggtaagtgtgatgaaaaaatgcaactcgttctgggaccaaggtattggaatggggaacatttaagaaaatactatcaatagaagtaccaggtcggatgaccatatcaagtactaaacaaaatgaacatttacttttaagtgaatggccttctgggcgaaccacgcccaaaggttcagacaaaattacaaagtacttaggttgggtgacaaccatttaaagtacaatttctaatttctacaatttgttttatttcatgttaagctaaagatcagattagatcaagttaatagattagatgtaagttactatggtaacaaacatattttcgatcaataaatgaataaatatattttttacaaaactcaaattgagtcgaaattactaacatgttgctaatttaccatccagtgcatacaaaaggtctagtcaaacccaagactccaaacagataaaaaggcatacttgtaaaaaacaagtgaccaagagtcataagtctgcttggtcacttggggtgcacctatacctgtacaaagcatttg

SEQ ID NO: 87581 - DNA, 1170 bp, Cannabis sativa
atgagcaaagcaatgaatgtaaaaagcacaagaattttccttcaaaattagtgcttttagaccattgaactcaccttgcatattacttgctccatcataaccttgtcttcttatcattgagataatcaacccatatcttgaaaatagtttatcaatcgcagccttaagagtcaaagttgtggtggtagaaacatgttcaatgacattgaatcgttcaataagatgtccattcttatccacataatgcaacacaatagccatttgctccttggttgagttatcacgagattcatcaatcaaaatagagaaaaaagaatctccaatatcttttataataatattcatagtttcaactgcagcagcattaatgatatcaaactgaatgtcaggtgatgttaattttagattttcaggggcattcttcaatgtagcaattctaacatcatcattaaaataagctgcgaaccgtaaaagttctaagaagttaccttaatttattgagtttacagattcatcatgtccacgaaatgcaagtccttgccgtaaaagaaatcgtacagaagctattgatgcatccaaccgagttcgatattcttttttgacttcacttgattgcttagaaataatggtctcaatatgttgcttttggttcatcaaagcttctgccatggatgctcaatctttctatctttctccaatttgaaaatccttcaacaagaaaagttccactgcctgattgcttaccaataattgatttaaaaagataacaccataaacaatatacagaatcttcttctatgctatattccagccaactataatcttcaaatgctcgaggattgaattttctactcactcttagatattttctcgaagaaaaatcatgacttcgaggttgataaggacccatttgcatataatataatctaatttggtctcgaatgtttggatcgtaatttcaaatatgaattcttaatcctagatcagtgggaagatcttcaaaattgatttcatctttttttggttttttattatttctattttttccttctaaggatggatccactgattttcttttgaaataattttcaatcaccattatgtagtcaagaaaataaataaaatgtaaatatatatacatttatatatatacttatatctataataatt

SEQ ID NO: 87582 - DNA, 1660 bp, Cannabis sativa
ctcgcagatttactggttcccataatttttatcgatcattagctcgttgagtactttctcctattcgagttgatcgactatgggttttggatcacctcgaagtcacacttggttcttcaccctttgttctttccttccgagaacggtttgtcatatttcccccatcacggtatctacgagtcctcgctctatgggtttggaaagaacattggtgatttctagcaggtgacctccgttccccccgtttgagtcccaagatcctcctcattttcatgagggatttctcgttcatcattttccggttgtctcccatctggctgttcatcctgattctcagggggtgtctcattttctccgagttgttcttcccgcgccttttcctgtctcctggctagtgaaccacgaggtctgcctcatggtcttctcactctaggttcaggttgattttgagcgttcgtcccttgtgccgccctggtcgaggctacttcatgttctaactcagcgtttctgcgttgcgcctcttccaaacggcgtctcaggggacgactttccaattcataagttctttcttccacagattgggtacctccatgattgagctctgtatccctcaccccggggttctgaccattcccatgctgagttctcctcgagcgcgttgtccgcgtactaggaccgacgtcaagttgagttctccaggaacgtgtgatctgagcactggggccaccctcaggttgagccctcctggaatgggtggtccttctggactgcggatttgtagatcttctagagcccatgggctcttttccagaccgatgggatgcttcctcatgtgggatgttaacattttcttgatttttagccatgtaggtggttgtttttcttcgaaagaacggagggtttttttgagctttttcacaaaggctcccaatgaaagaactaaaccgttaacgcagatttttgttaaccaattttgagcctcacaatattgatttaacactagaaaaaattaaagctatcaaaataaagaatatgaacacagggttttacgtggttttgtagttaaacttctgcatagtccacgagtcaaacttattcagatttctgagtattttttagggcctctttcatatgagtattttcgtcccttttttgaacttttcggccactatttatagttacatagtgggcagttaattacaaagttgaccgaaataattttacagcaatcatccctaaaatcgtgggattggattacatattatgtagtgtaaatgcagtttatgattttaaaaccttatagctgtgattttcttgcttttactgggtcaacactattgtgtattaaacacgtctttaaccgtatagcaagctgaggccattcttccttccaagatcaacaatgtatgtcttgtgctgattccgggtatttataaaaaagtcttctgactcaccagggctgtaagcctcactcctgttaatgggatgaagctataggaagtcttcccatagcgagatggtcatctcgcttacttgttcttcgagttgatcggacttttacacttagtttgttcattgcaagctaaggatttttatagttggtatgtgtcactttctctggtgcctcgctattcatattcagtgacatatggtttctcgc

SEQ ID NO: 87583 - DNA, 1087 bp, Cannabis sativa
agacgtagacccagccagacacgaacttgggacccagaaccaagacctgaacctgaaccttgactcagacctggaccaagaccgagatccgaaaaactcgtactcagactcaaactaagactcggaccctgaccaaaaccttgacccagacccagacccggaaccaaactgggacctgagacctaagacttgaacctggactaggaccggcatcgggacctggacctgaccttgtccgaaaccctcaccgaatcctgacactcgcaacccagaccaggatctagaccttgacaaggacccgaacctaaacccagacaaagatagggatcgagccctggacctaaacccagacctcgacctggactaaaaccaatattcaggacctgaacccgaacttcgaaccagactagggcataggaaccggacttggatggggcacctagaccaaggacctaggccccgaaacccagaccttgatctaaattcgggacttcaacctgaactaggacctgacctggaccggggaatatgaagtcggaccaagacctggacatgaaatctgccccggacccaaactaggacaggaacctggacacgaacgcataccaggaccaaacccgaaaccgaaccaaaactcagacacagacccagaatcagacccaaacatagacctgcaccaggacccgaactcgaacccagaccaggatcaggacccaggacttagaccaagaactaaactcagactcagatcgagatcaaaacctgggactcggaccagaaccttggcccagacccatgaccctaacccactcccggagcctgattcagacatagaccgagatctggaccgaaacacaaactcaaactaggactcgaacactgacccaaactcgaacccaaactcaaactcggaatcgcaactagaactggaactggactaggactaggaccaggaccaagattaagacacagaccagagccaaaacccgaccgagacttaagcccgaacctcgactaggacccaaacccgaacatagaatgggacccaaatcgggacctagacccagaatcgagatacggacttggg

SEQ ID NO: 87584 - DNA, 571 bp, Cannabis sativa
  modified_base (323)..(323): a, c, t, g, unknown or other
ttgttttacggttgtttgtcatgatttatttatttgacgtcgatttcactgctcttgctccatctcaccaaaattaatggttattttctaagtgttctcgtgttgctgtggtggttctatgtgtgtgtgtggaagatggaggctataaatacatttattcttcgttctctttggctatttttgtagtttttatgggataatttcacaaatactcaaaaacaacaaaaaattacaaaaatactgttttacagaattttaaatatttttacgattttttaattttatttacagaaaatacggtctttttatgttgtactcttgtnaatttgttgttaatttttttttttattttgatgttatttaaatattattttcatgttacttttatctagttttcttgttgtttttatgttgtttctatgaaaaatcgtaaaaatgtgaaaaaagttctttaaatgtaacaatgtaatttttttacaagaaatagtacctaatgtaattatccatttcttttattctagttctcctataaatacatttgaggagctcactgacaaaagaattttgaggt

SEQ ID NO: 87585 - DNA, 734 bp, Cannabis sativa
tgcgctagcttaagggagggtattcaaataattgatatttattattttttttgaaagaggcctttgtttaagactgacccctcccccgttatatatagatagtctcacttgtgacggaggaataccatgattacaagtgctatatcaaaaacattttaaacatttgaaacaaaaccaaaacaacgagacataaacaaaaccaaaactaatcgacatttattagattagttgagttgttagtagttgttagttgaagggtaattaatgtctaaagtttgtactcagcctatttaaaggctttttccaatagtaataatacatctcaagtgtattttatttctacattgtagacaacttattatagtgtaatacaatctaacgaagacaacttactatattgtggtcttactcatctcttgtctcaaatgagtgcaatccaagggtgaattcaaaacttggcccaacctattaattattctcaatagtgtaatacaatctaacgaagacaacttactatattgtggataaaatgtttaaagcagaggaagagatgggtgatccaacctacaatgtgcctcgaagggggattgtacactagaacaagcaactgatttaggtattggtgtattaagaatgtagatgcttccagattcatatcctttaccaattatttgcttcttcataagatccataaacaagcaatgattaggaaaaaaagagatacaacagttaag

SEQ ID NO: 87586 - DNA, 557 bp, Cannabis sativa
cccattattggtggtacgggaggacgagggatgtagttgataatgtgactagatgtttaacttgccagcaaattaaagcagaacatcagataccggcggggttacttcaaccattagcacttcctgaatggaagtgggaagatattgcgatggacttcatggttgggttgcccaaaaccatgggtatgtatgactcaatatgagtcatagttgaccgtttcacgaagttttctgcctgtgaaaatgacctatgttgtagatcaatatgcggaattgtatgtaaaagaaataatttgtctccatggagttttgaaatctattgttttggacagggttcccaagttcacatcaaaatttttggtgagtctgcaaaaagccatgggtaccaacctaaagtttagtacaaccttccatcctcaaacagacgaacagtctgaacgaatcatccagatacttgaggacttattacaagcttgtgtcattgacttcaagggttcatggaataaatacttacctctaattgagttctcctgcaacaatagttaccagagtactat

SEQ ID NO: 87587 - DNA, 1123 bp, Cannabis sativa
taaggctgtggtaagcaactgctgtctccaccattacttccttcgtgttcataaaacattatgcaacatcacttttctgtatgtattactcctctagggatactaaattatttagtgcttattaaatgtatgtgaatatacacatgacccatctctaattctatcaaaaaaggaatagagataaaaaccaattaagaactttcttcaatttgaataactttctggtgcttttcgaaaacaacttagttatttaacttcactggtggaactaaattattatagatggatttttacatccttctagaataattcttccatccttagagtaaaaccaccatctctaaaattaagttctgagttggtgtagacataaggattctaatatacacccctaccacctaacatataggtcactctcagagattctttcttgattgtctcccaatgttgcttgtttgattacatcttagatggctcccactcgacatgagtttggttatattaatacacaagtgtgcatttaacgtagatactgttaatgcacatttttgttaacgattataagcatattttcgtaatagatttgacactgaaattataagagctctaagcaaaatgatagaaacaaaaattacaccaggtttttacgtggttttgaagttaactctgcatagtgcacgagtctatcttattcagatatttctagatacaaaattagggttttttttacaatcagtatattcctttctctctctgagatatttcgtccccattttttttataatctgcccctatttatagtaatatatgttggcagttaattacatttatatacaaatcccataataatattccccaaaattgtgggctttaattacgctccatgtaaataagtgcagttaatatcaaaaaatcacacaattgtgatttaaatcatttttaaggaggtcaacgctaacgtggattaggacatgctgccaaatgtaccttgctgaggcatctcgcctagtacataagtgagtgacttagtttacttgtttgccaataatggcatgagcaccagtgtactgagaaaacttaagagctgctctttgaccataaggccttccagactggacaatca

SEQ ID NO: 87588 - DNA, 954 bp, Cannabis sativa
ttatcaccatacctgttcttaatatgttctgagggacttaatgctttacttcaacatgaggaattgttgggcaatcttaaaggtttatctattgctaggggggctccttcaatatcgcatctccttttcgctgatgatagtttgttgttctgccaagcaacagaagagtcttgccaagatgtccatagaactcttgattattaccaccgtgcatcaggacaacttcttaatacagagaagactgttatgtccttctccccgaatacttcacaacacatcaaggaacgattcaatagtgtgttaagaatgcctatttgtgctctccatgagaaatacttgggtctcccatcttatgctggtaaagacaagaaggaacttttcagtggtatcaaagatcgcatttggaaacttatgaaccagtcgcacgctaagctattctctattggtggtcgagaagtgcttctcaaagctgttgtccagtccattccaacatatgctatgagctgtttcagtcttccaaagaagttttgtaaccagttagaatccatgatggccaacttttggtgggggtccaacaccaataattctaagatccactggaagaaatggaagttcatgtgtaattctaaagcagatggtggtatggggtttcgttctttcttgcacttcaaccaggctcttttggctaaacaagcttgggggatcttggatattccttcctctttgctagcaagggttctcaaagcccattattttaagaatgggaattttctttcagcaccaaaaggtattctgccttctctcacctggcagagtatatgtgatggaaatgatttattgttgaaagatcttcagtggaaaattggtaatggtcgaaatgtccgatgtgcttctgatccttgcttacctgggaatactacattcaccccgtacacttacagtggtgatccttct

SEQ ID NO: 87589 - DNA, 525 bp, Cannabis sativa
gttttaggaactgatttcctcttttcttttaattgtaatcagtttgagttattgcgtgttacttgtttttattctttatgttatataacaggttctattttaattataatcggtttgaattatttcgtgttatttgtttttattcattatgacactattatagaactgtaactattttaattatgactagtttgagtgattttgtgttatttgtttttaattattatgttacagaatcagttctatttcaaatatatccgatttgagttattttgtgttatttatttttattgttatagaaccgattttatttttatttatatctgagacatctatttctagtgtcttttccggtgacggtgacttttacgacgatgatgactttttcagtaacaataacttttttggtgactttttcagtgacaataaattttctggtaacttttccagcacttgtgactttcccgacaccgatgactttcgagcaaaacttcttattacaaatttcattaaatttatttatta

SEQ ID NO: 87590 - DNA, 695 bp, Cannabis sativa
  modified_base (47)..(68): a, c, t, g, unknown or other
aaggcaggtcgaaccccttctgcacatgaagctgagtccagcccctnnnnnnnnnnnnnnnnnnnnnnccttcatgcattgctgaacactacctcgtcctcatttagtattcctattgcttctattgcatatgcaggtaacaaagtattagaaataaatgctctaaattgttataaaatcatttactccatggataatagattctggagcttcaaaccatacggagaattctaaattttttttgaatcttacatactcgttaggagatcaaaaagttaaaatagtcgatggtaatttcacattcattgtagggaaaagtttaattaaaatttctaaggggatagatcttaaatctttcctccatgttcctaaacttactcgcaatctcttgtctgtcagcaaattatctagagattctaattgttctgtagttttctttgaatcccactttgttttcagtgccagagttcggggaagacaattggtagtgctagaatgattaatggactattatttcgaagataaggcttctgaaaataaaatttctcaaggatttagtagcattagttctctttctgtttatgatcaaataatggtttggcattataaattaggccattctagttttccttatttaaaacatttgtttccagcactatttaaacggttaaatcctttgtcttttcaatgtgaaa

SEQ ID NO: 87591 - DNA, 649 bp, Cannabis sativa
attaatgtcaactctaacacagaaattacaataatcatcattccacattcgtagtgcgtactcaacaatcttatcagtaacatgatacacagaggtatggagatgtgtatcactgagcatttggttaatggcttcttttgcatccgtgttgtcactcttcatcaacttctcacgtggaataaaaacaatgttatcgtgacaaactccaccactatcaacgccgtggtcaagcaatgatgctcccaattcttcgttcgattgatctttgggaatacgtgaaaatttagcaaataggtgaattataaaaaaagaatggcccatactacctatgttgatgctgttaatagtatcgactatttcgatatggaatgaaggataacctacaccaactagagtactggtactcatcttctctataacagttctactcaaggatagagagtgtggatgtaaagagaccacacacaaatatatacactaatattaacaattataaataattttgttctatatgtgttaaactatcataaataattctcattttttttaaattttcccaatgattataaaattttatacgaacaaaaaaaaagaatcttcaaagagaatacatattgaaattatggatcttgagaaatgtcaaaatttt

SEQ ID NO: 87592 - DNA, 764 bp, Cannabis sativa
gactgctcttgttcttccatcaaaggaaaaataaacataacaaatttatctttgtgatatctaatgtgtcaaataattaataacagagccaaatgaaaaatcgaagttttcagcaaagatacaaaaaaaacatatgtttttgtttatctattgtgttgttagagatcagcactcaaaaactcctagtttgatatttgagtatgtgaatagtaccgattttaaagttttgtaccctaccctcactgattatgatattcgctactacatttatgagcttctcaaggtaattcattcagtaccatctatttactacatgaatgtcttgcttcatttataactagaaatagaaagaaaataataaatcaaacaaggaaatgaaaatggtagttttttacacttgatgtttagctaaatgacccaacttcagtatatatggtttcaactactatatgtttttacttctattagatagtagcagtagatagtagtagtagcagtagatagtagtagtagcagtagatagtagcaggagggtttctcccataacttcagtatatatggttcaactactatatgtttttacttctattagatagtagcagtagattgcaaattagcagtagatagtagcagtagcagtagatagtagcagtgatcatcagtttcatgtggagcaataatagtagatagtagcaaatttgaaagagatcataaacattataaccaaataatagtagcagtagtatagaattactcacagaagt

SEQ ID NO: 87593 - DNA, 889 bp, Cannabis sativa
ttgaataagtgggttggactttttaatatggaacaaaactggcataatgacgaccacatacagaaaaatataaatttaagcatagtacatacaattttataaaattaacacgacataacataaaaaaatatgtgcttatacaacatgagaagtacgaaggacacaacacgtaagtataaatagactaacttaaaagacacaacacatgataagctaaaaaatacggctcgacataaaaaaatcttataatttaataaataataataataacagatatgcatttatgtccctcggatataattaatattataattttataattaaaatttgtaaaattaaaaatacatattgatttatttatagaatatgatatacaaatttaagcatttataaataaatgttaaaattatataataattctaatagttttttatgtaattatataatattgttaaaagttataaatataattaaaagtataaaatataataattagtttgtcaattatatatatgaaaaattaaagcataaatttaagtttggcctataaaaacgagctgatttgtttaagaaaaacacaagttgggcatgagcaaaacacgacatgaaaatattgaatctatcttttaaaaatgttggcacaacctaacattgcctatattttttataacacgacatgatccatattttaaaaaatacgaaaaaaatatggcccgaaccaacatcacactcacaaattcatagcacttcgggggtagttccttaataagagcattactgataaatctcgttctcgggcttttttcagttttaactaaaaaattacaaaaatatttctagctggtcaaataaatagggaaatttacaaaaatactggaatttgagttaa

SEQ ID NO: 87594 - DNA, 550 bp, Cannabis sativa
tgtcctgtcgtgtgttatttactttttcagctgtcctttgtatgttttaaagggagaggggtctttttcttttctgtgaggttgaataaataatagtcaagtaattctgagataacagattaaaggaaggttgatctgggcgatcctccacaatgtaagctcccatctgatctcgtttttcagattggattcgaaaaaaacagctgaatttctggatcaattaagcatcagaatgaaaaagcaggagaaaaaggtatgatcttgtttttctctactcccatactctattttctttagaattattttatagttttggctgaccgtaatactgtttgggttcttattcaatttaataagaacttagtttgtagatttccagtcattcattttctgtatgatagagtttaaatttttctctataatgtgtgaatttcctgtatatatttctaatgtttgtgtggattttttcttttagacttactttaggggacgttttattttatttatgtatgttagtgtaattaggtaaatgattctgattgatctagtt

SEQ ID NO: 87595 - DNA, 1021 bp, Cannabis sativa
  modified_base (955)..(956): a, c, t, g, unknown or other
tcatgttcgtattaaatattgaactaataacaacaaatattaataaaaagtagagaaaattaattgttaaataataaaaaaataatctaaaagtattttgcataaactctttatcaaatatttactaattcaagaatgaaaaatagaatatattaataaatatacacattgtataaaataatatataattaattataaatgattagagttatatgttaattttaataagtaaattttataattatttattggtacatttttttataacaatatttattggtacaattaatggtgaaaatatctatatttgttgttaaaaaaattatggtaattaattaacataattgcatgtaaatataaacatattacaattatagatgatcattataagtttttaaaaattccaatttatactataacaaatgttatattctcttacttaaaagggataaaaattattaatttaaataggaataatgataataaataaagaattaaaaaatgataataaaaaatgtaaatctagtttaatttaattatactttttaaaaaatgtatataatttattttaaatttaaacttatatcatatttaatttaaattcgatcatattttcttataaatttaaatttaaattactaacgaaaaaataataactttttttaaaaaatataaaatattttaaataattataatgtacacaacacaactacctttaacctaataattacaatacaaaatttaaaataaattttatttaaagtaaacctaaatattttttgtgataattaagcctctacatagcgaaaattttaagttttcacagtacacaactataggaaaaacattatattaaaaaattatcctaaatataaaaaacatggctagcatagagtttttcaatataatttattattaggataattaaaaaagatactattttttgtaaaaaaannttacatttttatgtttaaagattttttttatatatttttacgatttttcataaaaacaacacgaa

SEQ ID NO: 87596 - DNA, 1527 bp, Cannabis sativa
  modified_base (211)..(217): a, c, t, g, unknown or other
taacaggtactcgtccaagattctcaggaaataattaggtgacagtcggaaaagccccacgtacagaacaaaaatgctattcatttaatttagataaattgtttgtatttttattaaggctcattaatattttttttccctcgaactttgacatgtactaaatcataccccctaaacttttttggtcattaaaaattctccctgaactatnnnnnnngttgaatttaagaacttttgtccaattttagtaaagaaaatctaacatggatgaaagtttagggagcatgattttacatatgtcaaagtatgagggccataatttggtagatattaaagtctgaggagcatgatttaatacataaacaatcactaaattagtaaattgaataaaattagacaaaagtccttaattttgacaatctcaatagttgatggggaatttttaacggtcagaaaaattcaagggacgtgatttggtatatgtcaaagtttagggggcaaaaatcctaattaaccttttatcaataaaaagaattacttaccatctttaataatttttcatttactttcctttaattctcttatccataacaatataataataggacatctctatggtaagcactttagttttgttactatagtaggcatatttttacagccatagatatttaatctaacggtaataaattgatgagtgtttataaatggttaatacttagaatgtattagattattcgtaaaattatatttttaataatattcttaaattaaataataattatttaaataaataattaattatttccaacctcctccaattatttaattctttttttttactctctctttcattcaaaaaccctgtactttcacaaactccattctctttcttaaccatgtttatgaaccagtttatgatcatgtttatgaaccagtgtatagagttctccaaatcgattcacacaataaaaatttaggattattcattttgatagtttaatttttgttaatataattataagatcccctccaataccagttgtgattcctttcggattacttcgtctctttagtatttttttgaacagtttttttattaagttattagttaggttgtcttcactatttttctttgattttacgactttttttttaattacaattcatacattttataaaaaaattggataaaaattacaacattttctaaataagttttattaaagttgtggtttttttttttggctgtaaaaccaagctaaccaaaaacatctccaaatgaattatataaacttaattaatccattaaatcagcacaaagtcagtcaaatgaatatagtacacaacaatccgtacaaaaattgaaagaataaaaaagcattttaataactaacctgtatgtgttttatacgatgaaggctcttacggcttgccctctcaaaattgatcaaataactagatttaaacaatgctaaatatatatgattgaagtattataggtaataagaaaaggaaagagagctt

SEQ ID NO: 87597 - DNA, 672 bp, Cannabis sativa
gagatagttttcgtttcaacaaaaagcgggcagaatctccaacgcacaggccgatcatgaccatgggtgaagcgtcaaaaattatctctgcagtggagagatctcgaccacgtttctcaggccttactccggaacagttagctccaacctctgtgttggaaggaaggaaacgtgatgaagatgggctgactggtaatggtattgaccgtggaagtggtggcgagccggaggtaccgtcggagtcccgtgttcggtcagctggtggaggccatgaagttcgttcttctgaaagtttgcaaggtaatatagagaggaaagggaaagtgacgactgtgataggtgaagatgaggatgtaaatgatcttcctgagttgttgaagttgaaggaagtgcatccacgtgaggcattggatgcttcctcggttggcgtgactgtggaaaatggtgaagagattaatggtggggggcccagtaaggatcggtcaaaagcaattaataagggaaaaggcattttgcttccctcatctcaagaagagatatccttttcccatgcttttcaacatacttttgaatcaattctcaaagcataaaagtctaaaacatggaagcgggtcaattcctctacgggccgtagctcaaaaggtaagactaagtctagttcttttccaatta

SEQ ID NO: 87598 - DNA, 539 bp, Cannabis sativa
ttgagatctgtctttcatggatttgaaaattgaagtcaggacattagttttatgcaaattaaactgaatttccggttaaatattagtttcgtagtagtttttctacactttttttatgatttcgaaacagcccatattttcattaattttggttgtcttctcaagtgaagttgccggaattaatggtggttctttttctggttgaatttttgtttcggttgcattgggttgttgtgtggttgcgcgataattacccagaaagcatggatcttgggttaaaggtgtatgtaagtggtatttgtgtaaaaaaaatttatttgagctgtatatttgtttatttggccagctagaagtatttttgtaatattgttacttttttggttaaaattgaaaaaagcccaaattaaaatcatataaaattaaaataaatttactctactttttaaattatagctgaacccaaatttctactcttagttctctttagagaaagtacaatacaaaataatacacacttacaacaaaatgtgacttattac

SEQ ID NO: 87599 - DNA, 584 bp, Cannabis sativa
atcgttgatacctctgtgtaagcatatttgatcaatgataagttgttgttgatgaattcacctctgttgatgtttcttttttatttctgtgatgctgattattagagtgggtaaattctttgttaatttttcattgaaatgttgttaaatgtttgtttcagcaagctttgtcgagcattaatggctgctctattttttttttcagtcggacgagaatgttaaggtgttgaagaagctaaaaccgcacttgatgtaatttagtttaaacttaccgtatataagttgtatttagggtgtaaccgtatttttgttaattttgtcctattttacactagatgccaaatttaacatcttttttacatttttatttatgtttggttttttaaacttttttataacttttatttttcaaaaagttctttaattacaaaaatacattttttgcttatgtcatattttccccatttttccccattttttaagttcttttagtctcttttatgtcatattttccccttttttttctctctctctctctctctctctctctccattttctttttcttctcttcatttctctctct

SEQ ID NO: 87600 - DNA, 2035 bp, Cannabis sativa
ctaccatattaactggtcgtttaacaaaacggaacgagacatttctcaaattattaagtaaacacttaaaaccacggctaaaaatactaaacaaaaaaatcatttccacgtgactatattttgcttgtaccaccgtaagacaatctgtttcaaagaaaacttgttgtttttttgtttttttttttttgagccaactcaaggcttctctcatgctcattgctttggcaagatcaggttcaaaattctcatgataaagtttagtgaaaccttcaagtaacagccccttatcatcacgggcgacaatccccactcctgaccaagacccatcttcgaacaaagctgaatctacattaatcttaacactgtttgcaggtggacaagtccattgctcagctccatcactcacctcaagtccaggccacgatgtctctatttgagattttttagcatttctgcactggtcaagataatttttagcaacagcaacaatatccaaatcactaaccttttattcttccaaacgacctcatttttggcattccaaatagcccaacaaagagtagctattaatcctcttcggtcagcctccaacaaatcaaacaaaccaacaaaccagctcaagaaattgtctccatgtaactggtgtgtacctatgccaactttgtcccaacaatgatgcaccacgttacaggtgaccaaacaatggaagatgtactcctccttcaaattacacatcagacgtgtggcacttacaacaactcttttagtaaataattgacacatagtaggaaggaaatcagtacctgtgcgccaaatcatgttcttgaccttcggaggaaccttcaatgcccaaagatgcttccaaaactttgtagtagacacttcgttaaccaacatattatcttgttgaagtaacatgtaataacacttttgactatataaagccagaaaatcaccatatgccaaatgagttgattcggttcctaagacatgtaatgaaactttagtaattaaattcttaattgatgttattgttaaatggttgtcttgctcttagggatggtacgtaattatacccgcagggcgagtactcaaatagggttggggcgggggtaggcactacaaaaaaaaaaaaaaaaaactacctttagtgacaattttttgttatacctacatttcgagcaataataagaagttgacacgtgtgtcagagctggaatatgaactagctcaaatcacgcattattaaatgcacttaaaagacttgtctcaagaaatacagttaatagaaatattcaaactcaccaccatataaacaatagcgagacgtgagtaataactacagactattgagaccggcgagatagacaggtccatctcgagataaatagaatacacaatcaaactatttgaaatgagtaaataatgagtttgcagctcattgatccacatactcgtgagtatgtatttgcagctctttgatccgcatactcgtgagtatgttcaaggaataaaaacaacgttaacattccctcccctcgctcttaacgtgttaaagtaaccacctcgctaatacctctttcaacagttaaacaaggctggaagatgcatcacaacttagcacttaatacttttctttgaagatacttaagaaagatataattcaactggcgagaataattgagcacagtcagtataatcgtctatagataaagacaaagaatggttagacagttatttattattatctcatgtgcataaagatgaaacgtgaagaatatccacatttcatgagcagttacaaatgatcaaatcctaatagaataactgtcagtctatgcatctagaaatagggacagaacccaggaacaaaggacgaccaatcttgaaaaaaaatagatatattactattattcattcttgaaaacagtaccattgtattatgtattcaaaaatataaacccataataagataaactcgtggactatgaagatttaacttcaaaattatgtaaaaaccttcttgttatttatt

SEQ ID NO: 87601 - DNA, 1194 bp, Cannabis sativa
aagttcatatctagggtgttaatcaacatacttgtgattagatctaagatcctggtaaaataatttccaacagttgttattctactttccccagtttctttggatgaagttaaagctgttttttttctctattcctggaaatgaatccccaggttcagatggatttagtagcttcttattttaggataattgggatctcattggagctgatatttttgatgctattagtgctttctttcattcaggtcagcttttgaaggagattaacaccacgattctgactcttatcccaaaaattaagtgtctaaatctggtgagtgattatatacctattgcttgttgcaatgcactttacaaggtgacaaccaagctcatatgtgcaagactcaaagttgtccttcctaatttaattgctcaaaatcaaggtggatttgttcatggcaggttcattggtcacaacattatgatctatcaagaccttatccgccattatggaaagaaatcaaagagagcaagctgcatgttcaagctagatcttcaaaaagcttatgacactatcgaatggggtttcatagaagaaatgttgcaagcctttcaattccctcaaaagttcattgagcttattatgacttgtgtgtgaactccaaagttctcattgatgttgaatggctctttacatgggtacttcgaatctaagcgagggttgagacaaggggatcccatgtcccaacttctttttgtcttaggcatggagtatctttctcgaattttgaagaaaattgggaagaggcaagactttgttttccatgacaatgtagagatttagagctgaatcatttgagttttgcagacaatgtgcttctgttttgcaatggagacttcaaaagcatttatcttatgctggaagggctcaaattattctctcatacctcaggtttatttcctaatccctctaaaactgccttttactgcaacaacatgaatgataatgatattaaaagagtcattgatgcttcgagctttcaaaggcaggatcttccatttaaaaacttaggaatcccaatttgtccaaagaggatttcatcagctgattgtggtactttaattgaaaaaatggtgactaggataagatcttggagttcgcacaatctctcctttgcacggagagttgttctcatcaattctgtattgatg

SEQ ID NO: 87602 - DNA, 1263 bp, Cannabis sativa
aagaaaattaaaattttaaaactaattaagcgattttaaaaaatatttattttttattaaaaaatttatttagatataaaaaaaatattaaaaatttaacagttaacttttttgtttaataaaagggatcaattttatattggtcggagtaaaaatattaatttttaaccgttaacgaaacaaaacttaaccgaagtcagaaaatttttagtatattataaaaaacagaattagatagtgtctaaaatttaaaggacaaaaatactaattacttttaatactttaataaattattattaatttaggatattttaaattttgatattttgcatgcttttcgaattatggttgagagtagtacacattttgtttatggagaaatatattcagacacaaattgttgtccctgtttaatcttggtccatattcaaaagcaacaactttgttcaaaacatatccagtttagacacaaaacgactactttaatgtttaattctttttggatgaaggttgtatgttactttataccaatcagttactttatatccagtttcctttaatatttactttttacatctaaaaaaccgaatcacctatccacaaactcagagtccattgaccccttttttatttggctcaagccattgacccgtttttcaattcttaagtttgaattgaagaatcttcctgttgaaaggtaaaaaatgaaaaagcagcaacttgctcagttgtactaatccactgaaatataaaataaagctataataaagctaaatttgctgagccaaaattcctacatataaagattattcatttctttacaaagagcctagtttgacaaatcttacataaacgggttacactgcaaagtacaagagacaggaacctgtcatcaactataataagcctactacttcccaacttttttttttttttggtcagagcatctagggtatcctatcctgcaaagctatgctaaactaaaatatgggaagaatctatattaccttcttttatcaatcctcttgttttgtctttctttttcttccctttgttttgtgctcctttttcatttctgggatactaaagatatgaaggaatagcaagttgcaacaatcatgcagtcacatacaatgatacatttacagacaggaattttaactatgaaagatgccatgatttttgttgcccccttgttctattctaacaataaaacattaccctcttcacattctccttcaaggcaggcaatggccggacccc

SEQ ID NO: 87603 - DNA, 844 bp, Cannabis sativa
aacatcttgaatactcacatatgtgtatatctttaggaaatctgcggatttggttatcccaacccgttgtttagatcttagggttttccttatgttttctgtatgcttttgttgggaatactggttaggtccttcaaacggtgggtgtgtcgccgtaacttaatgttcatgcgtgcgatcgcatgctccttgagttactgcgatacacccagccatttgtgacatatggccagttttctcttttcctgcttactcgcatgttgtgattagtcagggtttttgaaatggtgggtgtttcccagtaactccatggtcatgctcaagaacgcatgcccattaggtcactgggaaacccccatccattttttgagacactctactagtcgtacatatacgacttacactctgagaagattgtctgagttctcgaaatggtgggcgtgccccagtaccttaatttttatgtaatgacatgatcattaggctactgggatacacccagccattttttgaggtattaggccatcctttacgcttttagtagtgttttttacgcaggtgaggtcacttgcactattctcgcactttcaccacactgaaaagatcttctatctttcagatgagcgacctgtcgaatagccaaatgctcgactctggaggtggtgcttttgctgacgagcaggataaagaagatagctttataccagcttcgctctctgaagaagaaactcttgtcaccaaaactgcaaccttaggcacgctatcttctgaagacatagaaagaatggttcaggattttgttgaaccagggacgatcaaaattcacgatagcgaatccacggtg

SEQ ID NO: 87604 - DNA, 641 bp, Cannabis sativa
ctttagtgttctttatgttatttaagcgtgaaggggcaaaatggtcattttaccccatttatgttttgtcctttagtggacttagtatgtggaaaataaatgttaattgatattatgttggctgaatataagggatttatgcctattttcttttatttcaaaagttagaaaaaaatttagaaaagaaaatcaaacaacttcctctctagcctctctctctctttcggcctccttgtgcagcaagggttcttggatttttccttgtgaattcaactctttttggggttctaatcaagctaggttagcttctaatcatttcctattttaagtttgttgaaaatgatgaaaaaatgagtaatgcatgtatggtttttgatgttgttgctgttgttagttgttgttgttgtttcgatgttaaaatgcttgtattgaatggattagataggttgtaatgcatgcttgttacccttgtttaagtttgtgaatttttagtacaaaagctatgtttttcaaagcaaagtgttgattttcgttaccgtggttgctgctattgttgagtagtgtttcctggtgttaaattatgttgaaacatgttgatttatgcttgatttagtggttgttgggaggattagtcaagtttt

SEQ ID NO: 87605 - DNA, 1023 bp, Cannabis sativa
aggcttttttggttgctctttagggttttctcttatgaatatcatcaattaggaaagcctcggattttttaacccaaaaaaccaacagtacactctatagtaaaatattgctattatagattattacaaactcattagttttaatttctctataaatatatttatatttataaaaaagatatgaaaagatcaatatcatcaaggagtgtgaatggaggagttaagattgcagctgagcttgctggttatgttgaaactgacccttcttctcgttatggacgagtaggcattatttcatacactacttttatttttcttcaatatttatatttacatgatgatattacaagatatttatataagagtatttacattttttttgtttcgggatcttcattcatataattttatgtatatttagtaaagttttttgctgacgacatgattattatgggaagagcctcatttgttgaggcaacagcagcttaggattgtcttcagctgttctataactggtcaggccaagagataaataaactcaaatcaaacatcttctacagtggtaatacactcaatgatgttaggaaaaatattgttgaaactcttggggtgtcctcagcgattggcaaacttaagcatcttggtcttttattggtttggtctcataatcgattcggttaattcaaatacattcttgataagctcgattcaaaattggcgagctggaaagtgaaagttctctctagagcggggagagccaccttgttcaagcgggaagtgaatctgaatattttttagttttttttttcttatgttttgttcataatctagtattaatgtttgtgtaatttttgtttattaaaatttattttcaaactcagatctaatattctgtttaaaattttgtattgttgttattgaatcattgatctgattttggctattaatgtttatatttgagatttatttgtaaagttctagtgtgtgttcaagtttaatcctttttatatattattttaattt

SEQ ID NO: 87606 - DNA, 1383 bp, Cannabis sativa
atcctttcagattgttactagtccgcggggccatgcccagagataagatgcattagatagatctcaaaaatataaagtaattgacttatgcatgaaaagaatccctcttattgtatgtcgtaagcttgatgtattccaccttctaatcgaatcttgttgaaacttcaagtgctcgaactcctttcgatctccttgaagagatcttgcttcctcccgagggaagacttgaaaagcaatctctcgaaagctttgtagaaccttctcctaaaggtagcattcttatttttcttcttttgcagacttgaatacagactcaagacaatacaaaatacatgtaaacagagtaagagacgaacactctctaatctacaaaacaaagactctttcttctaaagatatgagtgaaatacacagatgtaaaagaggtacaagatctagctgctataagatgtatttataatcaatatacaccttattgccagctcacaaacagtttgaacaagaccacaacttgctagacaattccctaaaatagatcttcaatcagtccacgaattttatttctgtacctatagaatcgtgagcagtaagtgtgactttctttttataaaaaaggaaagtcttgcttcgattttctccacaagaaatctgatcaaacatattaagaaatcacataagattagattaatacagctggatagttagagaaaggatgagtcatcaaacttaccttttataccttattttccataaatagaaaacttagacaactttccttccatatatatataacaattaatacaaaaatgtgaaagtcaaatacacaaaacatgaaaaccaaataaacaactcagataaaattaattgataaattataaaatatttttgtcacattaaagatgccaaaaatagaattaacaatcttttcctttggcactttgattggcaaaacattttataagaagaaaacatacatcaagtgttagaaataaaaacaatagagtatagaaaatactccccatgtatgaaagcatactaacacataaaataaataactttttaaacagaaaaattcacaaaccacaaacaaaaataactccccctaaaacaaggagttgtaaccaacaatccaaaaaataaatactactcccccattttgtctatcaaggagccaaagataacaaacaaaatagacaaagtcataatagttcaacaaaaaacatagataaaaagcaaaagataaaaaaatggaccacttaagcatcatcatttgattggaacaatttcatgatgttgttcatccttctgagaagtagggcttcacttgtctctattcttcccaaacgtaagttgaaattaaccatttctgtaggagcagaagtg

SEQ ID NO: 87607 - DNA, 1086 bp, Cannabis sativa
taaaataattaaagaaaatataaattattcttgtataaaaataaaatataactactgattttttttagaaaattttcattaattagtaattagacaaagtttattacatgaaatatagctgatagtgcaaaattaacaacaacaataaacatatcaagtcaaaaaaaactctaacagcaatctcaatgaaatatctaataaactaactataatacacctataaacaaaaccaatggctattgaaaattaagtaatatttattatctaactaattaaaattatttaaatcatacaaaaattaataaatttatctatctttaattaaatagtttaatttgccgtccctcggcttgaattaaatagtttagaattaaattttatatttttaaatatactaaattgaattatccagcaaaaaaaaaaaaaatactaaattgaattggttatacataatctcataaaagaataaaaaaaaaaaattaattaatatttttgcaaataacattcctaagtctctctagataacacaatgttaatatttaaatccttaatgtgtaattatttcatcatcaattagtatttattcacatattaatcaaattaaattatatatatgaattagtttatagtagaattattatgtataataaaaattagttcaaaataaataaatatctaattttgtttattatacttatacattatttttctctcttattttagttccttaaaattaattagaggcaaagtctatacccaatatctttgtacgtggtatatataactcataaccattaaccaatttctatatttatttaatgtgtataaatttgtataacaccacctcacatataacctaatcatacaattgacttttatttagagtaaggtatacatgatgcttagtatatattatatcaaatctaaataaaattattggctaattattacttaatatatacatatatatataaatatatatatgagaatggggattaatagtggtgttcacacacataccccactaattttaaaactacatactcaacacatatatacttgttcagttgttctaatatattcaat

SEQ ID NO: 87608 - DNA, 677 bp, Cannabis sativa
ttccaaacatacagaaatataaagtatctcactattagagacttggttaagaaataagacattgtaatagaatattacaagactaagttgatgttagcagatattctaaccaagaattaagtgcactgttatttaataaacatgttgttgatatgagcattttataatcttttgttcctttgggttagtgggagtttcttgttctattgtttaagattacatttatatgtaattttcttgttgatgttatgaactacttgatttattttgtgggccaatagttttttattattagatgtttatgctttcaattatgttttgttatattctcgagaatgattgaattgaaagcatgtagattatatcttgttgtgattattgtcttttaagtttatttacttaatgacaatgatattttgttggcttaattttttaagcatgtttattgacattgacttatttattaagtagtgtatgattaatttcattggcttatttattaaatatcatggtatcagtgaaattgagaattgataaagaaattatgttattttattaatcacttgttattttattaatcacgtgttgaatataatttcttaccacattactagatttattgactgtgtcaatttaacactttagtatttgtgattataaatatcttttgttgattt

SEQ ID NO: 87609 - DNA, 502 bp, Cannabis sativa
  modified_base (26)..(27): a, c, t, g, unknown or other
ttacattgaaacagagttttatttanngcataaaacccaacagttacctgtggaaatccagttggggtaattcaatctgttcgtggatgctggtgttagaacataagcgagagcagtgggacttgggttgtggtgtttgattctgttggatctattttgttcttggcggctgctcctttggtttgccatttggaaccccttgttgctgaagcagctgctttactccatggtctccaactttgtcttcaaatgggttatcgttatgtgaagatattctcagattgtcttcgtctactgcaaagtgtgggttgtaaagaacaagtttttttttgagtttggtattatacttcttgatattttttgtatgtgagattctttttcttctattacattatcttattgtaagcgggctaaaaatgctaatattcattcgcttgcataactaactttctctcttgagtcaccgcgtgtgtaacgccctaatgctaaggcacgctacagt

SEQ ID NO: 87610 - DNA, 884 bp, Cannabis sativa
tattaagatttttcgaaaaatgaattttattatattagtttagcataattaaataatatattatgggaaacttaagaggttttctttgtttttggaggaaggaaacttaagagcgaggttaaagagcttcattgggaacttaatatactttctgaaaaatgaaatcttctattttattaattgattttgaaaagttgtaaccctttggtagtcttacaatgtacacaaaatgtattgacaattccatatcaatctgatttcacgtagagtttaaacaaacttcaaatctcctttttacaatgcacaaccaaatacgtctgtaatagtcatatcagacgatacttttgaagaacacgaacaagttacaaagtctcaagtagcgtctgaagaggaagctgagtctcctcttaaaaaagtgaagttggagaaggacactaaccgtactccaatcccatgtttgaatcttccaccaccggaagagagtgatgctgtcaaatgtactaaaaaaatgaagacgaagatcagtaccggtccacaactgaaagagaaaataaacgatgctgttggagttagtttagacgatctcaccaaaatatctaatgcaatacagaaaatgcacaattcaaccaaatgttattttgaaaaggttgtggagatcgtgaataaagaaaaaaacgacaacagtactgcagagattgtcaaggacagcaaggacgatggcgaaccagtgaaggacgatggcgaaccagtgaatgtcaaaccggaagaaaaatgaagtatcattaagcatgttttttcaaatttaaataagtagtgttaatatcttaaatatttattaattagtaagggactcttaagttaatcatataatgtatgtattaaat

SEQ ID NO: 87611 - DNA, 693 bp, Cannabis sativa
tgtagaaatttcttatggaagggataagccatagctgctggaccaggtttaatagcttgggattgtgtatgtcatcctaaggctaatggtggtctaggctttaagaaggtgcatgaatggaataaggcagccatggaaaaatacatttgggccatttcatacaaagaagacaacctatggataaaatggatccattgtgtttatatccgaagtgaagacttgtggcaataccggcctcctactcaaggaagttggtattagaggagactggttgctcttaaagaacaatgtaaggggctggtagcagttaatgctattactccttacagtgttgccgcaggatacaagatacttcgaacaagccaagacaaggtgaattagagtcaacaagtttgggggcatttgaacacacccaaacacagtttcataacctggattgctatacaaaacaggttaaaaacatgagataggctctgtcaaatgggaattgcagatgaagataagtgccctctttgctgccaaagtgcagaaacttttgcacacttattcatcgattgtccagttgctgatacttgcttaagagccatgaagaattggctgcagtggcatgctactgcttcatcattaccccgacttctgagatggattgggagagccaaaataagtaaatttaggaagaaaatccttgctgcc

SEQ ID NO: 87612 - DNA, 770 bp, Cannabis sativa
agatccttaacttaattattggcagcaaatatttgtttcttcaccttgccaagctaggtctctaagtcttcaatattcttcttggtggcaatgtcggtccccttgagacgggcataggtgtgccaaaacttcatggacatctgagaattaaaattacaagttagaatgaaagttgcatgattggtagagataaacctttttatttataaaaatacctctttagtaaaaataataaactatattttggttattttataatttatttataaatgtattataattatgtgaggttgtttttattgtcatttttttattttataatttatttatttatagttgtcgtgaggttgatttttcgttatttttaatttttttcttattttttattgagaaaagtatattattataatttaaattttacaattttatttttttaaataaaatcttttagttgtataattataaataaaatattaaaaaataatatttttattttaccttctaactataataaagcatttattgtactcacagaatacattgtatgctcacttcaatttatatgttttaatttttacctctatttctatattctttaagatatacttgtattataccccttaagttaatataaattatgtgctacacttaagtgaaaaagtaagggtatattaagcaacccatctataaaaattagtaaattttaatgaaatataatatgaaaatatttttaattaggggaattatctcatatactatttttttaattt

SEQ ID NO: 87613 - DNA, 690 bp, Cannabis sativa
acttgaattggattttaagatttaattgaattggatgggatgatgaggatcatctaaatttaattaataattaaatttaatcagattgagaaaaaaatatttgattagatcagatctctaattttaagtaacacaataacaacaatagtataaatatttattttacagctagagttaacaactttacaccattttatatagtagtgtaaatacgttttttaaaatgattttttttaaaaaaagcttttaaaattgtgtttttttttttttaaaaaaaaaattatgtatttaatacaatataatatttaaaaattattttattttttaaaaaaagaaaaccactattttcaaattttattttaactcttgaaaattgcgtggctcgattctaatattagtaattatattaaataatattcaagagagtaaaaagtattcaaagtagggttaacaatttgtatatttgtcttgtatttccacaaaattatacttaatatgaaagtaaataatgtctcataaaatataaacacgaactcgacataaataagttcaaatttctcatttacatgtgcaataaattatagtttcattaataaattaatatgttattcaattttattttaaaatatttaaaatttgtttagtaatatgtacttaattgtatttagacgtatcaattttaggtttata

SEQ ID NO: 87614 - DNA, 602 bp, Cannabis sativa
atatggactcaaacatgaccactacaaaattagcgtaacgttggaacgacaattttaaattgatattgtagtgcaaagcacgatgaaatgatgactctaaggtgactatatcttttcatgtacgccatatggtgacacaattctcatgcaagataaaaaaaaaattgtcgttccatgtaacaaaagacgattttctatatgaactatatcgtccatattatatgaggtgatactaacttgtatgtaaagtattatcttgaacctataatggggtgatgtttgttcgtggactatcgtcccaaatctattatgaaacgaaaaaaattaatatattggaatcgttgtcccttaattacacctaaataagaaaatactatttaaaacttttctttactaaatacaaactataatctatatataatatttaaacttaagtttcttttaatttatatataacaagtaataatactataatactatagactactttctgaagatgctcgtagtttgtaaatcaatttttggagtaatgaaaacactgtctgattcataaaaaaaaaaaaaaaccactataatactataattaccctaactacaactaa

SEQ ID NO: 87615 - DNA, 1238 bp, Cannabis sativa
ttactgtcatatatataagtgtacaaaatgtgagaaaactctaatttgattgagtccgctcatcaaaaactttaattataaaagctcatacttaaagagagttttacgaaaaaataaaaaaataaatatataaaaattaaaacatgaaattttaccattaattaatttttaattttaattattttagatttaaatttaaaataatcaccgcttgtgttagtatgtctcaagttgtcgtggccgtcacaaaaccggcgatagccggttattacgaaaccttgcctctttgactctaatttttatttatttataaaaatttaaatattattttttaaaaaataaaaaaagtgaaaaagaaaaagaagagatttaaaatctctttttcggcggagaccgttgattgcggttgagatagacacagaacctttttgaccatttattctttcttttctcattttctctttatttattttttttattttatttatttttaaaaacaagatacccatattttgatatgaggtcctctcagtgtacatatttttattttaaagaattttttttataaatatttaaatttaatttttaacgttaataatattcaagaatttcagtagtatctaccattaaatgtaaatcaataattatgtgacagtaacgattagtttaaaaattaatttaaatataccattaaaaaaaatgacatgtaaataataattttactaatcgttaggtattattaccattaaaaattggacttgagtattattgaaagttaaacttaaatatttacgtcacaaattactcatttattttttatttttttacaacgtaataattatgattttatttttttaattgacaaattacatgaaatggtaagttttgtttacttaaataaaatgctaattttgttttactgggtactgtcggtggagcttataatagttagaaaataaattgtagctatatagatatataggaaaaataaatggacacaagctaaatttgtctggttgtcagataatatttatttcattaaatcatttttgttttaataatatgtttgaggaacattattattactaaattacaattatgccctttgccaattttatacattttattatgataaattaattatgagaataatatttgtcttttaaagttaagcctgttatagtttgtgtgttcatattgaaattctaactatacattttgaaaaaaattcataaaaa

SEQ ID NO: 87616 - DNA, 1277 bp, Cannabis sativa
ggttgtttgcctaatagacatagagttcatctatacaaggagaaaagtccaactactctagaagagattgaggtcatgagaagaattccctatgcatctttcgtaagaagtctaaggtatgcaatgttacgtactagactagacatctgctacgcagtgggagtagtgagaagatatcagtcaaacctaggataagaatattggactacaatcaagaatatcctaaaatatttgaagaggataaggaaatatgtgctagtctatagggttggagatctcaacctgttaggctacaccgactcatacttctaggcttgggttgatgatagaaagtctacgtctgggatggtgtttactcttgggagtgaagctctgatttggagacgcattaagttttctacaatctcaaattctaccatggaggctaaatacatagttgtcgcttagactgctaaaaaattagtttggctaaggaagttctatacagatcttggctttattccgaacatggataatctgctgatgttactatgtgataacatagtagcaataaccaatagtatagaagctgtaagccataagaggagtaagcatctgaaagaaagtaccacatcattaggaattttgtggtcaggggaaacatgccacgtatgaaaatattttccatctcatctcttcaaattttataaataacaacactcaatttagaaaatatgttatatgttgggagtgctctaataaggtactctgtttgttgtttgttagtctccaagtcaatggtaatattcatttgttttccaaagttgttaagtagagttatctcctcccatatgtaggatcgactcaagggtggggcagtaggagctcacgcctaaggcccccactcatgcccaaaaaatcatttaacaaaaggctctaaatttattttttaaaagtattattttttaagatactacatttaatattttattgagaaaaaaggttaaattatatttttaaaatactatattttagaattttaccattatatatacaaatagacataaacaaaattatgtaaaaaagtctaatttaattttttggcccaaagctctcaattggcttgagatgagcttgtccatatggtaaagaggttcgacactcatgccattaaacttgtaccaagaatgtaccgccaacattagagatcaagatcataacttaagatgttgtgcattcgccctttagtgggtttttttttttttttttttttgctaaacatgaaaattcattaaacc

SEQ ID NO: 87617 - DNA, 794 bp, Cannabis sativa
ttactgattcattaggttgttattaccgttattattggtactgttagttggttagtttgttacaactaccatcttgtatctcagctgtatataaaaaaccttgtacctattatcaaatatacacaacattttttctttttttcttctcctcagttttctttgttttctctctttgttcactaataatatgcattaagtggagttcaatatctttatatatctttataatatcatttatgatctcttactcatttttgaagaaaagtctttcaaatcatttgattacgaaccatgcagttatatatgaaatatataagcatcatacctctcttattaattatagttctttcaaagatatggaaagcttatgtgtttttcctataataattttttgggggggactgtttcctataatactttataacaaatgtatgacaaaatgttaaaaaattaaaaactgtatacgaaattaatgatgtagctacttctagcatattggtgccgcccaatatattatcacatcccaaatttgttatacattaatttctttttaaaaatactatattcaacaataacctctaatttgttataaaaaaaaaaatcaagtcccaatttgagccaattataaataagaatataacttttaaattgtaattagttatacattttttaagtcctgtattaataaagtatacctctatataaaaatagttatatcataataaaatatacatatattttgtaatttatttatgtaaaattaataactttatttcaaattataatacatgaac

SEQ ID NO: 87618 - DNA, 1096 bp, Cannabis sativa
ttgtttggatgtgattaattacttgttatggttttatgagaggtttcaaactatttcaacgaatcatgttaaaaagtaaaaaaataaataaataaataaagaacacctatttagatgccacgtgtatggtgcatggggaagacaattagaaaaagagttttggtatagagcattgttattgggcaccagtggtgtctagcacccttaagacgtatcgtcttgcgattggctagtgatactccttaaaagctattatattaaactatataagacccgatacttaattagaccaatagcgatattgacacgtaggaaagtacttacttggcaccattaatgctttttagcatttctctttgggatatgatgatagaatagtataatgtaataatgtttatatcgataaaatgtaaaccatatatgacaaatagaaacaaagttacaaattattaacttctaatactacaaaaaaaattaacttttcgtcacaacaaaacttgtgactaaaagtaaaaaggttgtgactaattataaattattattcttatattatgactaaaagatcttaaaatcagtggctgcaagaagttaagttgctaagttagtcaggacttaacaaactctatttatgagcgagatctccacgtcagcttaagtataggtgtttctgggagcaagtatgagaacttctggaatcacagactaaagcactcccaggaagagcttcttggataggaaagagctagttggagtcaactattcgaaactccttttttaggaggagcagctagccatccggaactcctttctggggaaagttagctttcttgagtacccttcctggaagatcgacaagaaagccttccaggacctacttccatgagtcaacaactttccaagaataacttttacaaccgtttttatttgaaggaattataccacaagtccaattttatctgggttttcaatctcaatctcacttatggtctatagtttctaagaaataactctagattaagaaaaggacacaaagaaaaaatatatttttcttttaatctaataattatactacatgtttaaaattataggattccat

SEQ ID NO: 87619 - DNA, 620 bp, Cannabis sativa
ttgatactttggcttgtgatgctgaataagctgaaaaccaaggaccgactactgaaaatgggtatcaagcttcaagagacttgcaatctgtgtactgaatgcaatgaatctatacagcatttgttttttgaatgcaggttcaccaagcaatgcttgattgagatcaagtcttggctgaaatggaatgctgccactttcaacatccggcatctagttaaatggattggtagggcaaaggtatcaagatttaaaaaagctgtctatagtgctgcaattgcagcaatggtgtataatgcttggaaaatgaggaatgctgtgctgtggcagggggttcaaattgacaatactcgattgattgcagaggtgaaatggagtattaggactcgggttcaaagttttctgccaaagaaactgtcaagtgttgatagagaatggttttgtgctctataatcatcttagtgctctgttgtaaagcttttggaaaaggaaaattcatacagcagtagggaaaattctggtgtagaaatctggtgtaaagcatttaaaagaaaaaacatacagcagaaaaaaaaacatacagcagtgaaaaaaaaaatctgtatagattgaggcctcttttt

SEQ ID NO: 87620 - DNA, 719 bp, Cannabis sativa
agaagaacaacgaagaaggaggcagtctcacggctagggttttcttttagttgttgaatgtgtgtttgagaaataaatcaacttatatatgactgatgcatttttagggttttcttgaatgtcataaacgacgtgtagtaaataaaataagtgctgttgtttggtttataagcaggggtcaaaagaagggtttgactgaagggtaaaaggtctaaattgaccttggtcttctgattagtgttgctgtgtgtagggtaataagttgggaataaaaattcttacaaatctattccaaggaattttgaagatgtttgaatagatttcgactgttttttttagaaatacttctcatttactttctgattgttttattttctcttttctgagatctaaggtattcctagggtgtatatagacatatccttaagtcgtgagttcttatcgtctcttgtttatcattttttcaaaagctagcctgtttggctgtgttttaagtttttaatttttaaaattatgtgttttcaaaagttgagaataaaaaatagttgtttatcaatttaaaaatttatggtgtttggtacaagatttttaaaactatttttagattttttcttactaaaaaaaattaatattttaactccataccatgacatgaacccatttgattccgagttcgggtctaggatctgagtcattgagaaaaaatgtaaaatataaat

SEQ ID NO: 87621 - DNA, 988 bp, Cannabis sativa
taataataaataaataagcaaaaactaattgtaaaaaatattatttataaaaaaatcattcataaaaaaaaaagaaaaaaataagatcataaaaaaacacaaaatgacatattgttaaatctatttctatataaaaaatttaatataatatttgttaggatgcaaaattcatatcatcataaatctaaaattttattatttacttttatgtcacttttattattttattagtttatttatagcatttattatgaaatatttatattctacttttattattttacattaaaaaattaataataaaattattattttttatacttgtaataaaaatattaaattttgcatcaagttttgctgtttactgaaattttcaaaaactaattaattagagcttaagtatgatataaaataataaataatacacacctaagtttttacgtggttcagtctgttgtattagtcttacaagcgtgtgttgaatttcacaagtgtttacagtatgaacataaactctctattcctttcattcctcttgaagaagaagaagaagctcatgggaattttaacagaggttctctaggttaaaacatttccatcccctgtacatgaaaagaagggacatttataggaggcttcttgattaacatcccctcagggcgaaccctactataggatatccgactgtcgatttggtaggtggccactctatcgtgcggtgtatagaggtaatgactagtattatctggacttacaatacatgtcattgaaaggtctttcctttaagaatcaccctcttgaatgtttgttgggcaatagataggtacagtggtaggcatgcatcgtgctatggcctgacaagggggacaaaaacttgcattgtacaagaaaaagtatcgtcgtcactttagtgtctgacaagtgtaggagatgaccttctgtgacactgcatgggagtaaaactcatttttagtctttccgctactta

SEQ ID NO: 87622 - DNA, 1053 bp, Cannabis sativa
  modified_base (494)..(495): a, c, t, g, unknown or other
  modified_base (749)..(757): a, c, t, g, unknown or other
tgatccgttgtaagctcaaagtgccaccggtccaaaaagacaagccaaacttctgctatctctccttcaacctccatttgggacctttcgactaatgttgtcattttagtgttgggatctttgacctatttcaaaatccagaaatttacacccacaaatttcccgatatttggccttgtgggattctttcaaatatcacgttcggccctatgatctcttaaagctcgttcgtgatacccacacttttaagacccaaacgtgaaaatagtgtattagagttatcccacattattaatgtagaaataaattgtcatatataagatcctctcattgccaattaattttaaaataaaatcttattcactttattcaaaattataaaaataagtaacagtatatatatgttggaaaaaggctgaatataagtgtattacatattgtaagtagttctattaccgaatacatatatacatcaatctatatatatatatatnnatatatatttatataaaggagaagaatagagcggtggcatagcattctatagtctctccaaagttatttttctcttttctccttaattctctcatttttaatattttattagaggatgaatctacaaagtgatattttactattattttaataaattttttataaaaaatatctaacataaactaattatttttttttaaaaaaaaaactatgtatatttataaaatattatacgttattattattattattannnnnnnnnttattattattatattttttaaataaataaatttatatatatttataccataattaacaaaaaataataactacttttaaaaataaataaattaacaaaaatataatctttttaaatatcactcatcaattaattactcacatttttttttcttttttaaactataatcaatatatatcatatatttttctaattcttttaaccgctatatatatataggtacacgattttgtcccgtgatgtactttcacggaatgtatttcgtggtacattagatgggtctcagggtattagag

SEQ ID NO: 87623 - DNA, 508 bp, Cannabis sativa
aattcaggtttaaattgtcttctactaagttccatagccacatgaacataaacatttgacaaaggcaaagggctttactaacatagtggtgagcatttaaagttgaggtttagtaacaatatcaatacaagcccaaaaaatacagctatgaaagaaaaacaatgcctaagacacaaaatagtacatacaacaaacttttttttttggcagttatgcaaacaaatttcctcttgttacatttaaaacacttatagaattcagtgatttgttgttacaagaaaaaggaataaatgacaaagatgcataaggcttataatcaatattgtttttcagataactacagaaacagaagatctaattgctttcacaattgcataaattttttacttctttcaagttctaaccacaaaagctatcagacctccaaatcacaaatttgaatctaagatagatgtactgagcataaatcgcagacttgtttttcttcttttcaaaatcgatcgaggtg

SEQ ID NO: 87624 - DNA, 1223 bp, Cannabis sativa
  modified_base (1099)..(1113): a, c, t, g, unknown or other
gacatacttcacttttaaagttttcgggatctgtaatccagccaccaaagcttcatactctgcctcgttatttgaagcatcaaattggaatcttagtgcataatgaaacttgaaattctcaattgataccattattactcctaccccgtaagctccatcaataaataatttccatgttttattatcatttcctgttctggagtcttctcctgagtctattcattccactaggaagtcaaataaagcctgacctttgatggagaccctcgaatggtaggttatttcaaattgtcccaacttgatcgaccattttattaaccttcttaatgcatcaggcttgggcaatacttaccacaaaggctgatatgtgagaactttggtaggatgagcctgaaaatctggtcgtaattttttagatgcatgtaccaggctaagtgcgagtttttcgagcaaaggatacctcgactctgcccccagtaaatgggtatgcttgcatatttaacatgttgctagttctttccatcttctcgcaccaatgcatcacttataacattttctgagatggtcaaataaatgtacaatgtcttttcggcgattggtttggccaacattggtggtgtggagagatgcttctttatttcttgaaaagtcttcttgcactcttcattccatttaaattttttgttgccttgtaaaatattgaaaaattggaggtatttttcagttgattttgaaatgaacatgcttagtgctgccatccttccagtcaaagactgtacttcttttggtttggttggcgatgacatctcgagtagtgcttttattttttgaggttagttcaattcctcttacatttacaataaagcccaagaatttccctgaggatacgccaaataaacatttttgggggtttaatgtcatattatattttctcaatatggtgaagcagtctgagaggtcaagtgtgtggttctcgcttttaataaacttcaccaacatgtcatcgacatagactttcatatcttgtcctatgtgtttttcaaacattccattcacaaggtgttggtgttgggctttctgccctaaataaaacccattnnnnnnnnnnnnnnnttactaattaataaaagatcagaaatcattttatgttgctgttgtggtaatttgcacacgcaagtatacgtatcgtaacaagtaaaagactcaccaggagtgaggtcgat

SEQ ID NO: 87625 - DNA, 834 bp, Cannabis sativa
actggaaagacaatatttagtgacccttcaatatgggtcactaaacgcttttagaaaccctctgtacgtaattgtagatttttagagtcacactttattaaactatatctatttattttctgataatagtcacactcaaaaagtgtgtctttttttttaaaaaaaagtaatattaatttttttttttttaatttagattgtattgtaaaatttatttaatttattatatttagataataataatataactaatgagttaatatataataataccatacaaaaaaaaatcacaaaatatttacataatctaaaaattaagaaacaatttatctaaaagttaatcaaaaatttatattaaaaaaaaaaccaaaaatcaataacagaaatttcaagaacagaatccaaatgcaattacaagaatttaattacaaaaatacatccaaatactatagcctattttcttaaccctttgttcaacaatgatttaacacttactgttgcaggttttaaacttttgtaaatgggcttcttaggtcacaatcatttacacagaatttggaagaagaagaaaaaataagtagaaagaaaaatcattgagcgaagcttcaatagaagttggaaatcgtggggagcaatttttggagaaaaaattggtttgatcatggagaaatagttcaaaaagaaactaaaatgaaaaattaaaaattaaaatgaaaactcaaaataaaatgtaggacatgtatataaaagattggaaaaaatagttgaagtgtcattgaagtataatgacatcatcatagaaggtttatgtatgtgtaagaagtattttaataa

SEQ ID NO: 87626 - DNA, 557 bp, Cannabis sativa
aatacgagaatccctcttagagctacaaggcgtggcagtaagaggaaaccttaatgttggagctccacaagcaaggaaattcaaccacctcggggctagactctcaaattcaaaaaaaaaaaaggaagaaaaaggtgggtgaaccccaaagaaaaaaatatccaccaaggcttcggcatgacactcccagagacaacaaaaacatgtccaatccattcttctagtgagaaagggttgacccaggtatagggttagctcgcccaatcaatctacagagaaaggtcgagcgagacaataggcctcgtgcttaggtactgggacctaccatttggggaaggaaaaaccacccgtagaatttctgttaactaaagtgttgacgtggaaaacttagatcccgatgacagcatctcgacgaaagacctcaaggactgcctaaatgctaatgttatacccgaaattcggctggaggacatgtgtcaagataaaggaaatgtaaatcggagctaaagctttttatagaatgactcattaattacgtaagtatcaaagtatatttg

SEQ ID NO: 87627 - DNA, 740 bp, Cannabis sativa
agttagtgctagtgctaatttgctaattgcctaattgcctttatttactaaactactaaaccactaaaccaaattactaaagcggtcattacaataacactccctaccccaaccatactcattatatcaaccattatcaataatgtcaatcttttcaacatacacaactttctcagggggaccacccaacaaataacattgtacaaagtcatcactgtccccaaaatacctaccattgaatgcaacttgaatataatttttcgtgattttatcgttccccttcaaacgctgttccgcaagagtgtttctgtcttgcctaaactcaaaaatattcgactcaatatgacaatttaaactagtcactaaagcaaactcctctatactaaacctaagtaattttccagcaatacttgtccaaaactccatctcattagtttgttgaacttccctcaacaacagattatgaaacagttgaaagtggattgaatactcaagggtacgaagaaaattatcaaaaataattttaaaaaataactctttttggtggtcaatcaaaatagaaatgatatctttaatgaccctataatacccacaagtaataactttggaatggtaatgttcaaaatgtaagtatttaagactttaatcctaaaacaacaacagaaaaaaaaaatcatttttatcatataaaaactataaaataactgtaaaacaaccgtgatatctattcaattcaatat

SEQ ID NO: 87628 - DNA, 520 bp, Cannabis sativa
tattggacatgccttatttaattgtaacaaagctaaggaggtttggaagcttaccaagtacaccatagaccatacacatgcttataatatgtataatggtgattacataatccatttatccactctgcattctagacaggattttgaatctattgtgtgtaccatgtgggcaatttggcatgaaagaaatcgggttatacatggtggtgtctctaaaaacagccaagctattgtggattttgctgttcagtatttggacaagtatatgcgatcaaagcttcgaaaccagaagcaaaatcctgtctgcaccaatatcaatacttcagctcctgtgcaagcaccagttcagcatccaaaaccaccaattccatggactccaccgacttttgcaggcttcaaattaaatgtggatgctgctgtcaaccatgaccttaagatcctgggtgttggtgctgttcttcgagaccatactggtaccgtagttgcggcactttctaaaccagttcaaggttgctttcgt

SEQ ID NO: 87629 - DNA, 994 bp, Cannabis sativa
tggctgttccatgaagatttcctcttctagatctccatttaagaatgtggttgtgacatctatttgctcaagttctagatcatattgagcaaccagtgcaagcatgattcttattgtcttgtatttcacaacttgtgagaatatctcattaaaatctatgccttctttttggctaaaactctttccaactaaccttgctttgtaccttggttgttctcctttcgccagtcctggttttactttgaaaagccatttgcagcttattatccttctcccgtgaggtcttttaattacaatccaagtcttgttcttggttagagatcccatttcatcattcatacctttattctaaagcttagcttctttacttgttattgcttctaaaagctctttggctcaattctggtcagatttgtagaaatcataaatgcatatacaagcatgtttgcaagagcattaaatccatatctctgtgttgcttttgacacccttttctccctatcttgaactagctggtagttctggatgtttaaaacattttcttggtcaggttccatatcctcttcatcatatccagctggtgcatcacgtggttccacctgattagagtgaggtgtatgttgtatttgttcatgttccacctgatttagatcaggtattttttatactagttctaaatgttccacttaatttggatcaggtgcatccatttagcttgagatacttgtagggttagtggtaaaattatatgaatcatcaatagttttgtcaaaagatttcaaacaagggaattcatcttccctaaagataacatccctactattgattattttgaaaccttgttcatcttttagcaaaattctatgacctttaacaccttgaggatatcctaaaaacataccttttacagatctaggttatagtttaccttcactttgatgagcataggctgtacatcaaaatactcttgaatttgacaaatctggtggcttgt

SEQ ID NO: 87630 - DNA, 510 bp, Cannabis sativa
cctaaacactaaacactaaactcttaaaccctaaaccctaagtcctaaacactaaacccttaacctgaatccctcatctctataccctaaaccctaaacccaggccaaaaaaaagaattgggactggaacctagacctaacacaaaaactgaataaggaccgggatagaaacctggatctggtctaggacccaaatacggaagggacctagacctggacccaaactcggaccttgacccagacccaggacccaaactcacaccgggattccgacccatacccagaccccgacctagactaagaccccaacctgaacccaagacccaaaattgaaaccaaaaccgaaaccgaaccaggacccgaacctgggacaagaaaaaacaaccaaatccaaacccaaactgggacctggacccaaaccaagacctgtaacccatgacttggacctaaattgggaccgagacccaaatggagacccacacccaaatcgagacccaaacctagacttag

SEQ ID NO: 87631 - DNA, 1161 bp, Cannabis sativa
tgacataaccatattattgcatctaagccaagaattgagaagagtattaccaatttcagggcgagggagagacccatcgatgaaagcaatcttgttcttggccactaataccatggtgattcctctcttccaagattgatagttgctgccattgagaacggtagacaccagcacaagtctgggatggtcaccagtgctaagaaagaaaggactggagttatcatcattgagaggacaattagctggaggagcagtgtggtgttgatcgtcgacaatggtagattgatcttgaagttcaggattctaggtgttctgtgatggaggcctagtgtgatttctgcgacaaatggctgaggagttgagattaggagcagcaggatgttcagaagtgatgtctgctgcagtagtatcagccatagatggaggagcacatcttgggatcaggttgaaggtcttgccatggaagcaatgggcaaagatacttttgataccatatgagaagaataacagagcaaaagatgaagaagacaacctatattactcaaaatcttgtatatgttgaatacaataggcaaaggagtttatataggcactaggtgaagtgaagttagttaggggaagaacctaactaacttaactaattaactaactgacttaagcttctaacaactaactaaccaattcaatgcgataagccgcaacttaactgtcaagcacagtaaaataattttggagcatttctattggtcatctcaatgtcatataaagttttttatattatttataatgttaaaatctgtgagatctgattttaaattgcattaataattgtcacttttgtgatacctgacaccttaagccgtctcttagcatttctctaaaatttgacatactgttatactaatcattcaaaccaaaccatgttaatattgggtgtacaattaaagtcttatattggttaaaaataaaaaaaatattcttaattatttaaagtgggacactatctctattgaaattggatcttttgaacaacttaaactcaaatagacaatgtcataccaataaagatataaatggtgtcgagagttacattcgtatggtgttggtacatgttttttttttttttttgaggagatggtgttggtacatgttaataccatg

SEQ ID NO: 87632 - DNA, 533 bp, Cannabis sativa
tcattttcaaacttctgtatggtagttataatatcatgaaaattttgatgtactaattaagtatataacacgtatatacatcggtatatatcaaatatgttagcctcacaatataagaaaaaagatattacgtactatgatgctataaaataaataaagaaacatatacaaccattttactatagttttgtttttttaggagagagcaagagagaccattatctctaaatttgtttgtgtgagatagttgccatttactgttggcggttgacagttaattcttaactgtctaggtgtcataggagttagttaactttctaataattgtacctaactaactgccgagtatataaggcattagttaatcctagttttggttagcctactcttatcaagacacttgtatatatgtaaatacaatttaattcattcaataagattcaatacacttttacaagttattgttttggttactctgttttctggttgattggctactgagttagagttctgtccaagaactcaggttgcat

SEQ ID NO: 87633 - DNA, 744 bp, Cannabis sativa
ttgaagtaggagctgaggattgaccaaaattagtaggacctgagcttcgaggaccagtagcataaggattccagtgaggtgacctcgaaggctgagtgaaattcccacgattttgaccatttgcaccttgattcgattgatcagaggaagatgtgcgattcttgaacgcaccacgattatgagctagattaaccgaaggtgctgagtctagatcttgagtatgtttttcgatcctgtgctcctgagctaaaagaagcgattcaatctctgcaactgtatattcttcatgttgagagttaaccgagatgatgaagatatcatagtctggaggtaaaccattaaagatcgcagagatgtgttctttcactgtcaaagattggccaacagagccaagacgatccaccaaggtcttaattccaagaagatagtcattgatcgacttcgatcctttcttgaaattacgaagctgagtttgatattgatcaatttttgcagcagattgagatgcgaaatattgaccgagaatactccaaacatcagaacaggtttcacagccaacaatgcgcattagaatagtttcagacattgaggataagagccaagcatagagtaattgatcttgtttgatccaaaataaataggcaggattgagagtacctgatcgttcagcagcttcagtgagaaattttggaggaatagggggcgtggaggagatgaatattgagagatcatgacctttgattg

SEQ ID NO: 87634 - DNA, 699 bp, Cannabis sativa
gcagtgccttatccaccatttcaggataggtgggtctgtcgtcagtagtaatcattaaatcgtgtcggatttttgcatttaatccatcctggtacttatcctttttactgaaatcggttggcacaattccaaaggccaacctcgccaagcgatcaaactgggtcgtatactctgtaacactgatgttttccttctgagtcaaatgagtgaattcttttctcttagcactcctaagtacttcattgtaatacttcgcattgaaaagttcctggaacttttcctaggtcatcgtcgtgacatcgtgaatcagggacaccatgtcccaccagactagtgcgtcttcttgaaattagagggtcgcatagaccaccctatcattaccagtgacgcccataaaatttaagattctagtaatcactgttagccattgctcaactttcataacatccggacctcccagaaaaactggaggtccttgcttgcggaacctttcatactgaggttctatccgattcactgcaaccattggttcggcctggatagcaggggcagatgccaccgtaatttatagagcaggcactgcaggagcaccctgatgtctcaatcgttggattttattatcttgttccttgattccggtttgcattgctgcaaacctattttcccaattttgggcatcttgagcagcttgggcagcct

SEQ ID NO: 87635 - DNA, 1087 bp, Cannabis sativa
atcaaaaatttaagcttataagtggtacaaaagcaataatttttatttaacaacttaagtatcgaatattagtaaaattataattttggtttagttctgcctgtacaaactgtaatgttttaaatttgtaatcaaacttaaacgttattaatttattaaaagaaaattgatactgcacgtttccatctagatctaatgatttagaacttagaccttacacgtgccctatttaagacactaaataaatatatattagcgaaagtagatgaaattataattttactaacatttagtacttatgcgctaaaagagattattgcatttataccagttacaaacttaaaatcttatgctacaattatttctatatatatgagtgtactttaatggacattacctataaatattattaggaatatttgggtaacaatgtttaatttttctatctaatttaaaaaaaaaaaaaaatctcaattttacattatatagactgtggctgtttcatcgataaaaaataaaatatatatattattatgtcaaaaaaaaagattgaaaaaaggttgagttagagttagataattttttatatagtgttaaaatatatatttttttttaattaagtatacaaatttaattttttttattattagttattagattaaattaaatggtttcatatttttaagatatttatagatattttttagtaaccaccaataagtattatttattgaaaaatattccatatataatatataattttggcttgataagtaaccttaacgggaggaaatacttcatcaaaggtgcaacacaatataagatattatgtatatgtcatttatatattattttgtgtttcattaattgccttcagtactttaatatacatgttatatgggttatgttatcttactattataaaagtgtcttaatgaggtgatagttctaagacaattttgtccttaataaattgataactttatccttttattgactggtcaatattgataactctctctctttttctttctctccctcttttaattctgccaattttctttctctctcataataaagttcagat

SEQ ID NO: 87636 - DNA, 1743 bp, Cannabis sativa
tagaaactctacaaaaatatttgtaaatctttttgctctcaaaaaattcacctgagctttttttgtgatcttaagcgtaaaactaaagataatacaactaaaagagagtaaattattagtgtagaaattgggactgaacctcaataaaaatttggtgtcatcattgttattgtagtctttgttgttatttatttatcgtataattatttttgtgactttgtgttagttgaccatttttcaggtcaacataatacttcttatattttgttatttaaatacaaaattaataaaattaaatatacgtcgttcaaatactaatccatgataatagcattgctctaaatataaatatttcaccttaaaagttaaaaatgttaaggagggccttaaagagctaatcactataaaaaatgatatactatattggtgcaattcaatatcagatcgaacccatttaatttaataagtaatatagaaaaccgctaacaaatacaatgtttttaacacatcggtatgatgttgagcaccttaaggtacccaataacaatgctttaaataaattcacgtaaaatacaatatttttattttattttttaaatataaaatacaacatttaaaataaataaataatgaattcttgatatatgttatacagaaaccggtaaaataaaagcttatatattgcaggtccctaaactatataagttttggtaagttggtctccaaattttattttttagcgaattggtccccaaactatataagttttggcaagttggtctccaaactttattttttggtaaattggttctcaaacttttatttctttagcaacattaagttcccactattagatattgatatttttattgatttttatttattgtaaatactttaatttacttttttgtattaaattcaaataatttcattttgttttaattttaatactttaataaaaataattatattaatatttttattttttaaatactcacataatatatactgtataattataatatttaattttttctaaaaatatttaaaatatactttatctatatatattattaataagaaaaaagatataaatactagcggactcatggctagagagaattttaaccctctcacattttatattctaacatctatagtatattttattgttcatttttgaatatgtagtactataatttgaataattttttaattgtatatatattaattatttatattttgcatcaacgatagtaaaatttcatgggtttgttgaagaacataaattaaaaataaattttaaaatataatttacttcggtaatttataaaagaagtaataatattactatttaagccttttgaattgttcttttcttcttcttattttgacatatttaagaaaatacatataaataaaaaaaatatatatttatttaatttaataatatattaatataaaactatttaaaactaatacaaaaataaataaataaaatactatagagtgaaaattatatttccaaaaaaataaaatttaagagttaatttgccaaaaaaaaaaaaaattaaagtttaaagactaatattgtttaagaaactattgtaatagcctaaaataaataaataaaaagtagaaacaccactttaggcttcgccgaaggaaaaggccagaggaagagcatataatcttattttaggacaaaatgtagtcaaaggtaacaggatcttgctttgctat

SEQ ID NO: 87637 - DNA, 607 bp, Cannabis sativa
ggcctgtgaagtggggaatttaagtccaaataatttaagtgaaagttcatttggtcaattgggtcgtgatgttgggttaaaaggaccacgtgcaggtcatgtgggtaatgctcaaaatgtttttgagcagttgaatggtggctttgaggatagggattcagagattaaaaaatacaaaactaatggagaaggtggtgccgaagagattgacagagcaagaaggtattttaacaaagggaagcaagttcttgaggattttatgtcaacccaggagaatggtgcttttgcttatggtgtttcggaagctggggagggggctagcagatcgaatgggggccaaaggaagagagtctcaatcaagaataaagctcggcgacaggcgaaggtgaatgcgggggtggcgattattgggtgttcatcggtggagagctcgaagattccagctttagatgaggtgggggaggcgagtttggtgttcaatgtcgagagtgtagttcaaaaagtctctaggatttcaggtttgaattctacaaatggggttagtatttctacttctgtggatttggtttctccaatatgtattgatgaagcggcgagccttgtggaa

SEQ ID NO: 87638 - DNA, 727 bp, Cannabis sativa
tgactaggatatcaaatacaaaaccaacacggaataactatattctgtctacttatattaaacaaagcttcacaaaaaatacagtgttgtcattgcccatgcttgatttgaatgaagcaaaatgcatccaacaattttattataagagaggagaataacatgcaattaattagaaacaaattaaatgaagcaaaattcatctaacaaaaaaccaaacagtgactcaatgcgtaatattgtcaccatcatgcagaaaaaataatatttggtaatttacaaagcaaaatgaatgaagaaaatttcaacaatagagcattataagatattgaattaagaggagatgaatagtcaaagaaagccctcagatctcataccaaaaatggtcataacagcataacattagactttttcattcaaatagatatgtcatataattgttgtttacctaaagaaacatatttttttactttattttaaggcacgttgcttacctaattagatgactttttaggtaaacaacatgccttaatttaggtaaacaacgtgcctaaataacgcatgtcgtttaccgtactttaagcacgttgtttatctaataagccatgtcgttgaacttattttaaggtagtaatcattgtttaccttatttaaggcatgttgtttaccttatccagtaattgtaaattagtgttgaactccaaagccaaagatgaacaattggtatatt

SEQ ID NO: 87639 - DNA, 710 bp, Cannabis sativa
tgaaaccttattgttaaatcaaaccgtagatgcataatgatcctataaaatttgatttgatatatacaaatcctacgtgagttaaattttgttaaattgattatatttgcccaccctaaaataataaatttgattttgtggttaattgtgaaatttttgtgtttgtactgattttttgtttagggtttttcggttgtgatgaggataaaatagtgtgttggacttttgaagtgaatgcaaggatgggcagatgagttggtctcttaaagttgatgattgtcggagaggtggttggtggtggcaataacttctcatatgaagaacaaagacataacaaggggacttctgggtttgagtttttgtttagaatgctactctaaggattaagtgacgaagatgaaacaaatttttgcaatttttgttttatttttttctttatttaattaaagaaaaacttatttagttttttatttaaatttaatttatcattttttaattaattaaatttttttaaaaaagtatttttcaattaaaaaataaagaaatataataagtagagtaatttgtggtataatagcttaagtttaactcccgttttcaaataaatattatttttagtgataataatacctaagttatatttctgaaactctgtagttacttgttgttaagtgttaaataaattgccacgtgataatttctgattggtc

SEQ ID NO: 87640 - DNA, 806 bp, Cannabis sativa
tgattcttacaacttctgttttaggaatctaataatatagatggctgggaacatgatctacaattttataatcctgactttcttaacaggtcgaatgttggttcgtgttaagtttggtactggaaagttacgtgcaaatttggatgggatcttgaattatacttccaccagtgaattaatagaacaaaaggataaagaaataattagaagggtaaaatggtaatttgaccaaaactaattacgtaccaacacatggaggggtaatcattggaattgattatatcaatggacactacagtaaaactcagtaaatataattctataattactaagaattcaattccatatttatagtggagtaatcatggaattaataaacgaggaattatttggttgatgagactaaataaatgtatagtctagtttattggagcttaaaattatatgtccacggtccctgaatcgccaccttgaaatactgtcaagggtaggaataaagagttgtatgaatatgttcagaaaaatttattttgaattgacaaaatagtaattatttatttttacgataaataaataattttttcaaattaattaaataggaaatagacaaaatttatcgagataagatttgtcaggacaatagacaccaatcttatcctaaagacaatggtaggcacatatgcttattcctatccctatgagatttatatttttgggttaattaattatttaattaatttaattaggtaaatatctaatttgaaaagtggttatacatatttcaaggttgttgagatattctctca

SEQ ID NO: 87641 - DNA, 1215 bp, Cannabis sativa
  modified_base (1040)..(1046): a, c, t, g, unknown or other
tcatttgggatgaaataataatccgatcattaatgaacaatgccttattatctaattatttggaagggaaattaaaaaaaaaattgaaaatttacaaaaatattagggcatggagattttttttatatatatatatatttactatacgaaatttataaaaataatgtgttagagttttaaaattacaaaaatattatatttcagtaaaaaaaaaaaaaaataataatttaacaaacaacattaaacaaaaaataactgcaaagtaactgaaaaataacaaaacattaacttcaatgaaatatgcaaaacactatcaacttctcaatgtatttttgtactacgaatttcttttttacttagtttttacaatttgatttatttttttttactattacattattttttatgaaatttatcattacaatttcatacttttaacttctttttttttttctttttctttttgagttagagaccgttaaaatgatatatattttttttaaaaaaagttaattaaatattacattaataatagaaataataaaattttatgatttcaaaataggtatataatataatagataatctataattaatatattaatatctattactacaaatcatgtcaattaaaataaaaaatcttatatcattgtatcattgtattttaaaaatttaaaaaaaaaatgtgtcaaaaaaataaattaaatatattatatttacatataaagcaacacacatacaaaaaaaaaaattatcatgaataaactaaaaatatataaaaaaaatacacatgaataaaaaataaatttttttaaaaaaatatatagaaaccacttaaaacaatataaaaatagaaaaataaatgcacatatatatataacaaaaatattatctagaatatactaaaaatatacacaattaaaaatacacataaactaaacaacaactataccaaaaaaataatttaaaatagttagagtgagaatagtaaaaaaataataataaaaatgcaataaatatttttatttttatttttnnnnnnnaaaataataaaataaaatttatgagagtgcaaaaatataaaaaaataagatataaaaatatacacttattttatatatacaaagataaaagaaaatattttgagaaaaaaaaatagagataaagagaattggaaaaaaaaaattaaaaagagaaatagaaaaaaaaaaa

SEQ ID NO: 87642 - DNA, 1000 bp, Cannabis sativa
atctgaatatatcctatattagttagataataccctagtattttctattattaaaaaattagaaaaaaaaacacataactctttctctttcttcaaaccgttctctctatctctctcaattttcctagaaccaactagggtttgagagtttttttgctcagttcagggatttctagcaagattctagtgtattaatccaaggtaaaacccttaagtctctctgtgtatgatatattaagttctaagttaaagttttatacaagattttgaacttagaacaactgtagttatgttttgattttgtttgagtattcagaagttaaaataatgttaattgagataatttgaggctaggttatggcttgattgggctgttagagttttagaactcaaactttggtcttcaatgacaatttttgattctaagcatgttaggttgttttgctgctagaaatatgttctttagggtatattaagcaggtctggaagttttggtttggtttggatacgaattggtcaagctttcgaattattttgggttacctggcgcaaaccagttaaccaatttcacaggcactgtaaaaccggttaattggattagaaaccaattttttgaatttttcgtgttgtcgattcatgttattttgagagctttggttgattgattccttatttttagggtattgccatgttttttatcgatagcaatagggaaacttttagtttcaagtttaagttcctagaaagtgatttagcgtgttgctcaccaattttacgaataatatgatttagggcctgtaattcgtcgagcagttgttccactaatattagtataatggttgcatatatgtatacatgtttagtgtacatgttagttgccgtcagaataggcaaatttatatctatcaaattagcatatcatggcatcagtgaggtgtacatagagttgcaccgagatgccaacatatatatatgttagactatcagatagtatgagtta

SEQ ID NO: 87643 - DNA, 1869 bp, Cannabis sativa
tgtgtgacaggtaataatgtgtatgtatgtgtatatacataggagaaatgctaaaggatactactggtgcctagcactattttatgtatcagtattggtattggtccaattaaacatcgagttttatatagtttaatataatagtttttagggagtatcgttacctaatcgcaacgcaacatgttgaaaagatactaggtaccaataatacctaataacaatgcctatatatatcgctatagatatgaatgacccgaaagtgccactcagaaaatgacttttaaaatgtggaccatttttaaattgttaagatgcaaagccatatgtacccgttacctaactagctagcatttagtgtggcccatcttttttgttttaatttatacagtgcttcattattgtaccaataaacaaaagaaatgaaaccatatagcttcatatattgaatgaatattatatgaaatcgttattttcctcgtctatttaagaccataatttatttattagttataactactataaataataataatggaaaagatatacaagtccaacattgtatgattaacttatgatttaattccatatacaaagagaaaattgtgtactcaataataaagagctctcatcgaattaatgaaaaaacacatgaatgcgcagaatattttattcaatatatttttacacattttacataaatcccaattattattctttctatcttctttacagaaaaattaaaaaagaaaatacaaataaagtgttgttcactattttacttttcgtgaaaaatgattaaacttttgttgagttagcacgtgttgaattgaataatatttcacatcttcaaccttttcatcttccaagataacgatggtgtaaccctaaaatctaacacaaatacacaaaatggaatttaaagctttctcaatctgtcataagcttgttattacttatttagtgaaatgaactttagttcaatcttttttattagatttatgaaattagatctacttagttagttagccttcacttgaaagttttgtttttaatagattacttatgaaattagatctataaacaatactatcaaaagactacttagtcagccttcacttgaaagttgtgttcgcttttgtgcatttcagaattgcattggacataatttcatttaactttttaaatatgagaaatgttaaaaggtacctatagtgttgattgcttaaacatgtgtaatatcgttattagtataatttaatatcgaattttatttattttattttaataaataatataagaagttattaaccaattacttcatcatgatgttaagtaccatgagtgcttcatagcaatgttcgaattattctatttttcctaaaaaaaatatttataataaaaaaatgaattgtgtccaaaataaactaaaattacataacatgaaaatactttaaataaagatcgataccatttattttaattaactattatatttaatttaagtttcaaacaccattttttgttatcttagtaaaatatatatagaaaaagaaaaatattctttcaaataaatgtgtacaaagaaaaatgttaagggatatcttaaagtatcaagcactacaagagttatcatatttttattggtgcattttaatatcgagatccacatattttgattttataaataatataaggaaccattaactaattacaaagtgtcacgtcggtgtagtgttaaacacattaagatatcaaataaatactcatgtacaaaatataaataaaaaactcatttgaattttaagagtagctccttcaaataatttagtgaaactaagagggaaatttgacaatacatgcttaaaaata

SEQ ID NO: 87644 - DNA, 510 bp, Cannabis sativa
gtcgtcgttgaggagggaggagctgtgtagcttccgtcgctggtgaagatgccgtcggtgacttagggaagagatggccgtcgtcgtcagcgagtaggggagaagatgctgtcgtctatttcgtcgtcaaatcgctgggcggcaaagagggatgaagtgggagagagaatgcgatagagagagaggggctgatgagattttaagatgtttgcaccataatctctaatgtttaaaataattaatatcgcaaattcaaaagttaaacatgaaaatgaaaacctccaatcgaagcagtaccagtaccagtaagatgtttacaaaaaccaaatcatattttcaagaacaccttaccttacacacccccattaacaaccactagtatgttaagacagagtacataaatttcaaaaatcacactctagtaactgtgtatacagtaatccgataaagttgcattgattgaaaacatcaaaagagaatatattgtgttaaaacttacagccggagaag

SEQ ID NO: 87645 - DNA, 574 bp, Cannabis sativa
agagctgtagaaagaaacatgcatggtggtcaccggcacatgcctgtaaaaagaaaggcctgtgcaagagaaggaaggccatcttactgcctttcaaggtctggccaaaggtcaggagggtcttggtcaggggtattgttaagaccgaaggcttacacgctcgactgctcaaagaaggtgtagaaaatgaatgcgtatggtcttaaaacactcattgtactcacgtccgcccctaaaagctcagatatggccagccaactccctggagggatggccagttgttggcatcctcaagctcatgctccctatcgttcattaaggcataactatgcagacacaatgaggtacaagaggtgttggggccaggcaaagaagctaagactcgatgcagttacgaagactaaatcatgaagggtcgtaagatataacgaccctatccagctcatgactccggtgtcgatgctgatgtgaggaccagatccattaccgacggctacttcccctaacttttaactgcatcacgaagctgatcgaagaccgacatcgcgagatcacgtcgtgacagtggctgaga

SEQ ID NO: 87646 - DNA, 3082 bp, Cannabis sativa
ttacagctgcagatcgaccaggagcagcatgagatgaaccgctgttggattcaggagtataacctatacccaaaccaaaatctactccacgaacaccacgatttccaccaccaccaccgccaccgccaccacctccacctcttcctctacctctacctttttttccacctggccaagacattaaacacaatgatatcaagttagacatgactattcaacatgtctgctgcagatcaatcaaatgaagctttctcatttagcaaaaagatgttggggaaaaaggccatttaggcatgatacacatccgtacctccttttctggcatcgcgtttggatctataccttccatcctaacgatttgagacaaaaatgtattcaataatagttcggcaatacaaatctttcaacaatatttttaaggcagagtagaaatagtcagtttaaaagcacagccacaatcagatggagaaaccatgaacataaaattttacaattcaaggggaatcaggataatcacacatctgggcataatcaaatcagagttatatcacattctagatcaagactgttagatagaaataaggcattaccttcatggcaagatccataagctccactgacacattctgaccagcagcaatcaaattgttcaccaattcaccagcaaaccttgcctccttctgtgttataagagtgtatgcagtcccatctttgtcaccagcacgacctgttctaccaatacggtgaacatgcatgtccatgtctcttgcaatatcgaagttcaccacagacttgatggacttaatgtcgagaccacgggcagcaacatcagttgcaataagtacatggtagatgccggatttaaacttctgcaatatatccattcgggaagactgatctttgtcaccatgaagagcagcaattttaaaacctttcagagccagctgtgactcaatttcatccactgtggcctttttcgatgcaaacactaagacatcacctgcatcaatcattgcaggtagtttttcaagaagccaaggtaacttctcagcgtccgaaggaatcacttgaacaacctgagtgatatcctcgttggccataccaacctccccaacagtaactcttacagggtcagtaagtatctccctagccaacttctcaactttacgcggcattgttgcagaaaatagcagagtttgacgatctggcctaatctgaccaacaatagatctaatctgtggttcaaatccaaggtcaaacatccggtcggcttcatcaagtaccaagtaagttgccctagacattgttagggctttcattttcagcatgtctatcagtctcccaggagtagccacaactatttcacaacctgccttgagctctttgaactgttcaagtttggacataccaccataaacagctgagacacgtataccctgtgtttttgaaaatttcttgcactctatatatatctggtgtgccaattctcttgtgggtgcacatatcactccaattggaccctcttctttctgaagttcgggctgatccatgatatggacaatcatgggaaggacaaaagatgctgtcttacctgaaccagtttttgctattccaataatatccctcccagaaagcacaattgggaaagcttggcactgtattgatgttggtttttcatagccttgttttctaatagcactcatgagttgcgaagagaaatcacaatcttcaaaagtttttaccggccttggaacatcaacaccagacacacgaatggccaagctcttttggtattcagcaacttcttgttcactcatccctatagaatggaaagattattacacaaatgaaggaaaaacaaaaattgatgagttacaagttacaactaacaaaacaaggtaagacatggcataacaagcacaacaaatataagaagacaagtacagcaccatccatccctgtatgttaaaaaatatatatatacaactatggtttgaatggctgaccaccagtttcctttaaattatgcattttgtaagagagttcactgtcattctaaaataagttcagataagaacaaccaactaaaattttccttctcgtaaacggatccattgtcattctaaaggaaattaaatgtagaatcaactaactaaaatttcacacttcaaaagccagtccattctaattcaacgggacgatacatacatatattcagaaaataaaattgctcaagtatgaagtatgcaacttttcactacttacttacccgatattgaatctttctcctcataaaagtccttgttaaatggttcatagtcaatcgaactatgatccagagctggaattggctcaatcttcttcctatcagtaacaataggattatcatccgaatcatactccaccaacccggcatcgacagccttagccgcagcatagacctcctcatccgaatcataaccagcgtgaagcacgtctgaagccagcgtcagacccacatccttctttgccctaagaaagctctcaatcggatcatcatcctcatcatccttatacttctccgccttctctttaggcttgggcggcggcgccgacctcatctcctcatgaataccctccatgaacgcgtcgagtggatcaacttcttcctcctcctcctcctcctcagctccaccattaccttcgtcaccattgccactttccttggtagcatcagcagcagcagcagcatcatgttcttcgtaatcgatattgtcaaggtcagtgtcttcgtaattgtcgtgaccttgtgcccgcgaagatggaggcacatacaatcgctgaggagcttgttgggagcgctcgaagttgtaagtcgtttggcggtttatgccaaagccttcgaatccgaatttcctcttcgacatggtcaattgtatttcctgtttggtttccgcgaaaagaaaaagcggtaaatctgcaggaattgtaaagaggggtttttggtagggatgaaccctagttgttgttgttgtggtttcaaaaccacggtcgcattgcgtctcgccgaccaagtttggggttacggtgccgtactaggcaa

SEQ ID NO: 87647 - DNA, 800 bp, Cannabis sativa
acacctggggcacggcttgttgagtttttgaaaggcaagcaatgagacttcccatattgacaagcatcgcaaaattctaatttctcattgataataggccttacatcagtagtttttaaaacttgactcaacacagcatgagaagggtgaccaagccttctatgccacaagtttaagacaaactccctaacactagacttatttgacactgaagttgcagtagcaacacccgtaaagggaactgactcaggattgaaaggctggacattagatttgtattgctgcgagatgagagatgtgtcgagcttatagaggccgtgtttaagagctccttgtagaaccactctccctgtctcccgatccttcacacaacaagaaaatggaaagaattcaatagatacatcattgtcagcagtaagttgtgagacacttatcaaatttttggtaatgtttggaacatgaagcaagttctttaaaattaagggagaatgagaaatggttttgagttttccagaaccaatatgagatatagacagcttattaccattaccaactgtaatcttctccttaccaccatacacattcttgttactcatctgaccatcctctgtagttaagtgattactcgcgccactgtccacataccaactgtcatcattcaggacttgtggagtagcaacaagagcattgagttgcttatcctggttttgttcccctgctggttgttgtcccatgtaattctcatcgtatctattgtagcaaatagccgctgaatggccatacttgccacagacttggca

SEQ ID NO: 87648 - DNA, 839 bp, Cannabis sativa
tatctataaaaatatctaggttaatttcaaatttattattatataatttatcatataagataattttaatataatatttcaatgaaaaggataattatatcttttaatttaaaatatatccaatattaaaatatctaatcttattattatataatttataaattttaagatattaacaaaattttaaaatctaatcataattcaaaatacaaaataaccaattattaaatttaaactttaaaatattgtttgggacctacaattcaactttttgagatttgcatttcatatatcttaaaattgaagtcagtacattagttttatgcgaattaaattggatttttggtcgaattttagttttgtagtagtttttctgcacttattttttttatgaattcgaaacaattcttgttttgattgatttcagttatcttttcaggtgaagtcgccggaattaatgttggttctttttctggttaggtttcgtttcagttgtgttgggatgctggaagttgtcgttgttgaagaaggtggttagttagtgaggctgaatggatagaccaagatgtatttttgtaaatttttgttactggactgaataaatgtttatagggcttgcccaatatatttgtgtaatatttttttactattttagcatgtacagtagaaaatctatctaagaatactttattcaaaaataacatctaatttattattaaaaaatcaagttccaatttaggtcaataataaataagaataacttttaaattgtaattagttatacattttttaaatcccgtattaacaaagtatacctctatataaaaataattatatct

SEQ ID NO: 87649 - DNA, 910 bp, Cannabis sativa
ttttaccagagtaacagcccgttgtattcttgtgaatcgctcccttttgagatcgagctaatcatggacatcgtcctgcccctttatatattgttgtacacatccttgtgatatgagaccttctatctcatctttcagctgatgacattcttccgtggtatgaccaatatctccatgatattcacatcgtttagttggatcccttttacgcctcgcatgtttcataggttttggcttgctaaaaatgacttcctgtacgtgtgcaaggtaaatattttcttgagtttcactaagctcggtatatttagtataaagtgggctatacttgttgggtttcttatcattgggcagccttttggaattgttttttctgtttgatcccgaggcttcccaatcaagttctccaacattatcgtgcccgggatgtcttctaggtttcgtgacctgatgccctctaacttattctccaactcattcattgcaaattgaatgaatccttttgctttgaactgagtcattgtcaaaggtcaggcttcttcaagttcagatgttctcgtagatcactcttgtcgtgagtgcggtcagaccttgcccttcctctcaaggtttgattcacctttttctccctataagggtttgtgcaatttctttcttatgagcctgaagagagggttagcgatttttgtctgatgttccacgtatctcaggctgtgtctctagattttcctcagtttcctcaggttgcatctcctcagagttctgagtatatctttggattctcccatgccccttggtttgcgagctacgaggtttgcctcgtcaatctcttctcctagggtcaggttgattttgggtaccatcctcctgcgctacttttactgcagctatttcatgctctaactcggcatta

SEQ ID NO: 87650 - DNA, 666 bp, Cannabis sativa
  modified_base (592)..(607): a, c, t, g, unknown or other
cttagccaagatgctaagaccgctaggcctttctgttttgaggcctggtggaccagggaccctcgtagtgagttgatcgtggagcatgcctggggctccttgtctcattattgggccccggcgaggattttcaagaaagtgggggccacgcgcctggcgcttagtaagtggagtagagatcaattcggaaaatttgataactggattgctaaactggaaggtcaactgaactccatccagggtcttctttttgggtctagggtttgggctgaggagttggaaatcagaaaatctctcaacgaagctttaagacaaaaagccctctactggcaacaaagagccagggtttcttggatcaaagagggagaaaagtgttcaaagttctttttcaccactgccacaattagaaatagaagaaatgtaattgagactatcttcaacaaagatggggtgtggctgagtaacagacgtgatattggtagagagttctcagagtttttgggaggcatttttaaaaatacggtattcgggccgttggagagcttagaccatatgatttcagaccacctttctgttggaaatttattttacnnnnnnnnnnnnnnnnctcacaagtatgttgtttaaacaacctaaatatgatctttctaaaacgataaattaaac

SEQ ID NO: 87651 - DNA, 568 bp, Cannabis sativa
gatacaaattcttaatggatgatacaataaacaactatagagatgagatcgcgaattcaaaacttgaggaagaaggggaattcatattcaagggtgacatccctagattctaaatatccattgatacaacaacaatagtctggagcatagctcaaggagaaaaggttaggaaagcctcactagtattagagatagaagacaagtgagacacaactaagaccaaagtgatatatcttgaataatttcatggcatggaaaggacggtattggtttcggagaagtgttgggattattaaattctcaggcaacatacatggattcaaggcacaacgtaagcaagtcatactacagtctcttatgattcattttctgaacaatagcataagtatattgaagtgtcaccacaaggagaagttaagaggtaaactttcaatgagtgctagcttttgtttaaagaggggcattttaggtcttatactgcttgagaagagaatgacaacaaatctctcaaaaagataaagctattaagatttaagaattttgacaaatattagaagattttctcgac

SEQ ID NO: 87652 - DNA, 617 bp, Cannabis sativa
cacggcccgccacgttgccaccacatgatgcgggtgctaacaggcgagtcacaggccgactctatgccttttaggtttgagccgaggagcgttactcctattgggggcgcgtgtgtcatcaccgagggatgggaaggagcaaaggcttattgggttcatgtttggacagtcaaagatggtgttattactcagtttagagagtactttaacacgtggcttaccgtcagtgatcttcagtcaccggcggtgaatggatgggatgtctccaccggtcaccggagcttgtccactgtttggcagagcatgcctagggatctctttcgccggtctctccctagtcttcttcttgccatttaattagactatgatttttattaagttgtttaataattattgttaataatgataattagttatgtggggttataattataatgcatgattgggacaattaatataatgcaatgcatgaaaattaataagtccataaagctagctgtttatatcataaaaacaagaagaagaaaaaaaaaatgtaaaattaagagaataaattaatatgaatatatgaaatgttttttttttttaatatgtttgtgtaaagcgaattatacaaa

SEQ ID NO: 87653 - DNA, 758 bp, Cannabis sativa
atggggtttacttacacttggataaggggaatgtattttccaggacattagtaaagtaaactagcatcagatgtattggctatacatcggactggaccgatattcacaggggaaaatatattgtaaacttaccataatatcttttctaggtaaatatctaaaagttgatcttagatcaatgatcccaatcttgagatgattaggttctggcttaactgtgttattcttgttctttgacttgttcattcgaagcctactagtaggtttggctcaatacttataacttaagaacatgataatacaattaagtgggaacgctagtcatagatatgaaatctatagcttctatatgtacataaaagttaatcgatggtttccttagagcttaggtaaacgagtttaaatgagtgaggccttattttggtaattctattagtttctcgaaatgttatttacatgtagctaagtattttaaaaataaaatacattgacgggtaaaatgataatttagtccatattcaatgtagactatttatagagaatcattaattatttagattaaaacaatgaataactaatagtgtatctattcttgcagcatagagcgtttgatgtaatcaggagtgtaatttcgaatctatagtggaatcaagaataattaataagataaaaaatttactcgataaattttatcaaatctacttattaggagtttggttacatataggctgatacattggctaggatagtatcatctt

SEQ ID NO: 87654 - DNA, 1732 bp, Cannabis sativa
ctcacaccattgggaagctttaaggtcctggacacttcaaattccaaacaaaagatcccaaatgataacttgaaaatagtatcaaaacaaacgaagaagctcaacaatcaccttttagattccaatattagactaaagttttaatttttaaggaaagaacactaaccaaccaaacaaacacataccgaaagacttcgggttccttcattttcggcattggagaataaaattcaaaaacccacatttttatcaaaaatttcaaaatggtcataatatgagtacctggcaaagttgtttgattccgtttggaatcgcttgcaccaagtgtagaactctttgatgtcttaatgaaataccataacaaagaaatttatagcctgaatccaaacattaattcataatactcaaagtttcaaaaaaaaaaaaaatcaatagttccaaaacataatcaaaaaccattagccaaaactaataataaactaaatatcaaatttcttagatcaaaactgatggtttagcagaagaaagtctggaccttttcttagctaagctctcactgcgacactccctctgctccttcaatctagacgcaaggagtttctggtactcagcagcatcagccttcgatttcgccaccctcttcttcttatcagcaattctagccctcttcctctgcaaagtcaatggagtaacaagcctctgaatcttaggagctttgctagccttcttccagacttggttgtaaataaggagctgcgataagtgttaacatatttcctaacatcatcgtccttcgaaagattaaactgcttacggatttttgaagcctttttggacctctcattctaagcttatcagtatcagtcaatccaggaagatcattctcccctttcttcacaataattaaattcaaagccgagagatcttagttgacgatacaaccacggactgatttcctcctttgctctccggtacgctttctgaaaccacggaagcaaggggtttcattaggaaaccttgcttgtcacaaccacccatgaagacatagcctttgaattaggaagctcaactgaattgaaaatagagagggaaaattttagaatttaccgccaaaaaaaattaggagataaattgtgtaccaagtttatagaaagaaaattttttttgtatattgtttaatattttaataaaaatattttcgtattatatttttattatatttaaaataatatatcaaattaatattaatatatctaaaaaaaaattaatatttatatattgtccgaacatatatgagtaaatgtaatagataaaacataattcaatgcacgttatcaacttattttaactaaattttattattagttgcgatttacagaatgccatgtttgatgaggggtcacgtttgttgttgtactaattaaaattaaatattaaaaataaattcaacttcaaaattatgattcaatttaatttattttgcaacaaaattttaatagcaaaattaactctttgttacgatattttgttagtaaaattaattttttttaattatatatttactactaattcaacaactatatatatatatattctaaaaacatatataatttatgttaatcacattttttaaggatgaaattaattagtagttaatatatattcaatatagtaataattaatcttatgttttaaggtaactaaatgattacttggtacatataaattatta

SEQ ID NO: 87655 - DNA, 664 bp, Cannabis sativa
cttgagagaagagacccattttccacccttgaagcttgtcccaaactttgtttcgaaccaatccaaacgcttctcttttatttcggccaacaaatgcaggaagaccgaggtactttgagtggttttcagtgaatgtgactccaattgatgatgctaaccgctgaccctccgcttgagaaattttcctaccaacacaaagattgaatttagagaaattaatacattggccagacaaatcagaatacttctgaaggacctccgtgaaagctctcccttcctctactgtggcatccataaaaatcaagcagtcatcggcaaataataggtgtgtcaatcttttttctaactgcccaaatcggagcccatggatcttgttagcacggctggcttcgttgattaaacaggacagaccttcggagcaaatgagaaacagaaatggagatagagggtccccttgtcttagccctctttccggaatgatgtgaccccgagcctctccgttgagtaaaaccgagaaggttaccgacttcacacaactcattactttggctatccaacgatcgtcgtatcccaagcttctcatcatgccttctaagaatttccattcaactcggtcatatgctttagacatatctagtttcagagccatcttcttcccattccc

SEQ ID NO: 87656 - DNA, 518 bp, Cannabis sativa
cattctttcttcattatcttcattcttttaatttgaagtaactaggtggaatttgtggtgtagttcccccaaataaataaataaataaaaaaaggtctccaaaagttattatcatttctagaaagttatttgactcgcggatgtaggtcctggaaggcttttttatcctttcatgaagggtcttcacaaaagctagcattcctccggttgggagctcttgatgtctagttgctcctcctggaaggtagtcccagattgtcgacttcaactggcttgttcctatccgggaaggtcctttatcaagtgccttagtctaactctgtgggtcctcatactctcttccagatgcactcctacttgctgacatggtgatttcactcaaaggagagttggttaagttagttattgcctaactaacttaacaacctaagttcttgcaattatcgactttaggatcttgatcctaagcctatatataccacaacacttatcattttaagcaatcgatcaggtcgaga

SEQ ID NO: 87657 - DNA, 604 bp, Cannabis sativa
ttgaaaatcaaagaaaatggatatagagggagaagattttatcgaagggagaggaacgaagtttcgttcgttctttactctattatatatgttgaacttatatatgtaatatatcactactacaaacaaaggcctttaatcccagtttttaaggccttttatcccgatttttgctaaaataaaaatcggaatatatgacagtgggataaaaagtcttttaaaaaagcggaataaaagaataccttttattctggtttttattttttcaagcccagcccactaactatccagtatgaagaagaagactccagtagcacagatactatagtatatagaatcggagtaaattaatggaaaaatataatgaaataaatgaagaataatcagaattaatatttataatatgttgtttactacaatatattgtttaaaaatgaaataataatgatttatcttgttcactttatctaaaaacgtaatcaactcttttgagttaaattatattatatggtaattatcttgtaaggcatattttaaaggataaaattgtgattatatattttaatattaaaaaataaaacaaataataaaaatcattatcaca

SEQ ID NO: 87658 - DNA, 556 bp, Cannabis sativa
aaatatatttatagcttacttctttattgatagatgagtgcgtacgcagatgggatccagtcaaattaaagttttttggagacaatttaaccaataatgatcgatcatatatttgatcacatattttcttttggtgtttgcattggtgcactaataatatattgggtaatatcaaatatcaaaataatatgacaaaatcaaacgaaactagactgacaatcataacagaacaataaaatatagttaattctattttacaaatacatacattatgtcacaattaatacattaaatataaatatatcacaggctcaattggtactaaggcggattaggtcatacttaaaatctagcaaattctgaactcaaaaacccaacatacatatacgacccatatatttttaaaaaattatactacaaaaataatacgtataaaatgattaattatttttgaagaaattacattgtatacttactttatcttatttgttttaattttcacttttatttttatattttttaagatatatcaatttttataaatgatgtccccatt

SEQ ID NO: 87659 - DNA, 613 bp, Cannabis sativa
  modified_base (142)..(159): a, c, t, g, unknown or other
aaatttacggtttgcgtttctaaagtggtttctccgacgatttctatgtgggttgctatacaatttttggttgcgatttaggttactccgctagttacaataggagtttctatataaaattccgtaaaaatgaaaaaaaaannnnnnnnnnnnnnnnnnaagtataaaaatgaaaaaactccttaaaaattatgatatatgttatgttgtagattataaataacgtattcaattatttatttttatttgtatcaaaattattatttttatttttcctcttatatggttggctaatttaatttaatgttaccaaattagtttaatttaaaatttattagtatattttataaaatatcaattacaatagtattaaatgactatattttatgtattattctaaaatattttatcagttttttaaattaaagatattttttcatttaaaaaataagtacatttttatttatagaaaaaattaaaaaaaaaaaaaattctataataagacgccacttttatgaaaacattaaaaacatacatttgtcaaaagtgtaaaaagtcttttatttttcacaaattaaactacttttatcaattttttgttatttcatttttt

SEQ ID NO: 87660 - DNA, 1026 bp, Cannabis sativa
ttcttggttggtatgtgatctcgaactggccaagctcaatggcccatttgagtagtcagcctgatgctttaggtttctacaaaacctaccgcagtggttgatcggtatacaccttgatggggtgtgcctagaagtagggcctcagctttctggaagccaagcgcaagatgtaggtcagctttcccatgagcgggtatcgactttctacgtcgattagccttttgttgatgtagtatacatggtgttgtacattgtcttcttctcttttgaggacagcactcacaacatgctctgtgactacttggtacatgcctatctcttcattgtctaggggtttagacagcaccggtagttgggccaattactctgtccccttgaatttttcgtttcctttgagaatgttgaggaagggtacgtatttgtctatagacttggacacaaatatgcttagtgtagtaatgcatccagttaggctttatacttccttgacagttgctggcgacttcatgtccaaaaaggcttggatcttgtctcgatttgcttttatccttagggcattgactatgaagccaaggaattttcccgagcctttgccaaaagacaattttagggggttgagcttcatgttgtagctgtgaaggattttgaagcactcgcttaggtcctccacatgcccccagcctttttggacttgacaagcatgtcatccatatacacctctatgttacggccgatgagatctatgaacatcatgttcaccagcctttgatatgtgacccctgcatttttcaatccaaagggcatgactttgtagcagtataggcctaggtctatcatgaagctagtgtgctcctgatctggtggatgcatcttgatctggttgtaacctgaatactcgtccatgaaactcaagacttcatggctagctgtggcatctattagctggtcaattatgggtagcgaaaagcagtcttttggacatgctttgttcaggttggtgaagtcaatgcagactctccacttctt

SEQ ID NO: 87661 - DNA, 505 bp, Cannabis sativa
tgaagatggtgtttcattgggtcccttgatgtctttgttgcaagataaggtcttcttggatagctggtcagtctttatttatttgatcttttataattaactacatggagatatattgttatgttgtttagttcaagtatttgattgattgaacccaaagcctttaaaaaccaattagattcttaaagagtttaagagttaatttacaaacaattaatcaacataattttagtgtaaacttgtatgcctttaatgaatgagcaggtcccagctgaaaggtgcaattcttgaagggggaataccctttaacagagtccatggaatgcatgcttttgagtatccaagattggaccaaaaattcaaccaggtctttaacaaagcaatgcacaacatgactactgtggttatgaagaagatcctagaggcttacaatggttttgagaaccttgggaaagtagtagatgttgggggtggtttaggagggaccctaaaccagatcacttcc

SEQ ID NO: 87662 - DNA, 912 bp, Cannabis sativa
aaaatatatataaatattaattatggtgaatagcggtataagtacttaaagttgtacgtttgtaagcgacgtaaaatttatttttagcagcatattataagtacacaatgtgtaactaatactacatatttatgtctagatctaatgactaaaacaactgatctaaaatttgggccttatatatgtgtgtcctgtttaaagtaataacagagtctgtaatcacgaaattagataaaaattatatttttataaatattaattatttataccgctaaaaagaaatattaaatattaaatttatgctacttataaacctaaaactttaatattcatactgctatttaccctatcaattattataacttgtctttcaaattatatatttcacaatttgctctcccaatctacattgttaccctctgtcgcaggtgattatcttgtttatgtcaccaccaaagatgaatcgagagatcgtcgtcaaccatggactgctgtctacaaaactaaccttaagacttccaaaactagtcgacttactctaaaaggttgcttcctctcaatttttattattaaattgctcttatttttagtgatctaaattgaattgtgatagtaattacatatgttctttataaattttaagtgcattttcatatttttgtaaagttttggaaaggtaggtcaaagaattatgaatatatagttatcttgaaaaatgtaatttgatgtggtatattcaggccggctggctaagatcattcaaattttgggatcttactttcaaaaatatataaaaaaatattaaaaaaaagagctgaaatacaaaatgactctaaatttagaaactaaattagtaaatatcctttgtttaaaaaaattaagaaaatggctaaatataataaattagctaat

SEQ ID NO: 87663 - DNA, 897 bp, Cannabis sativa
actaggtagaagttacgtgccgaggcacgtaaatgttagttttatttagggttggtttttatggttttttttattttattttgatttctgtaattaaaggaatgatttgtttttataaaagttaaatttgtgtagtgtatttgattagtaaaatatagagttgtttctgcaaaatttttatgatatgtaaattgttattaataataaaagtacgttaatcgtaatatttaaataataatattataattatctgtaatgtgaaaaaaataatttatgataagtcataacaatatatgactttaatatttattataatttaaaggaataatatatgtgttttgcaaaatttaaaggaaacattatgtagcaaatttttttttttttaaaaaaaaaaatggcatcttaaaataggggaaaaaaattattaaataaagtcttaaaatagaatactatatgaaaaattaaacaaagccaatcttccatcgacttggctatttaaatggttattttttttttaaacaagtgtccgatcctatatacataatcccagctcaccccaatacagaccacaaatccattacataaaaaaaaaaaaaaaaaaaacaataccaaatagcaataaagtaattaaaaatgttgtttagttggcatggttgcatatcaaacgaaaaattaattaaataacggatacgaaattatttaataaataaattatttttttaacaaaaacaacttaaaaaaacagtttgaatataaattagtttttaaaaaataataaatctaattgactgttatcatttgaaaaaaaaaaacagccttgagcatagcactattgccataacgcacaatctcgcacaggcatatctcccaaattgtaaggaactatgatgttcacag

SEQ ID NO: 87664 - DNA, 780 bp, Cannabis sativa
attttaactttattttttagggtcattttgcatcttggcccgtcccaattacactgaagataattgaggaatatctattttatacatatatggtaaatactattttggaccctgtattttgtaaaaattatcgattggaccctgtgttttgttaaatgataaaatagaccctgtattttccaaaatagtaaaaataggaccctgagcttaacttttgacaactttttttttctaatataatcaacttgaaaacaattcctaatacgaacatatacagaaaatgtaaacaattttgtcataacacctttagatcggattataattaaattttatttggacaaaaaatcaattcagcgtcttatttgtaccattttagaaaatacagggtctattttgccatttaacaaaacagagggtccaattgataccttttgcaaaacacatggtctaaaatggtatttaccctatatatattaatcaaaaatactttcatattatatttcattaaaatgtactcacttttgtgagcgggttgtctaatatattttaccttttacttaaatctagcacataatttacattaacttaagagatatagtaggaacataagctataaaagtaaatatattttgaagaatataaaaaaaaagtaaaaattaaaatatagaatgtaaaacgggtatacaatataatttttttattaaatattgtttatcgtctataagaattgtatgtaattattattacacggtataattagtttaaaaaatttattttgta

SEQ ID NO: 87665 - DNA, 3488 bp, Cannabis sativa
tacagaaatgggagttgttatgtttttaccccgttttttcaaaataaatactacctcctcgatacagtctctcctcttccacactctctctggagatgggctactaccactaccagactctctctctctcgctctctcgactttttttttcgtagatcttcctctgtcgccgaaatcacagtccttcctccttcacacagcatcaccaggtaatgtatatatacttgtaaaattgattttatataaggtgcttgttttgtttatcattatattgattgtatatcaatctgtgggttggacatttttagattagtatgatctctctatgatatgtatgcataaatagtaatatttctagtccaggttcacttttttatttaacgatggaagtaaagagtttgaattttccctcgaggatcgtgactttcctaataaagccctagatgaaattatcagtaggctatcgctgaaaattatgataaggtgtagtctagaaagcaaactgtggaggcaagtcattaacaatttcatcacatattgcgagcataagtacttccctattaaggtgaaacgtaatcagaaaattagttttcaagataggatattatataacctctccttaactcctctcactggtgccattattctcgacattaaacatgggattgttctgatgaaagtagacagtggtagaagaaagttgtaccagctttttaatcctgctaccgaacagagaatcactttgccaaccatacccattcctgtatatcgtatttggcatctgtatgttgaatcgaagacggttagtcttattgcgttgtgagagcaagaaatattccaattggcaagtctacttatacaccttaggtcagccgcactggagggcttacaatatgagttctcattctaatacctactcgacttcgacttctatagaggaacaaacggtgcaattcctcacgtcatcttataccggaacgggtgaatcgagagaacttctaggcggggagatatgacagtttcattttaaatcagagagaattggtaaatgttctctcattcttacagaggagatgatggcttccaaaccaatgtggtgggataaatgcctctgttttgtacggttgcatttgagtgagaaaatcctcaaggtgaagaaagttgtcatgcatgatcaaggccatttgatgctaaaagatgtgaatctttctttggagttgttgaattagatgggctatttgaaagaatctacttcttttccggactgtactaactccaaactgaaattcgtgcttgacagtgtagttcgcacattcaatttgaacactaagttcattgaagaatcgggaaagtaagagtcaagtacataattgtacaaactcaatcttaacaacacacaaattaaaaaataatatatgtatatatattcatttctgttgatggttaaacaactaaataattacgagttgtgctaaggcattttcatctgatattgtcgttttcatatgatattgtcgttttgtagagaaaagagaattgttatgttgttaccccattttttcaaaataaatattatcgcctcaatacagtttctcttctttcacactagagaagggctactaccactaccagactccctctctcgctctctccacttcttttttgtagatcttctctgtcgccggaatcacagtccttcctccttcacataacatcaccaggtaatgtatatatatatacgtgtaaaattaattttatatatggtgcttgttttgtttatcattatattaattgtatatcaatctgtgggttggacatttttacattaatatgatctctctatgatatgtacatataaatagtaatatttctggtccaggttcacttttttgtttaacgatggaagcaaagggtttgaattttccctagaggatcgtgactttcctaataaagccctagatgaaattatcagtaggttatcgctgaaaattatgataaggtgtagtctagaaagcaaactgtggaggcaagtcattaacaatttcatcacatattgcgagtataagtacttccctattaaggtgaaacgtaatcaaaaaattagttttcaggataggatattatctaacctctccttaactcctctcattggtgccattattcttgacattaaacatgggattgttttgataaaagtggacagtggtagaagaaagttgtaccagctttttaatcctgctaccggatagagaatcactttgccaaccatacccattcttgtatatcgtatttggcatttgtatgttgaatcgaagacggttaaagtcttattgcgttgtgagagcaagaaatattccaattggcaagcctacttatacaccttaggtcagccgcactagagggcttacaatatgagttcctattctaatacctactcaacttcgacttctatatatgcacaaacggtgcatttcctcacgtcgtcttataccggaacgggtgaatcgagagaacttctaggcgaggagatacgacaatttcattttaaatcagagaaaattggtaaatgttctctctttcttacagaggagatgatggcttccaaaccaatgtggtgggataaatgtctctgttttgtacgattacatttgagtgagaaaatcctcaaattgaggaaagttgtcatgcatgatcaaggccatttgatgctagaagatgtgaatctttctttggagttgttggataagatgggctatttgaaagaatctatttctttttcggactgtactaactctaaactgaagttcgtgcttgacagtttagtttgcacattcgatttgaacaccaagttcattgcagaattgggaaagcaagagtcaagtacatacatgtacaaactcaatcttaataacacacaaatatgtaacgtccccacttgaagacactattttaatggagtttaaatttattaattttctctacaattttagctttaataatagcaaaacgggtcacagtgggtcgatacgaacacgacatgattttttacgggtcgggttagggttgagataattagacacgagtcaaaaaaacgggtcgacacgcttgacacgaaatataaagcgggtcacataaaatatgacacgaacacgacacgatgacacgttttgccatccctaatcaaaagtaagattagactcagaaaaaacacaatgaacatataattaagaagctctaatcacaaggtgagcaacccaattaacaaatcatttgacaaaaattaaagaaacatcaacaatactactaaaggtgtattgcaaacaaaataataaataaattaatattatttttgaaataaaaaataaatggtataattacacaagacaccattttttgtaaaaaaaaattacatttttacattcaaagaatttttttttaatatttttacggttttccataaaaagaacatgaaaacaacaagaaaacta

SEQ ID NO: 87666 - DNA, 1429 bp, Cannabis sativa
tacaaaataacaaaaataaaactctattaagagacaatataataaaaaagataatgtgaaagaaacaatggtaaactattccatattaaaaaataaggacttaaaagacttaaaatacttatttgttaaaactgaaaaagcccaaaataaatcacttctcttgtccattggtcatatcacaaaactactctaaacaaataggaataagccataataaatggcacaaatgtcatacaaggcacaaaagccgtaaaaggcatcaaaaccatcaaaaatggtacaaaaacaagtgtagtcttattagcatatatactttaaacatataataatactagttaaatagctagtaaaaagaaacaaaacaaacatttatatataaatatataaataaatacgtatataaataataaataggaataataaaaagtattaaaaaatactttatcatatttgtataacaaaataaaaaatttaaattaataatgatgagtataactaaaaatcattattaaaataaattaaattaaattaaaaataaataataaaattaataatataaagtgtgaaagattaatgctaaaagtaaataaaatgataataaatgcacatgatagtaaagattttaacgaaaaaaaaaatggcaagcaattaaaaataaaaaaaaaattgaggataaaattaaaaactaaatcctaatcaaaagcgttgagatttagttttttcttgcaagaaaaaaaataaataaatatagtaagaataaataatataattaataagatcattaatataaggaaaatacgtaagtacagaatgcaaatcacgggtatgaacattaccgtagttaatgtcaatctcaactaccaatagcatctctgccctccgcgtgatgtgagctaccttcctcggtcattgtcgtcgctgctaactctgatcctccataacaaaaatcaatttctgagtctctgacacctatcaatattccacttacgcttgctgccccgactccaggcaaccaccaagaggtatcatctccttccaaaggcaactaggaaactatctctttcagacgccccaaggaaatcgaaataacaaactaaggattttagagttagtcccacattggttttgagctactcctcccatagccaattggttttgagatggaaccccattcaccttattcttaaattctcacatggtatcagagccacttgtgatccgttgtgagcccaaattgccactagtccaaaaagtcgtttgtgatccgttgtgagccaaagtgttgccgatccaaacagatacttccgctgtctcccctttaacctccatatgggacctttcagccaatgcgtgccaatttccagtgttggggtctttgccctatttcaaaatccacaaatttttcgacgtgtacacccacaaacttccc

SEQ ID NO: 87667 - DNA, 848 bp, Cannabis sativa
attataataaactagattataacattatcattatcattataatagatcttaactactcacagtactttgaaaattataatttaccaaacactcagctcagtttttttccacagttttgctacacctgctttttctcacagcacagctacaactgttttttcccacaggatttttgtgccaaactggcccttactttgactaagttattaactggtttagtccaatgctctgctccgtcttcaagagtaagaaaactcaaccatggatcaattgaatttttttgagcacacaaccatttatcaagtacgagatgggaagatacaacaatttcttcaatcaaagtgtttttcttacactaaaccaggtcattccttattgtccaaagagaagcacaaaccatagacaccatagtcgcacaggtattgtctaaaaaggaccaagctctcaatacccagtctgaaaaaaattctctcattacccaccaaaaaactcagctccagtcgctcccaacgaccgttcgcaagaggacactcagctccaatcttgcacgtcgggcaaagcacaatcagctccactttcttcaccctcaaatatgatttgtaggaagacaagcagcagtagctcgccacaaaagattcagaactttagaaggaactcagttgccaaatttggttccaaacatgtgaaaaattgctggcagctgcaacctcaacatcatgacgcagcatacaaattgaaattctctccatattaaatatcaatcaatgaatgaaaagaaatactgcactctttttatttatttttttggtaaattgaacttcactctgtttttaccaattcaaataaat

SEQ ID NO: 87668 - DNA, 563 bp, Cannabis sativa
gaataaattagcatcatcaacaaaagaaaaatgaaagagaaaagacttaataattacgtgataaataattatgaattgaattaaaaagttacgattataacattaattcaaagattaatataaataaaaagtcactcatgaatttctcataaaccaaaaattatgttatataatataatatattcagttgaaaaagagctcaaaaggatcttcctttttcttttccatcttttaaaggatgatagttaatataatatataataatatataaaagttttttttttttttgagaaataatatatagctttttctcactctctctaatatgaaataacaaaaacaaactgaattatccatgtgtgtagggcctacatgagtcaaaatatcaaaaattacaaaaaatatatataatcacttgatatttttcaaacttaccataattttctttcaataaatgctcaaatttattccttttttctaaggccttcaaaatatgagcccagcctaaatatattatataataataataattttagagtgtttaaactaacatatttacaaaa

SEQ ID NO: 87669 - DNA, 922 bp, Cannabis sativa
  modified_base (36)..(74): a, c, t, g, unknown or other
ttttcaaaaacaaattttttaaaaacaaaaattttnnnnnnnnnnnnnnnnnnnnnnnnnnnnnnnnnnnnnnnttaccaaacggcaccttagttaaatataacaacagtggtatttttgttaattgatatgatttaatttatttattttttattaaaaaattaatataataataataaatatttttttagtgtaatctttagttttgtggttggagtaaaaatactttttaacattaaatatagtcatagtgtaacaccaaatttaatgtgttcttagaaatgctctaagctcgccaaactaactctttatccgatcgtaatgcatttctagccaaattactagcaatgcaattgatatttataggtatatggtagagtgatacattaggaaaagttgataaagtgctgttggtctttatgatgagtcctgaaagagccaatctatctttccagttatgtttcactcttgacactaaatgaaggtagttcattgttgtgcatgagagaggtatgcagatggtagaacactattgtaaggcatgagagagagcttgagctttagcaaacagtgaaagatgagttctcaacgaaaggagtagacaggcatgctataatttggtcctcactattccttataaccgacccaataccttttttgtggttatgaacatctaaggcagcatcaatattcaatatgaactcccccaggtggagtttaggatagtctctaaagtttgtagttggagttgactttgtagtaggagctactgcttgtgcatctattggtgtggattggcagtttggttgaagaagttgggcttctttgtagtcctatattaaagctttttaaacaggaaagacatcttctagtttgctagagggcaccctctgtatgctagaataaacggtctggaccaaac

SEQ ID NO: 87670 - DNA, 684 bp, Cannabis sativa
tagctaaaaaactaaaccggacgagaataagcagaaaatttaaaaatttacttttcattttgcgtcttttattaacacttgaatattgtgttagcgagcttttgaaaacgacacaaaatacaatagtaagagataataacgacgcaacaaaaagtgaaatcctaaaactaaacctaaaatactgttcagtttcacgaaagaggcagctctctctcacactcttgcttcgatgaagaagcagatgatgggtaggatctccactcgtacagccatggccatgtgttgctccttgctctcttcagcatttcctctattcattccttttaccttcctggtgttgctcctcgcgatttccaatccgtacactgcttctctctatactattaattcttactccgtttcctaactctatctctctctagttctctttagatttaatactcttaattgaaatttatttgtttatttgttttctagtaaacctaggttggatctatcttttttttctttgatctgttctgcttcagttccgatctatgttaaggttttagggtttaaagggatgcgggtttttctctgcagttagggggcgtcatcactgttaaataccaaccatcagatcggagaagagaggagaagttcactggcaaaaggtactgacaggctcattcctttcatctattt

SEQ ID NO: 87671 - DNA, 1152 bp, Cannabis sativa
tgaatgcttatcaaaataacatccaaacaaaactcaaatacttcactttatgaaaattgtgatacttatgtagatgatatcacctcgaagcaatatatatctttttcttaaaaaaaattcacatttttttaagtttttgtttactctattttttctagaagaaatattgtttttttagttttttatgtacttttttacctatatttttggtcatgtgtttgttcttttcaattttgttgaccattttttttaattttttttttctttttttttaataaaaaatctctatcatctcatgtactattttttgtgaaaaaatatatatttttttaatcatttgtacatttttttacctatcctttttctctttggtttttttaattttgtttgctaattttttttcttatttttttattagtaaataatagtgtagaaaattataataagtctgataatgaaaattaattacgatgtttattttctgttggaataaatattagaataagtgataaattcacaaaattatctatattttaatttttattcttatataaaaaaaagtattcgattcattttacttttattttatttaatatttatgatataattctcattacatagcttctccaatgtaataaagattccattacataacgtaatcaccattacgttgtaatttcattacatcacttttaaaagaaaaacgaagattataatagcggttttgattccagtacaatctccattatacatcaaacaccaaacgtaaccttacatattatatatatatattttatgttattttattcgtacattataatagaaaaaaatcacaagcttacattttaacagcatggcagatgatacactttaataagaataggtattacactgttcttacttaaatgtaactgataaaaatatactacaaatatgggctttggaggcggtttttaaggccgttcagcgtcagttttggcgaaattcgctaccgacgctgatcttggtgacgctaaaggggtatgaaataaccgtcgccataagaaccctacggcatcggttattctgaaataattgaggccatagggaccctatggagtcagtttttataaaatgaccgactccataggggtttcctataattttttttca

SEQ ID NO: 87672 - DNA, 1014 bp, Cannabis sativa
acaatatgaccaagtctcaaacataattgacattgagatctattagaaaaattagtaccaacaccaaacctgttgcctctgttgacattgaagttacctctcccagggatacttgtattaggactggagttgaatctgacactaggatttttgttgtactggagttgattactgaactgtgagtttccatgattgaagggcctgaatcttcaaaaagctaggttagctttagcaatggactccagatcattcgtaaccagattggcgctcagatccacttccttattggatttttcaatcctagattcagaggcaagaagcaaggcttcgatctctccgactgtgtaattttcaatccttgtgttggatgatattacaaacgtatcatactcactcggtagtcccttgaatatggcagccacatgatctctatcacttagaacttcaccaactgaggccaacagatccacagtttgcttaaccttgagaaggtattcattgaggctcatggatcctttctttagattctgtaacttagtcctgaactccagaatttttgacgaaacctgtaacgtgaagtgcttttccagagagttccagatctgaagagaggaattacatccaaccattcttgttaggaggctttcagtcatggaagaaagaagccaagaaacaagaagttgatcttgaacttcccattcggagaacacaggattgacacgattgttttcttgatctgcagtgctcaagaactcagctggtggtgattctttaatgtacttcagcaatctgtttccttttattgcagctaacacttgctgcttccataaaagaaaattatggtcattcaggcggatcgagatgttgtggttgaaggtcactggttcttgattatttcgtgttcgcgcagggactccattaacaccagctggaccaggttgattaccattaccagagtttgttgcagcgttcccaacagtcgccatgtttactcccaaaggtgggaactgctct

SEQ ID NO: 87673 - DNA, 867 bp, Cannabis sativa
  modified_base (818)..(826): a, c, t, g, unknown or other
gaggtcatttaacactaggtgtagggcccattagttggcccccacgagcttgagtcctctcaggctattgctcgaaggtaattttcctctgagaggtctccatgctaggtgtttgtttatttcctacttggttaccatgtgtaatggtggcattctgagcattaagagttttgccttgggcactagttcccacatgaccagttggtcgacggggagtctctctcaccaactcagaaatacctctacgggaagtagttttgcaattagagagataagcttctctaatctattgagacattttagttctctaatgttcccactcaacgcattgactttcgatgttcctctaattttccacaaaccagtcctgaaactgttcatgttccttatcgagagagtctcgcagctgttattgccagtcagccaaagtttggttaagctaagagacctaaggatcgcatcgtcaaggtcatcaatctccacaggaggttgatggcattttatgccctaaataaaacctatttcaatataatcttatttgttattaatagaagattagaagtcatttatgtttacatgtagttattcatgtttatggtttgatatgcaatttctgttaaatccagaacatatggttattaacaattacagtgatgtgtaacacagtggaaggtaattgtgattatatgcttcaaaagtttatgtctcatgatttatcagtgcactggatttacactaatctggtagtcaacgaaaaagtttacttaaaccttggataagtgttatgttctttccaggacattggcaaagtatgctannnnnnnnngtatggagtatacattagattgggactgatattgatcttgg

SEQ ID NO: 87674 - DNA, 504 bp, Cannabis sativa
atagggcctagttcaagtcttgttcagaaattaattagtgatctgaattcatccttttctcttaattatatgggataggtttactattttcttggagttgagattcatagaactcctaaggatatgtacttatctcaaagtaaatgcatcacaaaactcctagttatagttcatttggagggtgctaaggtgtgttctagtcctagtagcagctctctcaagcttgctctcattgaaggcacaccatttgagaaaaaaactctttacagaggtacattgggtgctatgcaatatttaacttggaccaggcctgatgttgcatcatcattaacaagctttctcaattctttcatgctcctactaatgtgcactaggaagcttgtaaacgattgctaagttacttgaaaggcaatatttttgaaggtttgctccttaaactagcttctggaatgtctcttgaagcttattcaaatgttgatcgggcaagttgtcctaatgctcgaa

SEQ ID NO: 87675 - DNA, 1092 bp, Cannabis sativa
tatttaggatattaagtaataggatattaagtaacatacatggcagaacatacatggcagtaatggcagtaaatctagatcctggtaaaacataatccaacactcatgcctatatataggcctgttatttcagcttcaatatacaataacaaatcattctttctttcttctctgtttttagctttaagcttctcataagtaacaataaacaaatatagaattttaaattttagttgtagtgcaaatatatcataaaattataaaattaaaatataatacagaactactagataaaaacaaatacaataccaaattttttagaaaatacataacagaaactcaatcaccaatattagtgctccacagaatctttgttccttctactcaaacctaataaaaaaatgcacttatataaatttcataattattttaactgaacttaattaacatatgctatatattacaatgttgatcttgatatatatataaaaaaggagaaaatggttaggagtaagagaagaaaaaagagagatctataatattatattatcacatatctattctatataaaatgtggcaatctaatagaatttctagtttaacaatattttttgattttttacttaattttaacagaatatctcaattgcttaacctaatattcttattaattttataatattattatatatttaaaaataaaaattatataaatattttatataaaaaatatttacttttattatatatatttaaaaataaaaattattacatataatcatatttatacataatactagctatatgttacgtgtcgagccacgtaaatattagttttacttaaggtacattgtcataaatcaaaaaaattatctcatctaaataaagtataagtgcattccggcataagcttcaaactgggaaggactaacctgttcactatggtgcaaatgatgtcaacaactaattaagatgcatcgaaattcagatatcatactacataacatctatctgaatcaagaacttcacctctctattacaacaattacagaatatgatgtcatttccctgcttacagtcaccaagtatcct

SEQ ID NO: 87676 - DNA, 2043 bp, Cannabis sativa
caaacaaccaagggttacaacctcatcctattgaaggagaggacatcctagttatttcgggagggccacatatcgtaggggagagcaataacgcccaaaagagatatgtgaaacagataaagaacgggcagtcggcattcaccccaaaaccttcgaagaaggtgaaaattgaggaacctccaatcatatccacagaggaagacgagaaaaagccattggtgattaccaatcaactcgccaataaaaggataaagatggtgttaataaacaacggaagctcagtaaacatcctttataaggaaacactgaggaagatggggctcgaaaaagccaaattgaggacttgtatggtaaatctgtgcggcttcactggtgacagcactgccagtctgggcataatcgagctcgcattaaccttgggcgaggcacccctatccgccaccattatgcaagacttcctagttgtcgacctgccatcggcctacaacatattgttgggtcgtccagcattgatcagactaggggcagttagttcgatcaagcacctatccttgaagttctaaacaccaaaaggtgtgggagtggtgcagggcatagagttacaacataggaaagtcggtcatcatttaatggcgatcttggtagaagaaagtggaaacaaggatgaggatcttgaccccgggttcaagattaaagaaacttattaaaaccaattgaagaattgaaagaagttattctcgaccaaagaaatcccacaaagtgtgtttacatttggaagaatctggaagagcaactaaaatagcagctaataagtttcttaaaggcaaaccaggatcaattcgcctggagccatggagatatgatagggatcgaccctaacattatctgccatcatttaaatgttgatccaaactacccagagaagaggcagaaaaggagacccctggattctgagagacaaagggcactaaaacaagaagtggacaagttattagtcaatgactttatatgcgaggtgttttatcccttgtggatagcctatccagttctcgttccaaatcctaacagaactcggagaacttgtattgatttttctgatttgaataaggcgtgcccaagagattattttccactacccggggttgaccagttagtggatgcaactgctgggcacgaccttatgtcatttatggatgcttattctggatataaccagataaaaatgcatgtcccagaacaagagcatacgagcttcgtaaccaacatgggactctattgctacaaagtcatgtcgtttgggctgaagaatgctatggcaacatatcaacaattggtgaacgagatgttggcaaactagatcgggcggaacatggaggcttatgtcaatgatatgttggtaaaatcaataaaaagtgggaatcataccccaaacctcgcggaatgcttcaaaatattaaagaagtataacatgaagctaaacccgaaaaaatgttcctttggagttttcttaggaaaatttttgggattcatagtcaaagcgaggggtattgaagcgaatcccaaaaaaatcaaggcattgatagacatgccatcactgaaaaggcctaaggaagtacaagccctgacaagaaggatggttgcacttaacagatacatttcaaagtcaactaataagtgtttgtcgttcttcattgtatcccgaggcaacaagaaattcgagtggacaaaagagtgtgaagatgactttcagaatataaaaaggcatctagcgacacctccaattttgtaaaaccaataacttacgagatgttacttctctatttggctatctcggaagatgtgattagtgcagctatagtgcgagaaaagggtaaacaccaacaacctatttactatgtaagtaaaaggttattaggggcagaatctagatatcccctcttgagaaacttgctttgtccctagtccacgcgtatcgcaagctccgaccgaattttcaggcacaccccataaaggtaaccttttactatgtaagtaaaaggttat

SEQ ID NO: 87677 - DNA, 787 bp, Cannabis sativa
tagtgtatatctcaagaaggaggactggtggagccacgtggcttccatccacgcaagttggcattggaagaagcttgtggctctgaaaaaccagctgaaagacctcaccaacattcagcagtttacaagccagcagtattcaatcactgaaggttacaaatggtttaccccgattggcatcaagaccaactggagtaatgaggtatgggctcgattgaacactcctaaacactgtttcatattgtggctggctatgcataatagattgaaaactaaggagagactcatcaaaatcggtctacaccttgatgagaactgctgtttgtgtcattcagatatggagacaaatgagcatttatttttctgctgtcctgtgtctcataactgtctgcaggaggttaaaatgtggctcggctggcctgctattagcagcagtcttccacaattaatccggtggataagcaggtcaaaaaccagcaagtttaggaaacttgtgctggctgcagcatgtgctgcgttggtctacaaaatctggacagcaaggaacatattgatttggagaaaggaagagtatacagttaatagattggttgaggaaataaagcaatgtatcaaactaagagttactatgttcatgcctaagaaaactaagaaagaagatagaatttggttccaaagtttgtaaaaattgttgtaattagccattattattgggcctcaattgaggtgcctttagtttgtacaaattggtttagagcaatacaatttcactgattcatcaaaaaaa

SEQ ID NO: 87678 - DNA, 643 bp, Cannabis sativa
atataaatattttacaaaaaatagtaccttatgtaattattcttacatataattactcttaccactacaactggcttcgaaatgtatcccatatttttcttgtattgggccaaatccaaaattgtggagttgagatttccaaaattgcactacacattatgctgacacatgtacatatttataaaattgttatttatataaatagttattaaatcttttacaaactagtaaattatctattactatgttgttcattctttaaaaggactgtagtaacctatatatgatggaaaagttgaaacctttcagtgacatatactttgtcaaacttatgcatattaagatataattgatatttgccactaaaaaaaaaaataagtagctttttctttagtatgagaaaatattagtagctaccttataatagctaactttgtaatttgtcatctgaaaatttgggacttcgagcccagttatgggatatatgggtctgtattgaaggcccagtatgtaattatgatgactctgcaaagtagatatcttcttcttctttctttgtttcattttttactttttttatttttgagaaaggattagatatttatcttaatgaggagattacatttttttttcaaaaaaaaaa

SEQ ID NO: 87679 - DNA, 561 bp, Cannabis sativa
cctagagtcactcatccacatgcagcacaaagagttcttcaatatgttaaagggactcctggacaaggaattttctttgctgccaattctgaagtgaagttacatgcttatactgattcagattgggcagcttgtctagatacaaggaggtcaacaactgacttttgcatttttgttggaacgtccattatctcttggaaaaacaagaaacaacacacagtttcaaggtcctctgcagaggctgaatatagagccatggctaataccacttgtgaagtggtttggttgctttctatcctcaatgagctacagattaaacatgaaggacctgctttactatattgtgataacaagtcagcccaacacattgcagcaaacccagtttttcacgagagaaccaagcatatagagattgactgtcatctagttcgggaaaaggtgcaataaggtgtaataaagacagtccatgtttctacaagagatcaagtggcagatatcctaactaaaccacttttttctaaccaattcgacaactataaagacaagatgggattgaagaac

SEQ ID NO: 87680 - DNA, 1275 bp, Cannabis sativa
catcaagagagaaaattagaaaaccctaagtcttgttttcttggaagatcattacccaaaatcaccacaaagatcatctctacaaaatgaattaagatcatcactatgaaaatggattaaggtacgcttccgctatttgagttttttctctttaaatcaacaaaggtattctttagatctttggttacacacttataattatatgtaatatgtttatctatagaattaaatcttgttgttgtatattttttgtgtgttaaagaattttaacaatttactcaaattaaaataattttttttatatatatatatagtagacttaaattgctaagaaaataaaagatcaaggaacattcgacaataaaaatacgatcctactcccaaggcatataaagcctaaaatgaagttaaacttcgagagccttacatacatagtttaatcatttttaaaataacaactctaatactttttgtgtagtggtgtaatacttttataagttcttaaaagtttctagattcaattgcgcatatttaatatttcttaaaaaaaaaataaaatatggaggttggaaattgatactttaatctcctactttaaaataaggaagcagggaatgagagatgtggcgaggtgttataaatgtgctttacatttagagaatgatgattggtttaatgccatttggggttgtgctcagattaaaaatctttgaaaacttgatggctttaggaagattgttagaaggtgtgggaatgaagatcctattgactttcttgactgtattgcaagggtgctacctaaggacatgtttgatttctttgcccttaatgtggcaggtttggtatatgtgtaagtgctttatatccttcatttgttccagcagtggagcgggctttgaattggattgctgattatttacacgaattttgggagaggaactatggagggcgactggttgtagagaggccaaagtgtagatggaagcctccagggcttggggaggtgaagattaatgttgacgttgcggttagtaagactaatggttcctgtagtactggcgaggtggtttgaaatcgtttgggggaggttattgtagcacaaggtatttttttgagtagatccttttctcctattgttgttggattattagctattaaacatgggattgaattggttggtcttttatctctggagcgctgtatgatttcttctgattgtagcttggttgtagctaagttaggaaggccgcctgagttgactagcgaatgggattt

SEQ ID NO: 87681 - DNA, 1416 bp, Cannabis sativa
tgataattgatataaaagtttattgaattaaaattaatttttgattcaactcccctattcacatattctatttttgttatattttttaattgtcatcaattgtaattataaaaagaagactataagcttttctttctttcacaatgtttctctaagttcttacacaatccaaccaaattaaatcccttccaagttttggtgtctaaagttaataatttattgttagagctaaaactattacagtaaattgaagacgtacgttagaaattaagaaaaataaatagataagagttgagagtgaaaaagtaacagtaaatgttttcattgatcataccaattttgatatacacacccatgaataattatatatatatatatattatggattgggccatgagaaagtagttgattattggtggtttgtagtttggttagaccatacaaaaactttgggaaacaatctgtgcttgtgcttgggttggccattatcattatgatgatcatgatgattattgtttttacttcctaacatttctgattctgttctttgtagtatttcccacatcacttgaacatcttcataaccacacatttgtacatcatcatgcagcttcaatagtccaacacctacaaaattaattcaccccaaaattaatatacaaaacatatttgcataacaactcacaattccataataaagaaatattaattcaaaaaagaatgtagtgtagtgtagaaggtcttttactaattaatatataattttattttttttttgcaaggtaagagcgatccgtattcaaatgatgagatgaatattctgcgtgatcagtggattgaatacgttcgagcacaggcagtgcaacaagggctattacaatgatctctttctgtttttgtttatacttaatcctaaataattagtgccaatatataaatcatgtagggaaaactttactatataaatcagtttctgttttagtttgacaagtgacaatatatatactttatcctaactatttttttcctttttttttttgcaatctaatgaccattaaaaattgtcgttgaaaactatgaaatttataattagactgaaaagtttattataggtgatggtttaaaactgtgtctaaaatattataggccacagttttaaaatgtggcctatagtatagactacggtttaaaaccgtgacctatactataggccacagtttaaaactgtgcctaaaatactataggcgacggttttaaatcgtggcctatactataggccacggtttaaaaccgtcgcctatagcgttcactataggcgacggttttaacctgtggcatatactatttttccgacggttttaaaccgtcgtctattctacctagtattcgcgacgctcgtataggcgacggttttat

SEQ ID NO: 87682 - DNA, 710 bp, Cannabis sativa
aggaagctcttatcatgatatgggactttaaagaacaaacacatcacaacagaatcattccacactgcaaagagcagataataatcatagaaggaaaatctatcacacaaaatacctcattactcatatcaaaatacctctaaaacatacaccacgttgtaattcacaatccacaatatcatccattaagtcttgagacatgttgatcactctccaagaatcagaacccaatgtgtatacctcaacttgacattgttttttgtaactgagggaaatggaaacacatttgtatttgttgtttctagaatcgtgttcaaatcctatgtactgatgacgaggcataaatgtaacattctttggttttgggagaatcatagattctttcaaaactggattacacaacaacatagttacagtcttcttgaaacaataatttactagcaaaatgagtccatcacagtgatatattctatcccatcgattcatatccaaaagtggtatagtcagatccgctgtgacagttcttaaatgatccttcttactatcatcatcatcgtcaccatggataatagtaagcaatgggtatgtgatcaagcgatgatcgtcatggggggaagggtctttgaaacaaagtaaggacatagaagattggtttttggtattgaggaggtgcttagctgcaaattttggatcgttgatgaaagtggaaa

SEQ ID NO: 87683 - DNA, 1264 bp, Cannabis sativa
aagattatggtagctgttcatttgactttgctatcattaggcacatgagatatattattattattattatgcttttttttttaacaatttaacattttaggaagataatccaaatttaatacattcaataataaaaaataaataattaccatattgaagggtcttattattggccgaacataaaaaccgtttacagctaagacccttattatgggtttgttttgtttcactatatcgcatcatttttgaaaaaataatcattaataataaaattatgacattaattgtgctttttgatattaaaacgcattgcgtttaaatcataaaacaccaattaacataaagattttttttttgaaataattaacataaagattttgatttcttattaggcttcctcttctcagctcgacttttatgaaaaatttttaaaataaaaagaaaattaaaaggttatactcatgattcatgatcatcattttttgcataggaagttcatgatcatcattattgttatataaatatatatatattttttcatattcattgaataataaagataaaataaagttgaatgagtttatgttaattcgaatttcctatgggaattagtattacttttttatataataaaaataatattagtgggcagccgatctagtatagtatggtccaaaagattatgtcaactttattcattgctcaagaacggcaatatattcgcttttttgttttcttttaataattttgttttattttattatagataaatattactttatgttttgtaaaaattaataatttttttttattttgttaaataataaatagattatatttttaaaataatataaaataatattacgagcttaatttttatcatcttatttaaatagatcaaacaactcgaagtcaatttttaatgaaaatgtaatcaatttaattataacacattcagttcaagttattgttaaattttgtactatttttgaaaaatataaggttcatattattgtttaacaaaatgaaagtttcaatcgataaattttaaaaaatataaaatctaaaattgtatttaacttttattataatttcataaaaacttcaactacgaccattattttagtttttatttgcaggagcctctttattttcttacactttgaggtactgtaacgcccgtattttataataataaactcgaaaattatttttaataatttatatattaataatcatatagatcgggatcccgagtatcaaa

SEQ ID NO: 87684 - DNA, 688 bp, Cannabis sativa
cgtatactaaaatcatgttatgtacacatttcaccaattttttttttctttttgctattttacttataataaactaataaatttttttatgttaagtattaaaaattaatatttatgatgtatttgttaattctactacaataaaatgtgcaatacgaatttccttttatatcacttctaatatttaaataaaatcatggtagctaatttatacaatgatagtttttttttgcatggtggtaagtacttaacaatgtaatttttttgtcacaggttcaaatttcaataataattttttttaattttttttagcctactatatctatccttagcactcaataacatttattattatattaatattattctaaaattactctaagtatttaagggttatcaaaatatatatataaaaatactcttataaaagtaggttaaaaaagcataccttataccaaaaatcatatacttgacttccgataaagtcattccgataaaatcctaacaaccaagtttaagagaaacttaaatcaaataattttatcctaattttactaaaatttcggcagcataactaatgaatataaaataataacaaaagacaattcaaaacaatataaaataatcacaataacatttagcaatatgaaaatttaccactcatctgaccacagtacatgtattcgca

SEQ ID NO: 87685 - DNA, 548 bp, Cannabis sativa
atatctagcatgtatgatattataattttaatgaatttgttaattgctttcaaaaaaaaaatatattaagatcggtataatggtctaagttattttacatacatagtcgaggttatgagttattaatggacataatgctattagtataaacttttgtatactgatctaaggtattttacctgcgtagtagagatcatgattcataagttaaaaaaattaaaatcaagcaatctcacccatcttacaaaaaaactcaaatccattttttttctctttggttttttggtccagttttgaactttctcttattagagatttgaggatttgtatccttattttagttaattactatcatttatggtggtattgtacttgaaggtgaccataattacgatggacgtatatgcctcggtcaatgggctttgttgccatttgctcgcatttatttgtattaatttgcttttgcttaatattgaagtttataagtgaaatgctaaaggacattagtggtgcttagtacacttttatgtgtcagtatcgctattggt

SEQ ID NO: 87686 - DNA, 588 bp, Cannabis sativa
gtatcaagtcagggaacaaggaaagtagtctagatatgactcagatgaggaactcgagccattccatccaaacatcatgaatactccattcccccaggaattcaagaaccccccacgtcttgtcatatgatgagaccacaaatctagtctcacatttgaataatttcaatactatcatgtaagccagtaatgttacgaacaatctacgctgtattttgttccccacatcactagttggagtagcgagcagctggttcaacaaatttactcatccatcaatcaccttttgggaacagttctcaaatgacttcaaaaaatagtttcaggccgcaagggatagatgacccgaagcatcctcactcacaaacataaagcaacagccgggcgagacacttaaggcttacttaagtcgtttcaacacaactgctgcaaggctgaggaaactagatgatagtacccagcttactgctttccatgcagggatcactactgatttctatactgctagaggtgagctatgggatgacctacaaggtcgcccagtaaaaaacatcactgagttcaatgaaagagctcaagtatttgttc

SEQ ID NO: 87687 - DNA, 697 bp, Cannabis sativa
cttgactaataattctataatgaaaggctaatctagaagtagtaagttattcttggtgtgatccaatacactcaaaaactactggtcatcacttattctttttggttctaatcattaatctcttaaactggagcttaatagtaattagaataacatatctgattttgttaataatgttgagaaatgagattttccaactttctattgctggtgtacagagtcttattctgttctttgctacatctaatctcactttcactggtgtgacatgtgtccctgtggtcctcacatgtaggatacattaatccctaggcattttgttagaatattctgctttatgtaatcttccttgggattaatgtatacttagaaaatgccttttgtaaaattgaacatctccaatctttgcctgatattgctagtctacaaaattcactgcgatatacttagaaaactgctaataaaattgaacatctccaatctttgcctgatacattgttatagaaggaagaagcttaatggcatcaaagagccatggtcaaatggcttagaataggtgatgaaaacacaattttttcccataaatttgcttcttttataaataaataaataaaaaaaactaaaactatcaagtactaaaaagatgatgacattaatgttgttaataatcctgatagtatttttgggaaaaaaatct

SEQ ID NO: 87688 - DNA, 1015 bp, Cannabis sativa
ttatttttaaacttttgtaatgaccttctattataatcactgttacatcacttttatgaaaagtgattacactctattttcattacaattactcaaaatgactatcttacccctactttatattttttttactaaaatagggataattttgtcaatttagtacttattcaaatattcatttgaataacaaactaagcataacaatcgattcctattataattcttattctattacattactattacaattaccattctatttcatcaaactgaacaccacctaataccaaaaacattatctcgatcaaaaaagtaaagtaaaattatgtgggttttaacgccctttctataaggtttctaatccaccggaaaactgcccttgcctttttgcaagctttattgatgaattagtgaacctaagagtacaaggttaagaacaaaagaactagctacaaaatgctgtcttactcctttatgcaatagttcacaatgggtatttcaaattcaggcacatgatttccttttacaatccttcaatactccctcaactatatctaaataattaggaaacaaactgtcctttgtggttagattttgttcagtcataattattatgtaataaagttatataaaacttcaaattattctactaaatttttacttttattcttttaagcaaaaataaattagcattgctcgaattaatatatgataattcttaattaattagtttattatatatattattatagaattaattgcggtaaaaccctcaatattttcattttacttgcacttactcccaaaactcaatttttggcggtaaaactcacaatacttattttctgttagcaatttaacatttccatccatttgaagtgttaagttccatgctggactgtccacgtgtatatatacgtagacacaacatacacatagcacaatttaattggtccatgtaaaaaattatttaaaaaattaaaaaaaaaacaaaattaatttaaaatttaaaaaa

SEQ ID NO: 87689 - DNA, 2324 bp, Cannabis sativa
tctctctctctctctcaaacctttcacaatcacgatttttactcaagctttcagtggtttgattaccatggactacaaatgtgatagctatatataggcttgtataagttactaaaattagctctaattttatcgtgactaattaatgccgctttaaagtctccgagtcagctctagcaacatattccatgtcagcttcagtaacgtgctgttagtatggacaatatagaagagtcaatcacgacgagactatttggatgaatacaagtactccagatggacactcaagtctgacaacaagttatctggaagtacgtctcctaactcatgacaagctatctgacaagactttccttacggaggataagctatctggaaggatcatccagactggccacaacttctcaaacaaagctttccggatagacaccaagcttcccataacttatttccagaataacaactagctttttgaatggcaagacttgtaacaataatcaacagttcacaaacatctttcctaaaaataacaagtaaccacttaatctaatagagtggtgtagcaacgccattattaaaactataatcaaaataaaaaaataaaaaaaaaacaaattttttttttcataaaataagagaccaaaaatcaatccaaatctttaccaccacaaatccgaaacaactcaacaccagctccataccttttcaccaacacttaaaattaaagtgatatattacatatcattctatataaatagataaaattatttatttacaactatacttgatttaaattgtacactaattaaaaataaaaaccaaaataaaaaattgtacattatttcttactaaaaaacaaattgtgtactatttaattaaaaaaaaaaaaactataattatacacctcatttattgtcaaattaaattttgatttcttttcaataaataaacgtaaattaaaaattttactataatctcatatataaaaagcttggatatgaagaattaatttaaaaatacttcatatttttttatttatatgtactaaattatattttttaaattttttaggtcgttaatttttttttaatttattaaaattattggatttaaaggtttttatctaattttagtaatatgacaattgtccatataatatgaatcatgtctctcaaactttaatatttataaaattatgccctctaaattttaacatgtatcgaattatgttacctaaattttcattcacatgagactttttttaataaaattgagcaaaaatttttaaatctaacaatctcaatagtttaaaaagaatttttaatgattaaaaaattaaaaagacataattcctcaaaatctaaattagttatatttttatattgtatattattttttttttactatggttgtacatcaattgttaggtcatcgatccccttcaacaatgaatatcactatgctatcttttctactacgttcatttccttcttcttcttttatttatatatatttctgcatgcaagtagagcccctcataacaaaacagtggttggtttaacaaaccaatctaataaatacaaatctatggattgatctgaaaaagcaagtggcgagcttactggaaaagcatctgaacacgtgtaattacatcattattacaacaattgaattagctcttttaagttagtgagtccgaacgccacgtgtcgatcatgcaatgtgtcgtcatgttgtgcgtcacgaacctctataaatatcttccaaacaaccaagatatttatggttatggccttggccttggggaagaacaactaccaaagtatatataatttcgaggtcttttatttatttttaaagtagcacctttctttgtattttttctcatttttctttacaacgaatattgttattattattattttactgagattattgttaggggtgtatctttagtcgtatattacaaaagtatatttttaagatgtatttataattaatatatactttattgacagtttatacacagtttgaacaagatcctaacttactagaaaattctttaaagtaaatcttcgtaatttttatttttgtacttatagaatcgtgagcagtaagtatgatttttttttttataaaaaatgaaagtttagctccaattttctcctcaataaatatgatctaacaaaataagaaagggaaatttgaaattctatgcttaaaataccatgttattttttccctaaatgcaaacttattaaaattggtaatatatgaccaatttaccaattttcctaatttacccctctcatttgaaaccatca

SEQ ID NO: 87690 - DNA, 1072 bp, Cannabis sativa
ataagatccatgcatctatcacaatgatcagatttattgatatatgttgatgatattctaatctttaataaggaaaaattagatataaacaagttaaaattgaaactcaatcaagagtttgaaatgaaagatcttggcactagtaatcaggctgaacatttagacccgcaaacccaaaaaatccgaacacccacctcgacccactgccaaaaaaactgaaaaattaaaaacctgtgtggtcaggtcgggtccaacccgaaaataccccacacgggtttcgggttcgggatttaaaaatgtatatttttttagtcgggttctaacccgtaacccgaacaacactaaataaaaaattaaaaatatttttttattacattaaaaataataatattaattattaaaatttataacttaaaattaaaaaaataataatattcacttttactgtactgtacattataactatttactattcattcgaccaaaaaagcttagaagaattcaagaaactcccaacaatggcggttgcttcttctccagcggggtctcatcccagcagtcgactcaatccggtgagcctcatccctaacatctaaagccttctctgccctcttccatttttctgaaatttgacagcccgtgttcgcccgtgcccccgctggtttctgcccgtgttcgcgtgctcattactcattgactgccgagatatgcttctccgttcttgactcttgttaatgttatatgattttataatttatattttatatacattattgattatttaattaattttatataataattatagtattatactataactctggctattcgctactgaaattattattaaggtaaaagaagtgtagaattattgaatttgagaatgagtaagtcaatatataagaaagagaaaagaaaaccgtgaaaaatgtagttacttgagaattgaaattgggttccaactaaattcactattcaggcccataaatatgtttattataaaagaaaaaagacccaaaaaatgttaaaaataaaaaagatggaattttaaaaattaaatttcttgagc

SEQ ID NO: 87691 - DNA, 517 bp, Cannabis sativa
accacaaacaaaaaaaagattcaaattttgaatttatagatttaagtttctctctgaagaatttagtttatgataaaagcttaaagcactcgtatcagcttctgtactctattttttaaaatagttcacaaaaactttcttttttttttaatattttatcataaacttttatagtacaacatatatcagcttctttattttttttctacattcatttaaatatcactatataaataaaatacacaataataaaatattatttaaaaaatgaatagtacttctctacatatagagaagtattgtagtattctttaaaatttgagctaaaatagctcataactaatgtttttttgttattttttcacctttttcttctctattctttcactaatatagctcatctaatattgtgagtgctcttaaatatttttattttattggccacactgttgcttatcaatttaatatttattatttatgctttattattagaagttttttcatttttacattttaa

SEQ ID NO: 87692 - DNA, 725 bp, Cannabis sativa
ataaacaaaattcacacataaatctcattatacattatgaaattcaaacccataaacaattcagaattatttcaaagcttcttgttcattaaacaattagaaagagcaaaaaaatttattttgatattccaagtcaagaaaaaaaaaaccaagttcaatcataaatatcaataactctagctttaataaacttgaaataaatcatgactgtaattaaactctatcgaaattaaagggtcaaaatcctaaagttaagagatccaatgatagtgatctatatgagagagtgagagagaagagaggttaacctaagtaataaaaatttgaaaagaacaaaagaaaaaagtacacattgaagtgagcagaatactaagtaaaaccaaaatttccagcaaatttaggcaaaagtttgaaattgaatgcgtgccagctagttagaagtacaatgagataacattagtatgataattttaaagataaactactatgctcctatctaaatattactaagatattttaattgtatatattgaataactaacaagggcaaaccaacaattagaccatgcaacagaaaatcataagagtcaaacaatgaaaaagcagaaaacttttcataaaaaaatacatttgacaacatatgcaataacaaaaaacaaaatgaggagaaacccaaattaaattaagctaaacaattaagaactccaaaatcttcaatttttttc

SEQ ID NO: 87693 - DNA, 539 bp, Cannabis sativa
cctttccctcacgaaatagagatctagctctatgtgctttgtcctcgagtgcaaaacaggattggcagacatcaatacagtactctggttgtcacaccagatggtaggaggctgctgcaagtgaagatctatctctgaaagaagagattgaatccacataatctcagctgttgcatttgccaaacttcgatactcagcctcagtgcttgagcataagacagttctttgcttcttagaggaccaagaaaccaaattagggccaagatagacacaaaaccctgatgtagatcttctatcatcaggatcggatgcccaatcagcatcacaaaaaccagtgagagagagattagttgctgttgtgagatgcaaaccatagtcaatggtaccctttagatatcttaaaatctttttgacaaccttccaatgtgattccagaggagtttgcatgaattgcgaaactttgttgacagcaaaagctatttatggtcttgtaatggtagcatactgaagagtaccaacagtgcttctataaagataag

SEQ ID NO: 87694 - DNA, 4081 bp, Cannabis sativa
aattccatttaaaaataatctattatacttctatcttattattctttgtttggaaatgaatttctatcctattaaatacatttaattttgatttgtttatttatttaaaatttataaaaatttcaaactttattacctttctttttctttcaatatatttattactattaatatacaaatatttattttcaatctatttatctaatatttattatatctatacaaatatatattaaataatttattcttaccatatttttgtttatttatttttaactattttggcttttaaattacactggataagtaaacatttatatattagtggcgaattataaagtattaagcaatttcatgataaaatttgtgtttagttcaagaactttaatttaaaatattatattgttcaaaaataatgttaatttcaaatttgttttataagttatcttattagtaggattttgttcaatcgatctaagattcacatgtttatttttcttatcttatttccattcctagtgattttattgttattttattgtatcatgtttcacttcatttttttttctttgtagaatttgaccttattatgtgttatgttgttttttaagaaatttcacagttatctaaactgaaacggtaactcttaagataactttggattggtcgtttaggcttggagctttcactcaattcttttgaatatgactattaagttttaaattttattttattactagtttattttctaatttttctatggcatccttaatttattttttatcttataataaattagttatgcatgtacttagggtgaatggttaactaatttgaattgatgtttttctatcattgctttttgttgtactctgctctcattacttttaataaaaatttagtttattgttaaaaaaataatatattttaggaaaaatactgagcataaaccttatatcattacccgtgtaaatagtgatatatcacatcctttactaaattacattagtcatgatatgttatttgctagacattatcgtaaaacaaagtgaataaaaaatgacttattttataaatacaccaaaatcataaattgttttacattttgatggattaaatgtttttttttacatttatacggatttatttaatttttttataaaaatataaaatgttatatttttaaaaaaatgttcttccttcttcacttacccttttgcactgcccttttgtttgtgtgagaaatactactactgaacgtggcagttttcccttccaatccttcctccaaaattgcatttcatttatcactatcgctggtctcccttaatcgtcgatctctttcttccaccagctcctttatataatattttctctttttgtcgggttgagtcatgttcttctccactaccgtcaaaatctatggacttgtgtccattatcaccaagacaacgcatagcatttgtattatatttaatggtagtgattgtgccactcttattattgataggcccaatcttattcactaaggaactttgcatgtgattggcatgtagtcatgtgaatcgttagttgtgtacccattgatttcagaccgtccacttcccttctctcccacgatggagttagtaccaggggaaatcgtcgcttcttcgatcacagtcgcttcttcgatcacactctctgatcaagaagccatcctcaccaagtcagttctgcctttgtgcgtggttgtctccaccccctagtgtgcttggtcttgtgaatgtgccatgatgcaattcgaaattagatcaccttcacttagccatgttccatatcgtggcattagaccccattaccatcatcttccattaaatgttcccctacacattctggttgttcatgatcccattttccacaactaaagcatagcataaacaaacactcaaattttagttgcatccaattattaaccccctcccactttaataaatcagccaacaaagatactaggatcatactccttcacatgggattgtaatgcactcaatgtccagggattcctaattccttggacattccagctgatatatttattgctcttgacggccttgcatcgccagattcaccgctctctcataattagccaacaatgagaaatttgataattgagaaatacccaccgtttgattgaaacccactatccccaccaccccatcagtagaaatatcattcccaaatacaaaaccagagttctgatcatatattacctttgcttgttcctgtcataacagtaatattctttgattggcctcgagctctgttattgatggagatgttcttccttcgccccttacccttttgcacctcccctttgtttgtgtgaaaaacaccactactgaacgtggtggtttccccttccaatccttcctccaaaatcgcctttcctttatcaccatcgctggtcttccctaatcgtcgatctctttcttccaccagctcctttgtaaaacattttctcttttctgggtctgtgtcatgttcttctctactaccatcaaaatctatgggtttgtgtccattatcaccaagatagcccatataatttgtattatatttaatagtagtggttgtgctactcttattaatgataggcccaatcttatctactaaagaactttgcacgtcattgtcatgtagtcatgtgaattgttagttttgtacccattaatttcacaccctccacttctcttctctcccacgatggaattagtactaggggaaaccgtcacttcttcaatcactatctccgaccgagaagccatcctcaccaagtcagttctgcctctatgcacggttgtctccacccccgacgagcttggtcttgtgaatgtaccatgaacatgatgcaatttgaaattggatcatcttcactcatccatgttccatatcctgacactaaaccttcattaccatcatcctccattaattgctcccctacacactctagttgttcatgaccctattttccacaactaaagcatatataacacatgcaaacactcgaattttagttgtacccaattcttaacccctcccactttcagccaacaaagatattttggtcaacatggaatagccaatgcgaacttgaacatagccattcatcaacaccttctgcatatttgttcattggacatcagtaacttctccgaccaaattccccatccaacgaacattgttcatcgtgaaagaatttatagcaaaccctctcatctcgactcaactgaataccttatcaaccgtgcgtctttccattggccatttgttggatgagcatcaaggatcaacaatccccattgaatactccaaggttgtttacccaatatagcttttgcatctgcttgagaattgaaggtaatcttaacaaaagtactattcccttccttctcaaggactttgatcgtccactccgacaaaaacttccacattctggaaaagatcattggaaacaagttctcattaattggtttcctaaagaggactctaccaatcaatgttttgtcaccaaacttttgcactgcagattcatcaacctcccattcttcgtcaaagaaaaaatgtcatcaacatcacctattgaatttgtggtaataatcatctaacccattaaaacaaagaaagcaagtataattgcatagtcattaaggactataagcattcacagggtcaagcggaccatatgtttctcatgtaaagccctcaaaatcttatcttccatttttacttttcttaattaatattaacttcaattagctatctaaataagatagttcaattgttaattcaattgttaatttacataaaaatttacataaaaaaagaaaaaaaaaaaaaaaaagtcagcttttcacgtcatcagaacgggtgacatattatatctgataaatgattatggcaataatcactttggttgtatgagttattatatattccacgagatagggttcagtggatcacacttaacatatactgatagatttccaaaaaaaaaaaaaaaaaaaaaaaaaaaaaccccaaaaatttttttttttttttt

SEQ ID NO: 87695 - DNA, 598 bp, Cannabis sativa
agagtcaaacaaaaacttctattgtctctgcctttaatctttatttgagacctttcgaccaatgtatatcagtttttagtgttggagtctttgacatgtttcgaaaaattcacaaatttcgtgtacacacaaatttcttgatttggctttgtgtagaattctttgaaatatcacgtttaactatatggtctcttaaatgtcattcattatatatacccacactttcaaatccaaatgtgaggagagtgtattagaaataagtaatgatatatgcacacataatttacacacaaacttgacgcacttatatgacaagtaatgtcaaccaatcacctttattgaagatgagtttcacatatcaaaaatgatttgtcacatatgtgtgtgtcatgtttgtgtatgatttatgtatgttcatattattactcgttaaaaatagtcttgtattgctaatgtgtactgtatataagattcatagactctcatagtcaattagttttcagatagaacttatatacactttaaaccaccatataatcccagattctctcataatgagaattgtaataaaatgtaataagaatagcataagaatgat

SEQ ID NO: 87696 - DNA, 1206 bp, Cannabis sativa
gaggatgtcaaaccaataacagaattaagggaaacctctacgacatgattttccaacttggtgtcttcttcttcaacaacctcgtccaagtcatcaatgtttccttctctttgtttactgaattcttgaacaataatgacctggagttcagttttttttttttgcaccgatgaccaggggaaattttttcatcacatttgaaacataatccctaagccttcttatgctgaatttcagtctccttgagtcgtcaaaatccattcccagctggccgaccttcatctttaaaatttgttgaacatggaacgaagctactcacaccacttccagtcagccctccctggaatcttgaaatagagcttcgtataacagattttttacttttgttgggccaacaacttcaattttacattttagactaatttcataacttgttccagcccacttgggcccattacggttacttcataccctatttttgaatttagccaattaataaaagaatattctaatatttgttctgaaatcccttctaaagaagaagcaagcaactcaaaactcttacgatattcacgtacaatacttcttgtttgaggacaaggaattctcgatacattaattcaacggcagaggtcaaaacctccaattcatccgcatcttcaagtcctcccaattcaaaaatggtcgtcgacgatgttcccattgaaaccaaatcaaagcctctccctccaagctaattacaacagtttccaaacagtcttgatttgtcatacgatgaatggaaaaataccgtccagctttcaatagccatccgtctgagttgtcaccgtcaaacgtagaaagttcaatccaatgaggcctaatatcccatcgtggggttacctggttgttgcgagtcccactattgtctccacgacttcccccaacatccatggacactcccccagtcatgaacggatgaccacgtgtcataagtcgggcgccaccattagttgccgatgcttggtctcgctcctcctctatgggcgccttgtgtcgctcctcctgcttcgtagaaattacctaaccgatgtaccagggtagtgattcgtaatgatttgtgattaatttgataatactttactagattatttagtaatataataattatttaaaattaataatatatatttatttttcaacatgttttgtttgtgtttgcaagta

SEQ ID NO: 87697 - DNA, 577 bp, Cannabis sativa
gtaacaacaacccgtactcaaactctttcaatctaggatggagtcatcacccaaatctttcacgggggctcaaggagcaagttcaagtggagcactgacacaagaaaaacaatcatttctactgagatttctcaataaccaagacctcaacaaactcaaagctctcaatcaagctatttggagagtttaatgagggattatatggccaagaatgatgttgtgattcagagccaggcagccacacttagaaatcttgatatacaattggggcatctagctaatgacttaaagaatatacccctagattctttgccaagtgataccgagaatctaggtaaggatcgtaaggaacaatgcaaggcaatcactctgcggagtggaaagattctggaaaaaaatgtggagaaaataaaaggtagcaaagagcccatttcaatccaagccgagggagaaactagtgaaaaactagaaaattttactgctagaaaaaccccaaatgctacagcatcagcccatcatcatgtagcagagcttatttacataaaacacctccaccattgttgggttttgtgcccta

SEQ ID NO: 87698 - DNA, 928 bp, Cannabis sativa
  modified_base (526)..(527): a, c, t, g, unknown or other
  modified_base (749)..(758): a, c, t, g, unknown or other
atgttggaaaagaacttaagtttaaatatttcgtttacatgaatatgggatcccatctagttattagctgaaatggtttttgtttaaacttttattgatattatgttattttaataccatcttaatgaaactacacttttgagtcaaaaatcttgattaacaagataaatgcatttcaaacacacatacatattcttctctatttataagtaagaatagggtgctagatagagcaagacagattttataaacacacattctaccatgtcaaaaacatttgccatataagtttaagaaactatgaataagaatttaatgggccataggaaaataatagggataagttgaggaatatctcttttttgtatatattaattaaaaatactcttatattttattgggtaaatactattttggaccctgtattttgcaaaagttatcaattggaccttctgttttgttaaatgacaaaatggaccatgtattttctaaaatggtacagataggaccctgaattgattttttnncaaaataaaatttaattataatccgatctaaaagtgttatgaccaaattgtttacattttctgtatctgttcgtattaggaattattttcaagttgattatattaaaaaaaaagttgtcaaaaattaagctcagagtcttatttttactattttggaaaatacagggtccattttgtcatttaacaaaacacagaatccaatcagtaacttttgcaaaacannnnnnnnnnaatggtatttaccctattttatttcattaaagtctaccaacttttatgagtgaattgtctaatatatccttatcctcaacttaagtgtagcacataatttacattaatctaaggggtataatagggagatgaatatggaaatgaaggtaaaaattaaggaataattacat

SEQ ID NO: 87699 - DNA, 649 bp, Cannabis sativa
atcattattcaaaaaaaaaaaagtaaatcaattaagaactaaaacaaaactaatacatcaaaaagaaaaaaaaacccaaaatatttaattggttagagcatcatgttcttatttggcaaataatatattattaatatcagtttagaattaaaatatctataattaaaagtatttattgattaattatattattttttcaattttaaaaatcaacattaacacattttctcaacaaaaaagaaaaaaaagaaactaaatatctaaattggttaaatttttcaaatatgtaaactatgaatagttaaataattaaaaaataactaatatttgttcgattaattatagatatttttcaatgaatcacacaattaaagccatgaagtgaatatttaaagaattaaagtaattttaaattactccaaaattttctatctaacttttaaattataattattataataagatatttattaaaagtatttgaatgaatttgaattgaaataaataatttttatgaaaaaaaatgtattcacttatatataaaattgaatttttatgataatttttatggtggtattgataagtgattgatcccataatagtaatacaaaggtacatgccacacttacttgctacacaatatagttta

SEQ ID NO: 87700 - DNA, 903 bp, Cannabis sativa
  modified_base (302)..(302): a, c, t, g, unknown or other
tcattgttcttccatattcgaaccatagtgaatgagttccatgcccacacatagcaagtcaagtactcaaccatagtgagtaacacagtggtaaccaaatccaaaggagagaaagagatccaagttcagatcttgataatgttctgctatagaaaggaattaatgactagacatcttgaacggaaggagtcaatatattccgctacaatcaatgtaagattttcttaaacccttatgcgtttatttttattgttttagaaatattcatatttaagacattaattcaacatacttgttagtanatctaaatcctggtaaaatattccaaacatctggtatcatagtcatggtaatgatttaatttcattaattatggatttaaaacgataaatattattttttttgttgatttggatgtgttcatgttggtttacgtgttatttgatgattgaatgtgttttatgaaattttttcaatgaaaataattttatttttgttctaaaaatattttatttggattccttgtgaaaaatcaggcaattttagtttttacggaactcgattccaacaaaaattgagaaagttatgaaagtttgaagtttgggttgaattgggtgcgcggatctcaaacacagattatctgaacgcacgcccacgtgatgctgcaagcgcctgtgtcctaggctgcaggtgccgagatttctcggcgtgataccctactaaagcccctcccgcgcgcgcacaagggctgcatgcagcctcctgggcagccaccccaaactcgatttttgtgggattttttaattttttccaaattttcccaatttcaaaccctaaaatcaaaataaagtattatttttaatatatttaaacttaaatataaattttaaattaataatattt

SEQ ID NO: 87701 - DNA, 710 bp, Cannabis sativa
cttggatcaattagtgaaatctatcaaatgattatataaagcgtaatttattaataacggagtttatattgagatatgtgggtattgtggataccatttttgaaataaaatattttcgcgcccgacgactatggaaacttgacgatgtggtcagaaatgacacgacattaatggatggattattttgagggtattccggactagtttagaattttagaatgtcggtttcatggattagtaaaactaccataatgcccctacattattttaaagtttaactttactttgaggggtagattagacctttataattttatttttgttccttttgactttgtgggctgacctttatttaaaaaaaaaaagaaagaagaagaaatctttatatcattacttaagagtcaagtaaacatcaaaaactacaacttcctctctttctctctcgctctctcgtgcaagcttgaaccagcccacccttgagaattttcttcagcaaagttcctcttttcaagcagaattctaactcctaagtaacctagaagtgttttgaggtaagctccatacttttggattgaaaattctaggttttgagttggttttaaggtagggttttgcttttatgtggttgtaggatctaagctaagactggggtgtgtttaggataggtttttgagtatgttagggtttgttttgagaggtttctatggctg

SEQ ID NO: 87702 - DNA, 1345 bp, Cannabis sativa
atttgtataaattcacatatgttcgaacagtaagagttaatatatgaatctcttttgatgaatttggatctttttttatgaatttgtataaattcacatatgtagcaacaacaacagtttatatatgaatctacatatggattgccaattcatgcaacactattttttttgagctataagtagtcgctttcccttttcctaatatgcaaaattcttagctttactacaatgttgaaggaattatgatgcgatctcttattgaaccttgaattttcattatcatagttctattataccatctaagttgctcaacaataaaggagttagaacaataataacaaaggatcctgctatgagttatcaatttcaggaacaaaacatgagttactgtgatctcttataataaaaaataagttatttgggtcaccaaaaagcttcactccaagataatctaacttggtgcttaaatttgctttgttctacaaaagccaaatctaataaaagacccaaaaatttatccacacaaataaaaacaaaacatttttacttacttaaaaacacaactattcaaactgaactccaatcacactaccccatcatctgaaaaacaacaactctattcacaaatctgataaaaacccaattgaactttttcccccaaaattccaaaaataaaatcaaactttctaagcaaccaaacaaaaaattgactagagaacagtactctttgttactaatttatactgttactttaactgttaaattgtgcagatatatttattaaacacttaataacatatacaatagaacagataatatttcaacacaaacacatatagcaaatttgacatttttcaatagcttaattattctagcaatttcttcatctcttccttgaatctgaagctctaattgtttaacattggcctcaattttctccaaccttctaaacaagccgctcaaatcatttctacttcttcgtacacttgcttctatccacataatgaaattacatccccgatccaattcattctgccaaaaaaaaaaaccaataacacttgataaaatatcacaaatttataagacaaatataataaatatacaaatgtacatttagttttcaaaaaatgaaaaattcaataatgaaattttctttttttaatctttgacatgttttgttggttctttttctcttcatatatattcttaagcagtggcgattctccccattgctctaccactcttaagctttgataattcccctatgaaatatatgactggtaattgtctcaaaaataataatttattagaattgaccttaaggttgtctagttgtacttgtatt

SEQ ID NO: 87703 - DNA, 561 bp, Cannabis sativa
tcactaaatatatatagatagggacacgattttggcccgtgatgtactttcacggaatgtattccgtggtacattagatgggtctcaggatacgttaccattttttaaccctaattactcctagatcaacccaaccctcagatcaaataactgtcccatctaacggctgccgtacatcataaaatacattctgtgaaagtacatcacgggacaaaatcgtatccctatgtactataatatattatagtatatatatttcggtatacttctatctatttccacatactaaaaaacttgttaaacagtgcattaattacttaaatagatattttggtagatttctatttattttggcacctaaaagaattttttagtctattttttttatcataattgtatatattataattatttaggattacgtatatatataaatttttaaaaaactctaaataattgaaatttatagaaaacaagatttacatattttattatataaacaagcccgactaggcatataggcaagctaagcctatgcctagggcccacctagcccaagag

SEQ ID NO: 87704 - DNA, 2936 bp, Cannabis sativa
  modified_base (146)..(146): a, c, t, g, unknown or other
agctttctcattgtgagtcatcaaagaaatcactataacttggggatcagattgcagagatatggcaagctgtccaaatcccacaatcagtgtattttgtatttatcatgcagtctttctacttatatccattgtaacgagaaggnaaatacttcctctccaagctcatagccctataaatagtgatgcatgctcactcggcagagggtcgagagattttacttaaagagatattatctaggaattcatattcagagatattattgtaagagccataaggaaaggaacctttctccttgttcttgagttaatacaaataacgaggattaaactattattgaactgctcagggctgaacctctataaaattcatctgtttttatattgctttactatatatcaatcgttataaactacttgttgcttgctaaataagactcactgtcgttggctaaaagcgaggtcaacatacataaaataaatcaaatagtgcgttaaactattcacttttatatataagtacttaagttgcaattttttctttataaattaaatataccaaataaaatccattaattaataataagaaaatagaaagaattttatctaattaacttcttaatttttaaccaaaacacatttttacttcaagaatgttgaagtctaatcttttcgagtttcatcgatttattaatttttgtaggaaatatactcatttagtaccctgtgttttctcgaaaaatatatttggtaccctatgttttcaataatacttatttggataattactaaaaaaaaaggtaaaaatttatatatatatttatatacttaaacgttaaaaatttattaaaaaaaataagaatattaaagataaaatcaatagatgtattttaaataattttatcataatgaaaaattgaaaagtgagagaatcaaagagagaataattagcagtatttggagtgattttagagttgtagggaatatactcatttagtacactgtgttttctcaaaaaatatatgttgtatgattaattattatttttttgtgatctaattgaaaaatagcaacatatatataattgactatgctaatattttatttatttttgtaattacgtaaatgttaaattttaattttattatgtaacatatatattatttaaaattaaatatttaaaaaatgacttcttctacattaaacaactttcactaatgaataaatcataaataatttgaagttatcgataacggttaagtcgtcgattataaaaaaaaaattatatttctccaaattatcgaaaaatattttgatgagtgagaaaaaaattgagaattttgatgttgacaatactttgtaatatatcaagaaatatattataaaatgtagagaaaagaaataccaatagaaaatcgatgttttgatgttgctcaaattgatgttactgctactgctcattatccgtcaataattaaaaggtggttaagctctttaacacacacaaaaaaaaaaaaaagttgtaatatatcaagaaatatattataaaatatagagaaaataaataccaatagaaaattgatattttgatgttgttcattgatgtcactgttgttgcttattatctgtcaataattaatagttggttaaactctttaacacacaaaaaagaaaaaagaaagaaaaaattagagaaagatggataatttggcattaaaaacaaaactaaggaaaaaaatgcattgaaagaaaagaaatttgttttaagtttagagttatataaagaaaataaaaagaaaaatgagaaaatacagtaaaaagaaaagggaaaaaaaaaagatatgttttagttttttatttttaatgtattttttgttagttttttttaactaaaaatttaaattaaaaattccacgtaggggttttttttaaaaataggggttttttttaaaaaaaaaataattaaaaaaaaaaataatatagggtaaaatataaattagttacttaattttttttttctctcaataattaatagttggttaaattctttaacgcacacaaaagaaaaagaaaataaataaaattagagaaaaatggagaattggcattaaaaacaaaactaaagaaaaaaatagattgaaagaaagaaaaaacaaagagatatgaaattagttttaagtttaggattatataaggaaaaaaaatacgaaaatacattaaaaagaaaagaaaaaaaaaagatgtgttttatttttttacttttaatgtattttttgttagttttttttttaactaaaaatttaaataaaaaattcaacgtaggggttttttttttaaaaaaaaaaataatatagggtaaaatataaattagttacttattttttttggagctttttattattattttagatgattaatatttacaaatctattaaaaaattaaaaagtgagagaatttaggaaaaaatagatagatgtttttggattaattctaaacaccatgtcactgttttatacttctcctttatatatatatatatatatattgatcctattaattaacataatattctttattaatcttataataagtaaacaggtctcgcttcacgtgcggcagttaaattattatatgattattaattgaataataaaatcggtatcaaataattttaaattttttttatgcatatcttttcaaagaaaaatatatattattaaaaaatgataaatctatatcgaaaactctaaatgattaaaaaaattatcatacaatttcttatataaatattaaatcacgcaatttttttaaatgtaaatataaaatcacgtaatttttttaaatgtacaatattatagtgaagaaaattaaaaactcaacaattcttacacaaaatagagatctaaaatataaagaagacaataaatctatagaa

SEQ ID NO: 87705 - DNA, 1464 bp, Cannabis sativa
tcttctctagactttgatctggattgcccctattattcaatcaacttgatttcttgttgttcgatttgcctctggttacaaccaatgcttctggcgttgagtctctgtgatcatgttgttcctttttctggtactcattgtttaccaaagcattagaaacatctataaacttaacctcatttttatcatataacaaagttgtggttaaatgttcatagctttcaggtatgaatttagcaacaacaaagctttatcttcatcactaatttcaacatctaaattttgcaaatctccaaaaattttgttaaaattatctaaatgttcaatcaaaggggtacctttcttgaactaaaaatggaaatgtttcttcttcagattgagtcgattctctatatttttgtcatgtacttgtcctctagctttttttaaagaactgcatatacgctttctttcatgaaaagtacttttgacctttcccagacacaatcggattgtgccataatcttgaggattgaaaaaattccaatcttaatcagaataatcttttggctgcactccaaggaattattatattcttctcgaaacaatagatctaatacttcatattgccagaggccaaagttattaaaactgtccaatttctccacctcaaactttgaatttgataacatggttctcctcatagaacctgttgactctttagaactttttacgtcaacttttgtttcttttttcagtttctctatcatcagccataagtgcaaacagataacaaaacttttgaacttatgacttaaaaataatattttttgaaatttcaataccttattttgaaaaatgaatgtcgtagttgaattcaaaatggtcctattagttaggaagaggtcctactcagttgaaaataggtacaaaaataggttggttccgtccaaaaaataatttttgactgagttaactcagttgctagcaccaacactctaacggctactagcgatgcgtcggacctccgattgaggcgattcttgcagtgttggattcctctcattaagagctcgatttgatatataatatcgctatatttggctctgacactaatttaatgtgtgcagaagcaataaatagcaaaagattatgatacatatatatcaaagcggtaaacaataaaacacatagaattacatggtttagaaatttgcctactctacgggagggagctaatattattaatctaaaaaggaaatgtacagaatacaaatacagatttcctattaataatatctctcaagtgtttcccaaagtatttctcaaactcaccatattatttcctaaagtttggatatatagatgctctatctctctcagattacccacaaaacctgatagtatcgatttgtacacaaaatttttcaccccgaattcgtacacactgaattgttatgtactaaattatcaatgctcttctaa

SEQ ID NO: 87706 - DNA, 921 bp, Cannabis sativa
ctcttcctcgccattatctccctcgttctcttgtctttctcacaacagccacgacagactgtccccatcgtcgagagcccaagagaaaaacatggttcgcctcgccatgcccagaaaccctaacctcgaggccctctgcgcctttcgccgttgtggttgaactcatcggacttgaagttccacaactctgattgagccacttcaagtctcgttgaaccaaacaggtggcagaaacgagtttatctcatcatgggcttctgaatccggaggtttatttcccatgaattggctttgatcaacgccagccgccgtgcacattggtttatagcgcgagcgtcacaaccaacaacatcatttcttttttttttttcctttttctttggttttacctttaaaaaaattctcgctctcgtcatcctctccctcttcgtgtttcatttagccttacttctacaagatgtctctggtcaccgttttagggttcttattttgggattcaagaggaggaagaagaaaaggttctagaggattctaaggggttgtggggtgcgggttagagaagaagaaaaaccaaagaaaaaagaaaaaggaaaaaaaaagaatatatattttttataatttttttttatttttaaactttttaaatatttaaaattattatttaataattaatattacgtgaaccactaaaagtttgctacatgtacacttgtgtacactgtaatatgtcgatcgtgacacttaacatagtcttttagacgaaagaaaaaatagctaacacaaagaaggcttgagtacgtagtcttatcatggttaattgttaaaaaatttaaaatatatgtatttttgtcgctaatatctcaattaaattattttaaatgtttgatatccccaatacaactcaaaagatttataaaagct

SEQ ID NO: 87707 - DNA, 1100 bp, Cannabis sativa
  modified_base (551)..(568): a, c, t, g, unknown or other
  modified_base (819)..(830): a, c, t, g, unknown or other
aaatgaaccctagaattcgaactatcaaacaacctaaccctaagagccactaatttgcaaaatcactatttgaaaccaattaaaatcttgagaaaacaaagctaggaagtatctagtgtttaccttggcttgattctctcaggattacttgctaaaaagacaaagaatttgcagcaatctcccttgttctagctggtttcgacgagagagggaaggaaagtgagaacttttcttgattttggcttatttctcttattttctttaattatttcttaaatgaattaatggtttaactaaattaaaccttggctgaatcttcccttgctaggtgtcaacacattgggctgccaccactctccacttaacaaattactaaaatgcccccaatgcttaactttagcctattttaagcctaggggtaaaatggtcaaaaaccataaccccgcacaacctcggtatattatttcctccaacataaatcccactaagaaataaggttctaaacttgtccatgtgatcaaactagccatccatcgcattttctgttgtcnnnnnnnnnnnnnnnnnnaaataacatatttcacatataagttaaacaatacccctagactttaaaaaaatctatggaattgagaaattataactctaatgcccatttctaacaatggggctcacaaataataaaattcataaataattataaaaatatcaaaaattggtgctaatggcctttactaatccaaattactaacgcggtcattacaatcatccccccgttaaaaggattttgtccctgaaatctaacctgaatagctctgnnnnnnnnnnnntcatgtcagactctaactcccaggtggcttcctccaccttattatttctccagagcactttgaccaaagcaatggtcttgttccaaagaactttctctattctatcgaggatctgaacaggttgctcttcaaaggataagtctaactgcagttcaagggcttcataactcaaattatgagtcgagtccgaaacatattttctcaaaattgaaatatagaatatatcatggacaaccgacagtgtttgtggtaaggctagctgatatgcta

SEQ ID NO: 87708 - DNA, 701 bp, Cannabis sativa
atcccaactcgaccaatatcaattctaggtttagtgagtctttgttttcccattcgctaaagaagaccccaatatcccaagcccctatagacaaattatcctttatatatataattaaaatgtatctttatatattcatacctttatttatttgatgagatgagaatgagattggtgactattttaataaaccaatttcacttgccgacttccatctgaaattgttttccatttccaagccttcttttagggtccccttttttctagaacactcgtagagtttcttgcggttctcaagtccagcattgtactcatctatcttctttcgcaacttagatatcttattcaacaactcatccttcttcttttctattttcattaggaactcagtctcaagcactttacttacttgttggtaatagaaatttcttgtgatcttccttagagattcccacataaaacccacctcaatgtcagcgtagatttctacaaatattatgtagtgataccattgttgacgaagatgcttagtgatgtcagtgaccaaagtagtatgcatctctttcatcactttacatacaaagtaaaagcatatgctcttgaactctttggaataaaattctcttgagttggtagtaatgtctccatgtttgtgaagcaagtatttgataacagatgccaaattaaaaggtaccaaatga

SEQ ID NO: 87709 - DNA, 780 bp, Cannabis sativa
ttcaatccaattggatgactgtatccaaactatattggattgtagctggtatttactgtatatttttcccactttgtaaaattagaatcaacctgctctggagaaagatcgatataagatacgtcaggcatttatagctgcacctggaaattccctcattgttgctgactatggacaggtaagttttgtgtggacaaatttgaaaagtgagatttcatctttaacaaaaaaattataaaataaataaataaatataatagtaataaaatgtcatctgttgattgatatctgttcatatcacagttggaacttaggattttggctcatattgccaactatgttggatgccttcaaagatggtggagattttcattcaaggactgccttgaacatgtacccgcatattcgtgaagccgttaaaaataagcaggttcttcttgaatggaatcctcaacctggtgaagataaaccacttgtgcccttgctaaaggtatatatagacatttcactgttttgattcattcaatgaatacgttttagaattatatcaaggaggtccagacattgagttgtaatttatatattttctattgcatatggaaaaacgtctgttggtctttcccgggattggaaggtatcaatggaatattctatatatctgtataagcgcggaggattttgtttacttcacaaccagattaaagataaaataagatggagtagaaccaataaaaaaattgatgtactaaagggagttatttattggtctttctcaggttt

SEQ ID NO: 87710 - DNA, 964 bp, Cannabis sativa
gtgacagtcttctccagcaatgtacatattgacctcactgtcccaattttattattgattttgttatgtattttttagagctttatagtgggctatgatcttattattttcatttaattaattaaatttataagaaaataaaaaaggagttttagtcatttattcataaaccaaaaatagaaaagcaaaacctctctttctctctccttgtgttcgaccaaaggagaaatcaaaggaactcatcttttttcacatttttcaaacctaattcaagggggttatagcatagaattcaaaggtttttattaatcattgttgaggtaagattctctctctttttctctttaaattttcaagttaaggagttagatttccatgctatttatagggatttatttcattttgtattgggatgagttgatgatgttatatggagttaattttctgttatttatgttgttatttactagttttgtttgttgtttttgtgattgagcatgagtttagcttttaagctcaaacttgacccatttaatggtagattttgttttagaagattaatgatgaaattatcggctggagtatgtttgttagactctatttagaggttctggagctttgtagaatttttgaggtagatttgggttgaaaataagatttttagaaaatctccagtagaaaataggaaaactatttttccttaaatggtctaccatttttagcaggtagagtcccagaaaaatgatgtgccttttttgggggtatttttctaaagtcttctttttgttcttttatagatatttaggatatttctacgctatttatagactaaaaaaagttttagttttgagtctaagtcctcaaaaagtgatttagcggataactcactagtttatgtatgttgtgagttaggggcctttaaatcgttaagcagcagtttccactatggtggactggcacacct

SEQ ID NO: 87711 - DNA, 527 bp, Cannabis sativa
ctctaactacctcttcaaaatacctatacatattgtgttattatttttatatataaaaatatatagtaataataatgtggaaaattaaatttggaagtggagatgatgaagattcttatttgtacagtacaaataattttctgggaagacaaagatttgagtttgatgaaaaagcagggactcctgaagagagagatcaagtcgaagaggctcgccacaatttctacaaaaatcgttacaaagtcactccctccagtgatctcatctcccgatttcaggtatatatttatatacataatcaacatatatatatttctatgctttctaatatataaaatcgtacgtatatgctttcgtgattgcagatcaatggtattaaaaattatttttattattattgttaaaaaaatatatattttatacttgaaccaattatgtttttaaaaaattgtgctggaataccagaccaaaaagaaagtaaagagctttatcagttttatttctccaataagagacagatgccgtat

SEQ ID NO: 87712 - DNA, 1032 bp, Cannabis sativa
aagtgtccgcttgctaaggccgtgtggtttgcaagtcgttgggctattagaagtgatacacttaactttggtgctcctagagacatggtggtgtggctcttatctccggagttcttgaaaggtgctgatgcggaagtcttgggtgaatttctgagatttggggtttgcttgtttgatgctttgtggactgcccgcaatagagcctttcacgatcagatcagtcctacttggagaggtgttcttgccaaggtgactagtgctgttgcctatctcctttcggcttgggagtctcctacaactgctggtggtctgcagcacagccctgctgcattatacacaggtaatccggtgttactagtggatgcagcgttcaaggatcttcgtgctgcagctgggatagtggtggctacctcggaggtcaatttgtcggaggctatggctgtgtgttatgaggcaactcagccactggaggctgaattggtggcgttagttcatgcggtgaagtggtgtactatgaggggctggaaccggatggttattgcctcagattgtcaactgctggtgcatggtttacatgctcggagggctctggattggcggctggctggtgttttctggcagctggtggagatgcttgatgctctccctgacgtgaagattgaatggacaccccgtgctggtgttctagctgctcacaagcttgcaaagtgggcgattttacattcggtttctggtttattttctgcagaggacttggtccctcttgttgccatgtgaacatttgctgtttttttttcttttttctggttttttttcttctttttttctggtttttctgtttgtgaactttgttttgcctctggttttttctgcaatagagattggttctccagcaaaaaaaaacattttagtcacaacacaatttttctgtgattaattgtgacttttagtcacaacaaaatgttacttgtgacaaaaacatagtctttggatacaagttgtcactaatttagttttagttacaacaagtat

SEQ ID NO: 87713 - DNA, 1163 bp, Cannabis sativa
ttatagttaaatttgtttagtaatcattcatggataatacccattaaaaaatgttccatacatatatatatatatttataaataaccctaacaaataaggacatatgagctatgccattaaagtatgaattgcacaattaattcaataagaaaaaattataattatatgtgtcaaataaaaattttaatatctgacaaaatacaaaatgatagaaaaaaatatagtcataattcttgtcaaaatatcattctcaaatattgtgggatttaatttcgtaatagaatattcaaattacttttataaaaatacaaaatctcctaattaatttgaatcattttataattcccatcaaaatagtattgtaattcaaatgatctctaaatctatttaagtgatattagttttattaaaaacaaactcattttctccaaagaattcatttcttacaaagttatatgaactacgttcgatttgattcctcccaaaggatacgtaagcaacctaattgtaaagattagctacaactacaaatcctcaaattctcaaatgaggtcattcaccttattaaatcccaaataaagtcattcaccttattaaattccaaataagatcattcaccttaaaaatcccgagtaagatcttttacctcaaaaaaaatttcaagtgtagtcatttatctcaaaatctcaaagtgagttaattctccacaaaattatcgaagatacaaaatcttttaacactctcggaactacgtttgacttgattcctaaaaatagatacgtagccaacttagatgctaagactaagtgtagtcgtcagtaccacaaaatgatatgaaacaaaaatctcaaaactcaataaaaggtcattcaccgatgagtttttctaaatttttaaatagcaaagaattcctaaaaagagtcacataccgaaattcttatattcaaattctaaaaatatcatattccgaactaaaagtggcttgatctttcacaaaaaaagtatgtaggcagctcagttagccaaaattattgagtttagccgcaattccaaattcaccttcaatttctccaaattatttcaaaacatttaatatcatcgtaattgtaatcaaaaggtattttcattaaataaaagaatttgtaattaagagattactctt

SEQ ID NO: 87714 - DNA, 1277 bp, Cannabis sativa
ttccaactcagcattttgttagtttgcctcctccaagcgacgcctgagatggcaattttccaaatcgaaaactagcacgtatctcgtgggatcaaaggcaccatcatcctcatactccacgagttgagcaccaccaacaattatgttgggctcttcattccctatttctgggttcttgccattttcactctaagtccttcttgagtgtgtggactgtgtattttggccaccttcaggttgggtccttcttgaacgagtggaccgtgtaggtcgtgaattgggaggcctctgtgagcccattagctcttttccaggacggtgagtagtttcttcaagatgagtatcaacattttctccgttatcagccatggagaaagacttttcttttggtcatgagggttttttctgagcttttttcacgtaggctctcaatgaaagcgccaaactgttaacgcagattttcgttaacgataataaagcctatttcgtgattaatttgcacagaaataatagaaaataaaactaagaagaataatgcaaagatcacaccaagttttttacgtggttttgcagttaaaattctacataatctacgagtctatcttattagatttttctgatacaaaactaggatttttctctcaaggatttttcgtccatttttctatacattctgtccctatttatagttgcataggaaggcagttaattacaatcagatttatatcccacaacaatatttccctaaaattatgggattcaattacatcccacgtaaaataaatgtggttattatttgaaaaatcatacagctgtgatttatctacttttactgggtcaatggtgatgtggatttagctacgttgcaaaatgtatttcactgggtcatcttgttgagatagcaacaataaccttgatagcgagcaggagcttttcccatttcttttttaggttgataatgtaaatctcgtcgcttctgtaattgaagacataacgctccatctgacaatcgcaattcttggtgacaaggtgaacttcagtagtcaacatcatttgaatgtcagcttctgtctgagaaagctgactcgacaaagcattgaatctcattgaaagatatcaagagctgattagtgaaggtacctatagcgagatggatgcctcgctattcgttggccgaattcatccatttgttatacttagttggtataatgtatattatacgctaagtgttctaacagtcaacatgtctcgtggacacctctttatatgcagcgagg

SEQ ID NO: 87715 - DNA, 785 bp, Cannabis sativa
tttatttattaatgggagatcaaatgttaaatttaacagaatattctttttatttttaagtatattttgttaaactaagaaatgccgttaaataggcacttttaatatataaagatattcttagctattgatggatatctaattaaccctatccctatcttttatcatcacgcatatatatataaaataaatatgtatatatatatatatatattcataaaataaatacataaatgggccaccaacttgcaactggaacaaatatatatatatatatatatatatatatgatatgatctagtgtagttgtacttattataagtcgatcgatatatatatcttgatgatgaattttctgatcttattattattcctttgcaaataccagacattatttttagtatcttcagccagatcaactactcatttttcaggtaagaattttatatactactctttttaatttatatataattaactatatataacgctagctagttttatgtattttttccttaaatattatcttagaaattaatttaaaaagtactatatatatagtatatcgaaataattaattagtttagaacaacaggttttcatcatgatatggggttattagataatgagaataattaccatcatcatcatcatgatcaacatcagaaagaagtggtactacatggaagaagatcatcatcatcatcattacatgatcatgatgatattcattatggccgtgatcttgatgaagaggtagtactagtgccgcggccacttccgcc

SEQ ID NO: 87716 - DNA, 1254 bp, Cannabis sativa
actcattttaggggccgaaataaaaaaaaataccttttaaaaaatatacatatatatttttttaataatttttaaaaataccatttaccttcgtagtaagggcccaaattttttttttgcttatagctcatttcaactcagggtcgaccttgaataaactacatttggtttacctattaatggaaactctatttacttttaaaaaaaatacaaataattaatacataatagaaattttattatacccatattataatatcaaatagcttaattaaccaaattttaaactttaataactattttatcatactattaattacttttattaattatattttttttctattcatttattttattttctcttttagttttgttttttcaattaactattatccagctaaatcttttcttttgaagacttttttctttttcttttcttttctttttaatttcatttgaaagtttaatgaagttgggtgtttaatgtaaatatattgttttaacaatatatgttctcttacttttatctatttgttgttgttatatgatgatattaattagtatcatatataatttagtactaattggtgttcaaaaaaaaaaaaaaaacacaaaccgtccaaattaaatcaaataaattgataaaaaatacaacttgaaataatttagtgaaaatttaaactgccaaatgaatatataaggtggattaaaaattattttaaaccgtccaatcaactcgaataaatcaaattaaaccgatatatatttcaataaaagtatatatatataatatattacataaattacatttattaattaaactattttgtatttaaaatttgtactttatagtatttaatttgaaatttagactttaataaattttatggcatttgaatattgaagttaaaatttaaaatctacaccatattattatattttttttataattattattttttgatgaatatttgttttttttttgttctttgtatgtttactcaaatatatttacgctatattaaagtttttaaatttaatgtagactatatgattttttagcttaaaatacgaataatatatttttatatattttttaaaatttaattatttaaatactagaaactaacaataataattatatatataaaaaaaaataaaaaataaaaagtgaaggtcgatttggaccggttaaactatttcttatttttaattggacaggttaccatcaaatatttacaactcgatatt

SEQ ID NO: 87717 - DNA, 851 bp, Cannabis sativa
cacctcacctaggtggttcctagcaaccatcgctaagcacatactttctgagcccactcttacatcacaattcaattttatccaatcacgaataggtattaaaatatattgaatcatttgtaagaaatatgagtagctatctatgatttgtgttatgatatcatgagtcatattcttaacgggcattatttgatttataccaatccacactattgtgtcaagaaaaaagaaattaagtcgcaaaaaatatatactatagtacaaaaaagatagtatgtatactaagtatagaagttgatgagatacattatatcaaaatttatagtatcccacatagaagttgaaacaagtataagaatattaatcaccatttataagaaatttgagtaattctactcatcatcaattaattttagaataacctaatgagtttttcactaaagtttaatattctttaattcttgaattgaattgagacatctatttggaatttttcttcttaaataaatttacaattaaaattcaatttttaaaaaatatagaaaatattttatctattttataatcacattagttagatgttaaatacctgtgtcttaatttgagttgtgaaatgcaatttataaattaatttaaaaccaatcacttttatataaattaagacaaaacaatatcacatatattggaaatactaaaaaaaatgttgtttagtacctgtaaatatcgctattagtatacaattttgtgtaataatttttaaaaaatgtaactaatcaattatataacgacatgtaaacctgttagacacacgactagtatccaataataccccacaagcaactacgtaccaa

SEQ ID NO: 87718 - DNA, 683 bp, Cannabis sativa
tacattagggagagaggaaagggcaagaaatgtctacaattaagtttttgaaagaagaaattgcattacaagaaacagttagagcatttgaaaccatgagagcatctgtttcgatgtgagtaattggcacttcctccaattgtagaatccaatttatgttgtggaagagtgctttggcttccatttcatgggaagcaaagttgccaacaagaggtttcgacatggcagcaagaacagatcctgtcgagtctcgtacaaccgcaccaacaccaatgatatgtcgctgtgcgtccacagcagcatccacgttaagtttgaaagatgagtgaggtggaggttgccactgtataggaggaggagcaaccagattttgttgggaagtatttgctgcagcagatgccacctgatgtggagtggaagatgtagttgaaggcctgaatttctgctgggccgtgcgatattgctgcaagtaattagcagcaaacaaggaaagagatcttcctggtttagccttgttaccatgaaccacacggtttcgctcagtccaaatacaccacaaaacacaaattatatgctccatttctggtttggtgaagatgcttgatagatgcaggaggtaatcacccttgatcattgtagaagtggtagtccaatctagattgtagtctgcagaacgccacact

SEQ ID NO: 87719 - DNA, 731 bp, Cannabis sativa
ataataataataataattaatatcttagggtaaacaagacaaaaatgcattttagttcactaagaagtaacctttccaacgaaaggtaaagtggtccaaaactaaaatctcaagtaaatcagacattccaaatgtctaactatattgtcccgctaattctaagataccaaaacatatttaagtgactaaataggccaaatgttgcattccactattaccgagcataaaacatgaaaaacataatatttcacatataacataattagcacacttagaattcaaatatatctctataattgcataaataataatcaaaagtcccattcttaaattaagccctaattatcatattaaaactaagcggtcattacaattatccccttcatcaaaagatttcatccttaaaatctaacctgaataacttcggatattgagtcctcatatcggactccaattcctgggtggcttcctccaccttactgttgctccagagtaccttgaccaatgctatggtattattttgaaggactttatcttttttatcaaagatctgtactggttgctcttcttatgacaaatctggttggagctctaggttttcataactcaacacatgagcgggatctgagatgtatttccgtaacatagaaacatgaaatacattatgaattgttgatagtgctagaggcaaggctagacgatacgcaactagtccaaccttctcgagaatc

SEQ ID NO: 87720 - DNA, 832 bp, Cannabis sativa
gtaaccaacatgggtctttattgttataaggtcatgccttttggtttaaaaaatgctggggcaacgtatcaacgactagtaaatgaaatgttcgcgagaccgattggaaggaacatggaggttcacgtcgacaatatgttggtgaagtcgataaaaaatggagatcacacaaaggacctcgcagagtgctttgagattctgaaaaagtaacttaacccaaagaagtgttcctttaaagtttcctcaggaaaatttctaggattcatagtcaaggcgaggggcattgaagcaaatcctgagaaaattaaggctttgatagaaattccatcaccaacaaaatggatggaagtccaggccttaacaggaagaatggaagctcttaacaaattcatctccaaatcaactaataagtgcctaccattcttcaatgtattgcgaggcagtaaaaaagcattcttcaactagtgtgaggaggcgtttaatagcataaagaagcatttttcaacacccctagttttggcgaaacccataactggagaaactttactccttcacttggctatctcggaaagtgcgattagtgcagcattggtgtgagaagagggaaagcaccaacaacttatttactatgttaataaaaggttgttgggggcagaatcaagatacctactgttatcccaaaattggcactctgacgtggcatcacgagaatggtgacacgtggcaactactaagagcacctgtcggatcaacatgccgagcaggatgcctcgttggcatgtccataatggaatactcaacgagccgtgcagaatgagcaacacttagcgaa

SEQ ID NO: 87721 - DNA, 638 bp, Cannabis sativa
  modified_base (553)..(568): a, c, t, g, unknown or other
ttcttattatatttatttcatatttttctaaaaaatttaacttttattataaatggtttagctctgtgtgttctataatatttttgtaggatttgcaggaatttttatcgttaattaaaggtaagtcgtaattttgggttggttttttgtgtttgggttggttacatttacatgttatagatactaatggtttggctttggtctttactttctcaataactttaaattgtattaagttaggatttttgtgagatgatattgtattatacagtttcttttagatatctttattttatatatgttccacgttcataaattagatatgtggaagaagcacacaatacacatgggttgaatgcatttttataaattaataatttcatctgttcataattagatgtatttttatttttatattttttgaacaagtatttttaattattttagatgaaatgtttattgttaaaaaaaaaaaaaaattagtcatatgaaatctaacttagagtactattaactgattttttactctatttttaaaggctaattagtaatnnnnnnnnnnnnnnnntgacatgtaccaaatcgtgcccctaaactttttttgtcattaaaaattcccctcgaactattgagattgt

SEQ ID NO: 87722 - DNA, 940 bp, Cannabis sativa
ataaatatattaaaatttgaaaatatacaaaactatttgaatagtcttttgaaaaaatatatgaaagaactaaggttgttaagatagataataaatggttataaatatttaattaaatagttttttctttaattattaattaaataaaatttaaattgtgttagttgaagtttatcagaaatacttttaagaaaataattagtcttttattaggtgacatttggtaatatttttttatttaaattttttaatcaaaaaatataaaagtaaaattttttattttttaaaatgttgttttcaaaaaatataaatgtgttctataacaacttttattttttaattttaaaaataaaaaacagaagggtgctttgtaaataaaattttttatttttatttatatttgttaattttatttacgtcaggtcagggttcgggtttcaaggtctaaattggggtgggagtctaaaatattgatatatatatatataaaatttgttaaaaaaatttgaatgttactttttttgtttataaaatttttattctcaattaaaaattgaaaagtaaaaacagttttatagatcttgattttgaaaaatattttcacttttctaattttaaaaataaaaaactgtttaagaaaaagtgttcccaaacacaaccttgattaatcaaagaatttttttttatttaaattaaaaattttaaaaaaattgtgacttttaatcaatttttttttttttgaaaaatgatgcgttgtggtcaattatacatgaagttaaaactgaataattattaataaatgttaacagaaaaatgttaagtataccctattatatatttttttgaatgacccattataatattattaattaaaaataattttaagaaatagctaggaaagggtggaggaaaaaaagatagatacataatgtaattaata

SEQ ID NO: 87723 - DNA, 607 bp, Cannabis sativa
catcctttatagggaaacactaaaaaaaaatatggggcttgaaaaagctaaattaaggccttgcatggtaaatatttgcggatttgtaggcgacagtatcgttagtgaaggaataatcgagctcccattaacattgggcgaagcacctttatccaccacgataatgcaagactttttcgttgtcgacctgccatcagcttacaaaatactgctggctcgaccagccttaattggactaggggtagttagttcaatttagcacttatctctaaaatttgaaatgccaatgggtgtgggagtagtgcagggtgatcaaatgctagctcgcgaatgctatcgcatagagctgcagcacaggaaggctggtcaccaactaatggcagtcttgactaaagaaggtgagaagaaggatgaagatcgtgatccacggattcaagatgaaagaaattttttaaaactgttgtcccaatttttgcactctgatgtggcatcacacgatggtgacacatggaatcaactccatgtacctgctcccatgaaatatgtcgagcaaggcaccacatacatttgatcggacaaagctctcttagccgggcagtgagcaatc

SEQ ID NO: 87724 - DNA, 1070 bp, Cannabis sativa
gagaaaataaaatattgggattaagccgggttatggaatttgaccattttacccctagttttagaaataccctaagtttaagtcaaagggcaatttggactttttgcaaagtaaagggtaggtggctgcctagttatttgacacctagttagttaatgttttcagcaaaggaaattgattttccctatcattcatttcatttagtgaaattaagagaaaagataaaaaaatttgaaagaacgagccttgagcaaggagttagttgcttaattttgaagatttcagcaagggattcaaggaggtttaagctaaggtattcctagttcttctctagttgtgttttctcaaagttttcattggtttcaagttgtgattttgctagtaaggggctgttaggtttaggtttgcttacggttcgaattctaggcttaatttgagttgattaagggtcctagctgctggttttagtgtgtggtgttggttttatgcaagtttaagctttgaactcaaagctttgttcattaatggcaagttgagtttctttgagtttttctgtgaaatactggctgaaatatattctttataccctaattagatactctggaaggtttagttgcatttggtggaggattgagcaagaaatgaaaaatttggtgtggactggtgcaaaccgggtaaccggttttggcaggatccccgaatgcttcattttctcaattttcgtccatttcagtgccgtggttgggtgcttccctatttctagagtttgtttaatccctagaaagtgtagcagaatctagggttatggttttggatttctcggaattagagttttgttagtgtaacttacccggtttcataatgtgattagggcatccatctagcgtgagactttccgttcaggtcggccagcacacttgaattcaaaaagaaggtaagaactgaatgtaatgtgtgatatcaataactgaatgtatgtataggttatctgtatatgcatgcttaaaatgttagttgcactgccaacacttatacggttaaggtatagagtgtattggtatagtgattgt

SEQ ID NO: 87725 - DNA, 581 bp, Cannabis sativa
attgattgatgaatgtaagagatataattatactagcatactcccttactagtataaatatataaatgggtagttgcaagcatcagagtagagaatgtcggccgggcggtattgatcattacaaaaaatgcattattcttgttatatctcttgacagatataagggcccacttttactgttctatactcatcatacactaatccaaaacatgggatcagaaatgcgaattggattggaattgagacattttattttatcctttgtttgattgtttcttgtttttatgtctttcttatatttctttccttgctttagggaccactcgccctctaaatctatacatgcttctcaatgaaatacatacatgcatgcagcctttgtgatgtgattaaataagatagaatttttccattaggttgctcatttaatgcatgtaattaaattagaatttttcatatgaaaaaaattttaatagttatatcaaataatcattacatcattatttaatggttgtaattaatttcaaaattaaaataaataaataatttcttttaaaaaaaagagaaaaattcattcaaac

SEQ ID NO: 87726 - DNA, 634 bp, Cannabis sativa
atctagatacgcgcgccagtgtgcgctttttaacttgtttttaagaattttaaccttaattttgacatgtattaaattatattcttgaatttttctggtcgttaaaagtttttcctaaattattgagagatttaaaatttttttgtctaatttcatttaattttactatttcagtgattatttatgtagtaaatcatgttccccagactttgatatctaccaaatcatgcacctcgaataatttgacttgtactaaatcatgcttcatgaactttcatccatgttagactttttttattaaaattagataaaaattcttaaattcaacaatctcaatatagttcaggggattaaaacatttttaacgaccttaaaattcaaagaacatgatttagtacatgttaaaatttaaggagaaaataattctaatgagctttttttttttttttacagtcatcaaaccataactcatgttatatatttatgggagaaatactaagtgcaacggagatattgaattccacacaatttaatttaaataacataaaaaattacttataaccaatcacaacgtgccatgtggatatggtatatgattgctaaatatgcccatgaactatttcatcaaaatcta

SEQ ID NO: 87727 - DNA, 1287 bp, Cannabis sativa
agaaggtttcaagctattgtggaatgaatagtgattgagaagtgtgcttagttttgataatgcgatgaagagtaacatttttcaagaaatttttcttttatatattttaaaatttttttctagttaattttacatgtatcttggacatgatattaaacattataattttacttaatttgtttatatatttttttagtacagtgaaaaataactattattatatttttaatttatacattaagtatttgtataattgtattcttttttttttcagaaaaagacactagttgttaataatttttttaactgttaacaatatttagccatgatataaaaatataaaaaataattgtatatataattaaaggaatctaaaatttttaactactaaaattcaacatacaaacaatataaaattaaaatgcttaaaaagtaacgaaattaaataatgtgtttacaattttaaaacaactgtaaaacaacaaacaatgttattaccaaacataagtaatttttattcatacttacaatctctttctatcaatgcccccacatgattcaaaattgacataatgtatgttctcttatttattttccatgtctgaatgtaagagataaaataagtttttattttaacatgtaaaactctgatgctttaattgttgaacaaccagtgtaatgtataagaaattcataacaaactttacaataatgattttattttcaagttgaaataagatgttgcaaaaacaacacaaaagaaacttcataatagcatgaaaataacaattatttttttatgtagatattgtgtagttttgcaccaaaaataatatcaattgatgaacaaataaatatagatttttcaatattcaacttcttcagggattttcttttggttgtttttctagttgatgtatggtttgtttctggtgtcaaagtgttaatatcaaccaaaataatatcttttgaaattgatcccctccttaaagtagataaaagttatttagctgttgttgttgtgttgttatcatgttgctgtagatctgagtgtattgagggctcgtttggtacgttgtactagatcgtattgtgttgtattgtattatattgaattgaattatatatcatatttttatataaaattatattaaattttaatttatactaaaatattatatacgtaaatatccataaaagtcattaccacatataattttacataaaaatattgcatgaaatataatttaatataatactatacaatacaatacgttctaatacgac

SEQ ID NO: 87728 - DNA, 1009 bp, Cannabis sativa
tttctttagttgcttattaaagtattagaatgatattctaatagaatgatctttccaccattttagtgaaatgactattccattttgaaatggaaggaaaactattctaatgtatgatcagaaattttattaattttttttatgcattttaaattttattccattctattcctattaatatattctcattctcattcttatatttttattccttccaactaaaagccacagtttttatttattttaactttcttactatttcttttacctacctaaattttattttctataattctaaaataaaaataacaactacactattaatccttttaattaaaaagtaatacactattgtgatctactttttaagttgatcattttaatatgtgaaaatatatattttttgattttaccaaaaaatataactaaaatcaacaacaattactcactttcttttataatttattattaaaatagtaatcaaattttaaattcaaataaaattcaatatatcaactaacttatattactataaggctgattgatatttcttaaataatggtttattctttaaacaattttcataggtaagaaaactaaatagtattttttttttctgaacaagaaattaaatagtatcttaaacattataaaatttaaaaaatttattttagttaacactatactcttttggtgtttaagatgcttttacgtttttttttaatatttaaattaactttaaaatttgtttgagagtcaaacttaataacatcaaaatattaccagaatcaaaagcaatattttaattttttttaatatcttattaagagatatgtaactaaatttttaattaataaaattttatatattaactaaaaaagacttaaacaaattattgtcggagtaactgaaaaagattttaaaaatcataatatggacaatacaattttcataaaaaagtaaattattataatacaaagctcaaataattaatggttcaactaaaaga

SEQ ID NO: 87729 - DNA, 780 bp, Cannabis sativa
tgagagtgtcccatgtagactttaggcttaaaaatccctgccttagctctagtaatcattgggtgagaaggagctgtaggcacgatttcttgtggagagtcgagagaaccagtattaacattaccaggtgattgtctcgagtaaacaacatcactcaagttatcagtagaaccacctggactgtgtgcatctgcaggtaactcatcgaagaaaccaggtgaagtagcagaaggagagttaacccgagttacctggttttgatcactaggatctgtctgaactgtagcatcttctccagggacttgagacattgtatcaggtgagttgttcttctctgagttgctggacatagactggtttagagattgaaacaggacagaccaagaaggcacactaacacatacagactgttcaggtctataattatttagaaatccggttttgaatggaaagtcctcttcattgaatataacattcctggatatatagattctacccgtggaactaaggcatttgtaccctttatgagcatcactatatcctagatttatgcacttgaccgaatggaattggaatttatgtgttttatagggacgaatgcacggataacatgcgactccaaagactttaaggaacttgtaatctggtttctttccatggacaatctcataaggggactggtttttcaaaactggtgtgggtaatctatttattagatacacagcagtttgaaatgagtcccaccagaatttcaatggcatgtgagcttgtgccaagagt

SEQ ID NO: 87730 - DNA, 1683 bp, Cannabis sativa
aggattagagatagatggagaattttcattaaaaaacaaaagaaaaaaaaaggaagaagaagaaatagtgtgagagaaagatgtatataaaacaatctttattaaaaaaacaaaaaaaaaaaaaaaaagaaaaaaaacgtgagttgaccttaccaaacccacaagtttcaattccactcattgaaatatgttaacctaggatatagcgactgtcacaagggttataaatgtttgagttcaactggaagagtctatatctctagaaatgttacttttaatgagagtgaatttcccttcaaatttggctttcttgataattttgctgcagaaaaggaggtaattattcacacagtggtcacaactacttgacatacactttaccaaatacagccaacaaagaccatttgctcctgctgatactgctcaaacacccgtctctcaactatcccttggagctccatctgctacaaactagcagcaagaggttagtgaccataataacatagttgttgacactattgataacaccagtgaaagttctgatgttgcagaccaacaactgcctaacaaaagaaaaagaaatcatcctcatggtgttgatatatgtggatgatcaactaaaccatgtttgcaaacttcacaagtcgctatacggcttgagacaagctccaagaacatggtttgatcaactaaagaagaccctgcagcaatggaatttcaccaactcaaaggctgattcctcactcttcatctacatgacagatgaaatcatcctcatggtgttgatatatgtggatgatatcattataacatgaaacaatgaaaaaaggctgaatgagttcacttccaagttgaataagaagtttgctctcaaggatttaggaccactccactttttcttgggaattgaagtctaccgtgacaacacagggctatatttaacacaatccaagtatatatgatgttttctgcataagtatgacatgcttaatatagaaccgtgccccacacctatagttgtagggaaatctatgtcgaagtttgatggagaagttctttcctaatcctactgtttatatgagtgcaataggagctcttcaatatctgtgtcatacaagaccagatattgccttcgcagtaaacaaattgagccaatttctacaggcgccaaccacaagtcatcactggagtgcagttaagagagtgttaagatatctcaagggaaccatccaccacggtcttcacattggcttcagtcatcacttgaatttagttagttactcagatgcagactgggcatgttccctgatgacagaagatcatttgcagaatattgtgtttatcttggagaaaattagttgcttggtcatcaaagaaacaagcagttgtgtctagatcgaacaccgaataagaatatagagctcttgctcatggtgcatttgagattacatgggttgaatcactcctcaaagaactcaacttcaagcttccaagtactcctatcacatggtgtgataaccaaaccgctagttccttagcatcaaatctggtgtatcacacaagaacaaaacacatagaaattgacatatatttcgttcatgataaggtgctgaagaaataattcgaaattttctacattccctcatcagatcaagtagccgactgtctaactaagggattagc

SEQ ID NO: 87731 - DNA, 537 bp, Cannabis sativa
agcatccttttatttttattttttggaattattatagaataattaaattaattaattaataaaatgaaactaatttattggttctaaatttgaaaaggtccaattttgtagacattaatgagtctaattaacattcattggatattttttaattatttgttttagggtataactataacttatatgactttgtacttatattaatggttaagaaaaatgatttgagagggcgagagatagcactaagtgcattttgggaagatttatttccatttcataaaatgataaattcatcttattattaaaaaaaaataaataaactcaaattaattttatgttcattaattttaattattttaaatttatcttcgtattttttttatttttctaataaatgtcataaaatattttattttaattttgtcacttaatatttaaattatattttatatgggaattttttgaagaatatgagaaaaataaaaagaaaattattataaattaaagacatatattttagggaaattctacaatgca

SEQ ID NO: 87732 - DNA, 678 bp, Cannabis sativa
ttttttttttcttttttttacattgttacagaattttacatagaaatttctattgcttctagcggatcaacctaaattgcaaccaaaaatcgtataacaacccatataaaaatcaccggaaaaaccactttaaaaactcaagccgcgtaaataaaaaaaataatatatagagtaattttcctaaaataaatattatttacggtgacaatattaatatttgatttgttgtgagtacttattctagctctcttgttttaataactaaaagtaagaaactaactacatataactatctcatttagctatattcttatttatttataatgttaaattattatttgtgtgactaatatttataataatacactaattataattattgtttcgatgaacgttatgtaacatatgtactattatgatatttttgaaatcataaatttttaacttttactcacaaattcataaacattaactttttgtaatatatattatgtttaattcttcattttatccatgcatggaacaatagagttgttgaaaaaaaaaattgaaaaattatgcataaagtggaggcatattgtagcgtccatatctcctctaataaggttaatatttacattaatgcatctaaagaaatgaataattaagaattatactataatataattcaataattgt

SEQ ID NO: 87733 - DNA, 1016 bp, Cannabis sativa
caggtaatgcctcactgtcaaatctattattggcataatcatcagacccatcaaagacaataagttcttcatccctagagcttgaagcatcaaagcgagtattacatagtggcatctctacactctgagtaagtgggaatgagacttcttcaatatgactagatccatcatccataatgtttccaacctatgcattatgtgttagggtggttagctgagtataggaatgggtcagtcaaaaaggcgagcaaattaaggaaatattttctccacctccaccacttttacgttaagtgtggattattttatcaacaaaaaaaaataattaaaaaaattggttataaagagagagggggctgaacagttaacaaaagagttttggaaaaattctttggaaattgatacgtaagagtgaaacagaaaaaaaaaaaaaaaaaaaaagatttgagaaaagaaagaaagaaaaaaactgcattattccaagttatttttcaaactctacaagggtaagtgtagatacataaatggatctacctctttttcttcttcttagttctttttatttttgtttactgcaaagagtcattccaatctcctttgattcattccaatctcctttgattcactagacttcagaaaataagttgatgtgatatataatcaaaaggggaaaaaagagactaacattcttacataatcaattttcatcatatttcttatatttctctttgattcactagacttcacaaaataagtcaatatgtgatatataatcgagaagaaaaatatgaatttttcatggtgttatgctgcctaattcatgataaatctttatgggtttcctttagttcattagacttcagaatataagccgatatgtggtatataaccaaagggaagaataaggaattcaaaatcattatcatgccgtcaaaattatcactgagcgtgggtttcttaaaaaaaaataataataagagttgaatagaaaattcagttgaatatgtaaattaaac

SEQ ID NO: 87734 - DNA, 638 bp, Cannabis sativa
atcagtctctatgtagtgtattggtagttgaatgtctttgagccattgcaagctataaatcaaagccatagcttccattatttctggtctaaagcatccttgaaaaggcatagccattgcagctattatgtctcctgtgctattgcgaaggactgctccgaagccagttttgttattcattgtattacatgctgcatcattattaagcttcagtcgacctgatggcggattcatccaaggaggatcattaagcggcaatctggtagatgaagcagcagaggccacggctgtaactggtttaatatttgcagcatgatattcttccaagtaatcgacagcaaagaacaaggccatctctggtggttttgttttagatccatgtctctccttgttcctctcattccaaatgctccataggatagtagcaaaatgctcaatttgttttgtggaccatgaggaggatacctactgtaaaaaatccataagagacatattacttgacaaaaaatcattgatggagaaagttgatatctgccatattttccttggtcgtttgcaaaggaaaagtgcatgtatgattgtctcattcgatctgtgacataaggagcatattgccgagtcacttatatgccttttgt

SEQ ID NO: 87735 - DNA, 505 bp, Cannabis sativa
caaaagcgaaggaaaatcacacacaaaccaaagacacaaagtgcaaatagtacacaactattacacttcatgtacaatattattattctaagcacaccatatataggcttcacacaaactcaagacgaaacaaatcactcgaacattagcctaacaatgtttgtaaagactctttatgacaaatgacagacatcgagtagaggattttgccaatcaaaaacgaaatcaatctgcttccaactgtccaactaacataaaagcttccagaaagtgggacaaccgtctaaaagcttcaagaaggcaagatcaacatcatcaagagatagaagttgaagaagctcctcatttattgtagctcattgatctaataacataatagaaattataagaataacatataacacttaacaattacagaacatttaaattaaaatacaaaaaaaaagttacctgttgagtaaaagagactttgttactaatgtatgtatatgataggtatgtgttg

SEQ ID NO: 87736 - DNA, 1523 bp, Cannabis sativa
tctatctaccttcactctccctgggaagatttgccattggatggactgcatggtgagaagattctggtggactggtggtcaagaaaagagcagattttatgcgccaaaaagttgggaaactctctgtcaaccgaagcaaaatggaggtctaggatttaggagatttggagacacaaacaaagctcttgtggctaagttagcttgggaaatggcgtgtaatgaggagaaactgtgggtgaaaatctttaaacaaaaattctgctgttgggaatcattttgggaggttaggactatcattgctaatggaacggatatcaacatatggtggcaaccatggatcccatggatgagttatgatgagtttcgaaacacaatggaggaagtcagattgaaggctccacagttgagactagtggccgatcttttaaaccatttgcaaacaagatggaatgagaggtatgttattcacttatttggaaggaatttgggcgagttgattataggaattgacatagttaatgggctggaccaggatacgctggtttggaaaagggtggcatcgggaaaattcactgtcaaagaggcgtaatggctggacaatgaaggtcgttttgggcctgtgctcccgggatggaggttaatatggtcaaacaagatccatccgaggatttgcctatggttgtggagaatgtgcaatggagtgcttcccactcgtgacaaaattcgaagaggtaatgaaattgagtgcgttatctgcaattgtatgcccaagactcctaagcaccttttctttgagtgccaatttgcaagaggtgcatggtttggcagtcctttagcagtgagaagtgatgagattcaagggaatacgatccttgataaagtggtgaacttgtgtaaagacagtgaaggggggagtttggagaaaatccttacttgttgttatgttgtctgtgatgggatttggaggtatagaaactccctggtacatggtggaaagcagatggagctaggccggtttttggaaggagcgaatgcaaagtttgaagagttcgtttctgtgcaacatgatcttgtcaacgctccttcagccctggcaaaaggattggtgcaagtggctcccttcaattcaaatttcattgtcacggatggggccttcaaggatgggtggtgtggaatggcaatgatggggaatgactcttgacaagagaagtggtacacaatggcggggagtggagaaggtaaatctaccttggatgctgagttaaaggcaatcggcttggccttggattgggctattgagatgaattggaggaatttgacagttttctcggattgcaaaatggttgttgatgctttacagcaaagaaaagtgtcggattggagagtggccatttcgttctataatgatatggaaaagttgaaaatgtttgagttttgtaatcttaagtttgttaagaggaactgtattgcttttgttaatgacctggctgttcaagcgagggtcctaagattggttgattatc

SEQ ID NO: 87737 - DNA, 524 bp, Cannabis sativa
tctcggcctcctcttttggcttttcagcttccttctttgttgtctttgcttcttccttcgctttctcggcttcccgcttggggcgggtaatctcttgttgggcgttgtctcgttgctcacacagttccttgcattgggatattaatttgtgagtttcacccttcaaatactcaagccgctcaaagagtagtcgattggaagcgaaagaagcaaaggaaacctggagaattgcaaaaagattattataaaagaggtataaaaagatagtataattatattaacaaagccgacataccatgaagtgacagtccaaggtccttgaaagcatctcctctagattcctaagattgagaaaatcccaatgagggggaaggagagtttgaagtttgagccaagaagcgaccctgtatgcttgggcaacctcagagccagcttctccagttgcaatcgacagggtctcgatggcccgactcagagaagcagtaacgggcgtcgcctcagtatgaggggcattggcatgagga

SEQ ID NO: 87738 - DNA, 821 bp, Cannabis sativa
aacaacctgcggtttctaatttttctggtaaaaattcttttgttcctaaagatagttggatcatagatacgagggctacacacatcatgtgtgccctgatatttccttgtttaaaactactcatactgatcctaatctaaaaaatgtcctcttacctaatgctttgcatactaaaatatcttgccttggaataattgttttaacacctaatctaattcttgaaaatgtcctttatgtgcctagtttcaagtgcaatttgttatatgttaattctctaacagctacaactgattgcactttctcattttctcatgaaaattgtgtcatccaggatactttgaagaccaaggtgattgggatgggtaagaaaattagcaacttgtattacttgcattgtaatcagatcagtaataagtaaagtgtttctgttttttcttccatttctaattctaaagtcactgatgacactgtatggcattatagattaagtcattcctcttgtataaagactcatcctttgaataaagccttaaaatttcatgccaatttagattctctatttcattgttctatttatcattatgccaaacaaagaaagttgacattcatttttaattccaatattgctttttgatcttattcatgttgttgacatttggaagctatataacaccatgacaactgagggataccacaaatattttatgtgtgtacactcataatcttttgattttttatgagttttacatggattccaaacactagtgtaattatagtttcaatttagacaggaaaacactgagattaatattgggatggga

SEQ ID NO: 87739 - DNA, 800 bp, Cannabis sativa
aagcggtttagattgcacaagacccttcttcctccaatagtcgaagataggttcagcaatttccgagctttcacatatccacaacctttgcctcgtacgagtgacagcaacatataaatgtttgagttcagagcatagaatattatgtttggactcggaaaactttggaaagttaggtatggttttgtcaaacaaatctcgctctttcatgtattcgtatatgaccctccactgattctttagaggagaagaaccaaaaaagttgtacagtaacacatcctacagaagcacaagaattaacattatgttggaatgtttaacaatctcagaatgtgaatgcataattgaaagttaccacaaacacaagctaatgtagaaattacctgaaattcaagccccttacactccaatacagtaagtagaagagctttcttcccaacataaccagcaatttcctttcgagcattgtcatctcttaccaaaataacctgctctgcaccaaagccagcaatacttctacttgtctctccactgttaccaaaaatctttatgattgcattttcatcatccacacaatgaagcagcaatggagattccccgtatatcaaactggtttctggtttcaaaggatcaatagaatgtggaaagaaatgataaataagttcaattatgctttgtgacaatttcagaagccagcatgggtacgaaagttttgggacaattggaaaatatcagagatcaaccctttctcttttctctctccatcttcactcttttgttccaatacaaacttcttgtag

SEQ ID NO: 87740 - DNA, 1731 bp, Cannabis sativa
ttattattaaaagaacactacattcctaccccctagttgttgtcaccttttcataacaaccctatatgaaaactattaacactaatgcttcctaaaagtagaaagaacttctgatttggccgaacaaacacctttacacattggccatggagttatagcatagtttttgacaaaacaacaatacacaaccctgaagaacatcgtccttgttgtaatactatcattcatcaacttttacttttaatatgagtttgtggtaatagaaagaagagaaaaaacacacccaagaactatgcaagtcatagtgaagtataattttagcaatacgaattagtgacatcatactagtaaggctgctcacctcgaagattagacttaaacccgcaatctgtcaattgctttgcaagtgcctcccctaattcatgttgccagttgggaacaaccttggcttcagcaacaggccacactatggctgtttcagttgtgagattaacactagctgatgacacttgaggctaccaaaaaaacataaatgcagaacacaaattcagtttacataataaagcagagctaactgcataatatcatctctctgtcccctcacccttaaaatctataaataatagttcaacatcttaaaagtttttcaaatctgtatctctcaatttcactttgcaaagtaattcaggaatagtaccaactgattaaactttttctatgaattcccaaatacccataaatccatcacaacaagaaaatctcaactttaatagaaaaaagcttacttgactttctaaaattctcttcacactagctgcacatcctccacatgtcattccctacaaattacacacaaaacaaaaaagatacacctttaagcaaattaatggcggaaaacataagtgcatctttcttctctgcttctggattttaattattttttaataaataaataaaagataatgaagaagaagaaacatacagtaacatcaagaataatgacgtcagaagcagcagcagaaccttcctcagctccactagcggccaatttcgccttcgcatcaccaccttcagatccactaccaccaccttctccgtcaccggaacctccgtggccgtcattaccaccgccggaagaaaacgaggcaacaaaacgacgtcgcagcggatacttatctgccgctaagggaattctagctctaaagaaggaagaggaagaaacagagccgggaaaagaggctggcctcggaagtccgtaaatgcgactgagtctccgttcgacgagtttagaagcgagtatgcagtaagtaagagctgcggtgttgatggtggaggaggctacgctgcgattgagtgctttggagatagtgaagagagaagttgaggtggttgccatagttgagaaagcggactccattggagaaagactgaaggtttcaatggtggttctctctcaagctcttaataataataataataataataataataggaactacaatttttatataaaaaataaaaataataataagtataattaatttgtgggttaagtgtcagggaattcgttggttattaaaatagaaacattcgttacaaaactgtatatatacgctgaaatatttatctatttcaaatagaaatatactaattctaaataatttacttttatcttttttttttcttgcaagaacttactttatcttcttttctttcttctaattaagatat

SEQ ID NO: 87741 - DNA, 662 bp, Cannabis sativa
ccaagaagttattgaatgatgagtgactttatcgaaccagctactcactatcccagtcagcgaggtgggaaataaaatacaatgtagattattcgagacattgttggatcgcattatggtatagaattttttaaggtgagcgattgggtctgaattcccatcatactgcgagacgtgagggtttatgaatccctaagggaattcaatgttaataatataaggatggaatggctcgggctcctcgtccgagtgataaccaggtaccttcccgtatttcccatcttggtatcacctgaactacagtccaactcaatgcttcgcaattcgaatggattttcttactgtcggttagcattaagttgttggcgtaagttgagtgcattttgatttaggcgctcgcgcaagttgggttgcctttgattcaaatcttcacaaacatctggttgtcttcattcatagttgctcacggacctcgtatctaactaactctcagattgataactcctcatatttctcgtaatatcttgatcagcataacgccgatcgaggtctgcttctttcttgcgtttgcctccctaatcaactttttcttgggattttatgccctaaataaaacccatttcaatttaatccgattagttatcaatagaagattagaagtc

SEQ ID NO: 87742 - DNA, 892 bp, Cannabis sativa
gtttaaatgggtctcacaatttttagacaggagaaaataataaaatttgattgaaatacggggaaaaagtaataattctatttgtcctacaaaaataaaaaaaagtaccccctaatattaaaaagaaaaagttaaaattacacttaataattatttatgttttaaaaaaatctgatattatcttatttaatttcaatacttatttttatattagattaaaactatgtgcagtgtaagtattcttaattttctatgtttaatttttgtttaggcaatgaattataatttttaattactagtaaaaatcataaatagtttaattgtataaataatagttaaaaaaataacaaaatatttaatataaaatataatggtaaatttttcttaaaaaaaaataacaattgaatactaattcataataacctaaatgtttcccgagaaacctcaatatatttaaaggaaacttacaaaaatattggcctaatctttacaaaaatactgccacactgcagaaattatttttatactatcttggccaattattttttcttttatactgtaaacacaaaaaaaaaagaaaataataaggcctctatcttccacacccacggatagaaccaccacaggaacaccagaacaatcgaaaaacaaccattaattccagtgagattgagaaaaaaaaaagtgaaatttacgtcaaataaataatcatgacaacacaactgtaaaacaacactaaaataaatcaaacaaaagaaaaaaaaaacatgattaaaaaaaattaaaaatgttctatgcagcctcaatacccaatgcaatagcagttatatttgcaagtccaatcttaaaaaatcagaacaaaaaaaattactaaaacaacacaaaaataaat

SEQ ID NO: 87743 - DNA, 575 bp, Cannabis sativa
  modified_base (478)..(482): a, c, t, g, unknown or other
gagattgaaatctagaaggaaagaaaaagtttgaactcgtcaccctcagcgacagcgcaagcttcgttaataactattagtgtttaccaacataaaattatatatatatatatatatttgtaagaaaataaataaataaattaataatggaacagttttggttattgtggttttgaatatgcaacaattgtttaatttattaattaagttacatctttattttttgtatcatgtaataattgagtatctattaaacaaacaaattattaaaaagaaaacaagaagttagtatcaatgatattattttaaatgttaatttaataataaaaataaacagtaattaattaacataaggtaattatttttagtataatggatgtaccatttttttaatcaatcatgttaaatgtacaacaaagacatctaattgcccttttatctatatttatatatttcttatatctttatatattaaaannnnntatctaacggcatttcttggtttaacattcttggtttaacagaatatgcttaaaaataaaagaatattctgttaaatttaacgattaggtttg

SEQ ID NO: 87744 - DNA, 563 bp, Cannabis sativa
aaaaaaataaaaaatttcagtatgaggtgtaaaaacctcttatttttacttatatttgagtcagggccgtcctaagcgattttagaactttgggcaaaaaattaaaattagactttttataaaaaaaaaaaaggagttttttcataaatataaaaaattttaataaaatttacttttatataatataaataaataatacaaaaatatatgagattaagatataatcaaagtttaaaatatgaagaattaaaaaaaagacaataaataaatttaataaaacttttaaaaataagcatcgccagaaaagtcttcagaaagtcatcggtgccaaaaagtcattggtgccgaaaaagtcaccgacactagaagtcgccgtaaaagttaccgaaaaactcatcggcgcccgaaaagtcaccgaaaaagtcatcattgtcaaaacaatcaccggaattagatgtctcagatataaattaaaatatatctggttcgaataaaagcaaataatacaaaataactcaaaccggttataattaaaatagaatcagttctataacataatgaat

SEQ ID NO: 87745 - DNA, 1052 bp, Cannabis sativa
catatacatacattcgcatatccatatcacacattatatacagttcttaccttctttctagagtcaagtgtgttggccgacctgaacggaaagtcacgtgctggctggatgtcctaatcacatattagaactaggtaaatcacatgctcaaaaatcctaatccgggaaatccaaacctacaactttaggttctgttatacctatgaatcacactaactaaggaaatagggaaacgcccaactacgacactgaaatggacgagaattgagacaactgatttttcggagagccctgccaagaccggtttaccgattttacaggtactggtaaaacccgtaaaccggtttttataccagtgtccccaaaaattcaccaatttgctcaaaacttgtccaattgccaccaaactttccagagtacctaaacaatgtatatacaacatattcaaaacagaaaatcacataaaaatccaatgaaactcaacttgccattaaagaccaaagctttgagttcaaaactcaaatttgcataaaacaaactccatacatgaaaatcacctgcaagaagctaaaaccaactcaaattaaccctataattcgagccctaaacatttctaaccctcctaacaaacagccatccatcaattaattctctctcaaaatcacatattcaaaccaagtaagaacttcaagaacttaagaggtagagatgctagggattaccttggtttaatttctcgtgaatcccttgctgaaataaccaaagttcagcaacaaaccctcttgctttgggctggttcgaagaaggaggaaaggaagagagcttttttcctaattttcttctaatttctttaatttcctttaatttctctaagtgaaataaaggttaataccttaaccttggctaaagtaatttaaggctaggtgtcaacacctaaggcagctaccaaacacccatgcggaaaattactaaaatgcccttaatcttacaacttagttatttttcaaaactaggggtaaaatggtcaaattccataaccccgattaatcccg

SEQ ID NO: 87746 - DNA, 532 bp, Cannabis sativa
atgattactctcaatgtgtatggtgaaggtatgttttcccatgatcatttttttttttttcaaaaactaatgacagttagcagagaccgttatataatcaatttcaagtttaatataagaagacttttttaataacattctcttgaatagttttgcaaagaagataaaaagcttgctgtcttcccttcctaatgctattttcaggcacattacaagatgggataatgaagatgcccatgccttgcaaagtatgcattaggcttagattaggaagcttgttggaaagatcaaaatttcttatgtaatttgtatcctgaatgttgatgcttactgcaatggatacctattttctttcaaaaaaaaaaaaaagtttaatatgggaagacttttttgataaattaattaaatataacaaatacaaaaaaaattaattaaacatcattgattttttataattaacataatattgaattttttaatgataaagttttttttttttttgtttttgcagaaagcatactattggattgaa

SEQ ID NO: 87747 - DNA, 539 bp, Cannabis sativa
tcgctaataatagtattagcaacccattattatcggaagaatccgccaataatatttaataccaataatttttaacaatagtactggtggaagtttccaccggtacaagtcttaaatattgtagtgttcttgacaacataacaaaatatgaaaacaaagttacaagaagtaaactccatagcatcagtgggaaggttacaagttcttttaacataaaaaaatttgataaaatcaaaagcattaataaactaataatttcaagaaaaataggaaaagtagaacatttctaacccagggaacttcatgcttagtgcatttgaaccaagctaattttgataaaaagagctttgttcatgtcttcaaaccgacggagacccaaacctccgcatacttgagatgataaatagaagaccaacttttaagtgtaagaaactgtgataatattatcactacaattaagagtgttaattacgaccttttaacagttgaaataattaatttcacccaaaggttagtgtttttctccaaatttagtctta

SEQ ID NO: 87748 - DNA, 1261 bp, Cannabis sativa
ctaacccaacgaggctcagagatgcctctgaatcgaatggtcattcctctacggaggggcttggtgatatcaaacagaacacggagtcgtagataaggtccaaagttttccactaaggaaagagggaagatttccagaagatcaccaatttcgtcagcgataaactgagcgagttggggacttttacggccaaacggaatgcggtggacttgaatccaaaaaggggtgtatcgaacagagtcaggagtcggagttggagaaacatccggatgggtgaagaccatcaagaacttgtcaaaatgccatggctgctcttcaagcacacggcgcctatccccatcacattggaaagaagcaagataaagcccagagtgatactcagagatttgacagggaaaacgaagagtccaagcttcggtcatggctttttcaatccaagagggtttagctggtttgggagataagagcttgaaaatcaagcagaaagcatcagtatcagtggaagagtggatagaaatgtgatcaaaatcatgaacaagactatcttcatcgtcaagagcggtaatggggttaggattggttgaagaggaagccatagcaaagtggttggtaagagtggatgggttttcagcaaagtttgatacaggtgtgcaaacagaaatggaaaaggcatatatataagcgaaaatggagagaaagaagagggagtaatacctggagaagaagggtcgcctcgaggagtggatgagtgtctgaaccatcatttcacagctgggtaagacggtctggaatcgacgctgaagagtaatgatgatctttggtttagagaggtatagaagcaagatgacggttgatttagaaatagaaaaacgattcgaaaatcgaagagaggaaatattggccaggggtattaaatgttgattagaaggagccgccaaaattaaatgcaaatgagagagagaaatggcattgaacagtgaagacgctcgagaaattagggaaacatgcataatgattagggtgacgtattaagaaaagtaaatccaagcaattaataaggatgaacagaccaaatcaaaatcggagaaagaaggacaagggaaaatcagatggaaacaataataaatgcaaaccagaagaaaataggccagaccaggagaagcaacagagagacagaagagagaaataataaatgcaaaacagagagaaaaaagaatgaagatgacaagataaccttcaagaacacgaaccttgagatgaa

SEQ ID NO: 87749 - DNA, 657 bp, Cannabis sativa
  modified_base (64)..(80): a, c, t, g, unknown or other
ttcttatttataactgacccaaatcggaacttgattttcttataacaaattagaggttattctnnnnnnnnnnnnnnnnnaatagaggttctactgtagtatatgattttttttttcatttttgagtgtatcaattgtttagttcatctgaataatacactaaataaaaatatataaaatttcaaatagataatgaattaaataatttatcataaaaaataagtacaataaacaaaattgttaatatcaagtctaaataaatgctagtaactcaacaacaaaaaaatatccgtacaataaataagtaatctcaaacaattatctgtatttaaatatcacctgttaggctttttatttaggtttacattaacttttattgattttattaaaacttgagttgattgaatagttatttgttgtgttaacgcatattgttagtgatcaaaagttattgggcttagcatctgcatatataaattctacttgaagcagaagtgtaagacccaatctaactagggttatgtagctaatctctttcctaattgagaaatataagtaaatgatcctatttctaactctatagatagttaatgtccctttttaaaaataataaaacaaggggagttatatttacaccccaaaaatttttaagtacac

SEQ ID NO: 87750 - DNA, 985 bp, Cannabis sativa
tgtttgaagccaagaagggaaatgtggacctatcatgcaacatctcaaaccaagatgttggagttgaaaagaaggaacccagttgtttccaaatttcaaagtcaaagagttgtaagataaatcaaggtgttctaatttggagagtttgtcaagatgtgtttcatagacaactccactgaaggaattcccagaaatatctaataactcaagacttgagagcttgctaatactttctggccatttcccattgaatttattgtatgacacatctaactctttcagatttggaatcctagcaatatctatatggacaaattgtcctgttagattattatgaggcaaattcagaatttctaaagagttgctattgcaatgaatgaggcttttcaagatatcagtgatggtacttgaattgaatctattgtcattcaagactaattcttgaagcttacaaagattccctatagattttggtacttccccaacaagtccactcaaatataaatgccttaaatatttcaagcttcccaaagtatgtggaataatatgatcataattatttagaaatagagagagatcaataagattattgctcaaattaagcaaacgagaaactgttgtagatccaaaactactcctagagactacttcaagagttgtgatagaattggtagaagaatttgtattagtgtgagaaaaagtggaatcataatcaagcattggaaattcacaatcatgttgcaggtgtaagtttaataaggagggagctgttctaaatgaatcaaaccagtctatggctttggtgaaacaagaattaagctttaagattctcaaattagagagtctagaaagccatgtaaaactattagtactcaaactatgataaacagaactaagatcaagaatatccaatttggtgagatttcctagttctggaggaataattccagtaagaggattccctgaaaaattgagatattctaga

SEQ ID NO: 87751 - DNA, 713 bp, Cannabis sativa
  modified_base (664)..(678): a, c, t, g, unknown or other
acctacgggcctataaatacctcccatttttatgtacaaaggaaggacaattttttacttgcaaaaactctgctaaaattcctagagagctttcttcttagagaaaaacaaaaggaatgcaaagattgttattgtaaacacttgtaatactcaaatatttttcaaagaaggctaatactattgactaataaagatcattaacgcttgaatcacgtaaaaaatttgttaatctattgtttaatattttacattcctttaagctcttattaatccgttttcaaaaatctcagttaacattttggtgctttcattgagagctgaggaaagctagttagttgttgtctcacttcacctacggtgaacatgcgaaagaataccagtaagaaagtgacactggacacagtggaggctaactcccacaactctgacctccaaattggtggtgtccgagaagaaggtacaacccgcgctaagactcgaggggaggatactgaggacgtacttgattgccttagtgatggccaatacctcgaatgggaagatgaagaaggtgaagacgatgaatatgtcagagataggtattacaaagatgggtatcactatgactgtaacaccctaactagcataggcgtgttaacatgattttaaacatactgtgcagctnnnnnnnnnnnnnnnaggttaatgaaaatcgtgattaattaaaatttgct

SEQ ID NO: 87752 - DNA, 897 bp, Cannabis sativa
cttcatcccgatcttccttatggtccctggatggaaggatcgtctttgcccaagtctagttatgacagatatcgtcaagatttctcaaaggaggggccatggcctttcataactcgtcttgctcgaaatactatcaatcccataatcattatccgagacacttgcctgctactcctgttcgtgttactaatactgaaaaaggcaaaggagttttggagtctactcagatctttgaaactgctaataagagtttccaacatttgcaattgattagccctcttacatcggttggtgactacaaatctgatctggcttcctcttctggatcgagagacactgttattgataagcatgatacccataattccactaatcattccttaaagcagcccattcattgcactaaatcgtgcaatattgtgtctcaaaccaaaaaagtcatggatttacattccactaccatccctccccatactctttctcaagaattaccaccagtagcccctactccacttatccctattgccacttatcctcctcccactattcctatatcaaatacttccgtccctatccccatgaatataccaccagcttacttacacatatccaactcatcaccacttatgtcccacatgtctgatgctcctgctgccatgacagtcactgctgatccaactctgctaacagaaaatcggctctcatccatcttcaacaaaagacagcttactacttcgggaggtaatgtccgtaccattctgaagagatgtcgcaccagagtttcacctttagcagatactactaattttcctatgcaccagcaaccggacccttcttctgaatttcccagcaattctttgaaggctgatggcgatgatgcttctttggcgaaggctg

SEQ ID NO: 87753 - DNA, 577 bp, Cannabis sativa
catcatctcctaatattacccctgcggattgctttctctttgcatgcaaaaacccagatcataaaaccattaaaaaaagctaaaaatgtcatttttgaaaccaaaataatcatatataatagtaataataatcattagccttattaattttcacattcagatttataaaaatgtacaattgtcattagagtgagtcttgtacctttgtctttgtacttttcattaaactaaaacaaataataaacattggcaatttggcattagactttgtactttcataaagaacatacagctccttgtagtttgactgtgttaaaccactgcaaaataaagataacaaaaaatataaagaacgcaagaaacaaaaatcaagttgaacacacaagtaccatagagaaaaagggttgttgctattagaaactattatagtggtccctctttagaggttccaaatataagcaaacagtatgtacttaattcgctctaacatagaacatggagctccaagagggtgacatgtccaaggctttagttgccttgaatccagaagctgcctccatccctatacctaaactga

SEQ ID NO: 87754 - DNA, 537 bp, Cannabis sativa
agtttgtgaactaaagaaaatttcagcagagttggctgaggatatgactagagcgggaattgaatttgtaattggaaaacttgccaatattagcttgcagtctaattttttggaaagaattagaatggctcaacaaggtgatcctgagttacaggggcataaggagaagttagaggctgggtcggcaaaagacttcacattttcatctgataaattgttgcgatataaggatagaatttgtgtatcaaatgacaagaatatcagacaggagattcttgatgaatctcatactacaccgtaatccttacacctgggagaaaccaagatgtatcatgatgtgaaagctttgtactggtggccaaggatggaaagggatgttgttgaatatgtgtcaagatgcttgacctgtcaacaaattaaagtcgaacatcagaggccggcaagtttgcttcagcctctaaagattcatgaatggaaataggaagacatcaccatggattttgtagtgggattgcccagaacaatagggtattatga

SEQ ID NO: 87755 - DNA, 923 bp, Cannabis sativa
ctttgaatttcttgaagttctcgaacacttctgatttctccttcaagaaataagcccatacttttcttgaaaaaatcagcaataaagaggaggaagtatttactcttaccaaatgagtttggtttaattgggccacaaacatcagtgtgtacgagctcaagcgactttatggctcttgattgtgactcctttggaaaacttcttcgagattgctttccaagcaaacatcattcacaaagttgatctggttggttgatgcatggaaggcctctcaccatctccttcttctctaagagtttaagcccgccaaaattgagatgttcaaagcatagatgccaaagccatgatgactcattgtagcaggcctttaaacacttcagaacatcatgttgaatattcaagagaaacattctattctttgtaatgggaacttcggcgatcaattacttttatcatctcttaagaaatagttattttattttaagtgaatatcataacctttctctagtaattgacccaaactcaaaatattatttttcatgttgggcacaaagacatttgagatgaattgatggcctccatttttcaagcgtataagaatcttacctttgccttccacgggtacttttaattcatctccaaaagagacattcccttttaccatttggttgagctccacaaacattcttctttctctgtacatgtgattgctagcgccagtgtcaagataccatttattttcttgagcttcatctttgtctttgcaggcaagcaacaaagttctttcttctccacctttgtcttccacaaaattggctctttcttcgaccctccttgatctacattcggaggcataatggccatacttgttgcaattgtagcatttaatgtgagatttatcactccttgacaatgagttgcct

SEQ ID NO: 87756 - DNA, 650 bp, Cannabis sativa
aacaaaaaagaaaaaattacctcatgtaaaggtaacttttggtgttgtacttgttttttctttttttgtagctttctcaagagcacttttaggttttgtagatttaccacgaaattttccttttaatttcactcctttgatagtgttgatatcttcatctcttcccaaaagttgattctcattcttttgggaacatacttatccatttgaactgatatttctaatttcaattcttttcaaaccttccaaaatatttttaaaaccactgatagcataatcatagttttttcatcctcggatgcctttgttgctatatgagttataaatctacaaatctctcgataacgagttgccatgtgttgactttaggatctttattgtatacatgttgcacatcattatctaattcacctccaatttttgcatcttttgtccatcttttcaaaatataatggagaggaattttcattacatttttcccagacaaaactttaagagcatgtgagcataatatacctgtaaactcaaactttgtgtaagaacatgtcacagtattatcagttgaatcaaaatgagcagtacgatggagatacctttcctttgctaggacaactttgtactttgataatgtctcattctcaccacataaa

SEQ ID NO: 87757 - DNA, 752 bp, Cannabis sativa
tgtttgtgttcggaagcggtggaaagcggcgttgggcctttagagagtcatatattgtatgttatagcacttttatttcgaggttttaatgttagggtattggtatcgggttttgaccggaataaattttataactaaatgtccttagaagtttttattgaattttagaattttcatatggggtgattggtggcttaatgttctcttttattattattaattattctttatttttaaagtattactcagcccaatagctaagtctattaagtaatagatttatataaaagtttaatttttattctcttgaaagacctagaaacaaatatcaaaccatcatcttcttcactctctctcttgctctcgaattcctaggagcagcttgaagctgtgattttccaactcttcaatcaataactccagctgaattcttaaacctcaactcaaggtatctttatttagctatctttttcatgttttcttaggtttaggttgagttgtgagagttgagttattggtttttttttgtggttgtttgttttctgagtcattctaatgtgtaacctggtgttttatatgtctttgctgctggtttggatcaatttaagggagggttaccttgttgtgagtcaattggagtttatgaacttcaatttgggctctaatggtggatttatgttttgacttgtttattataaattgatggttggaatgtgttatttggggtataagcaggtattctggaagttata

SEQ ID NO: 87758 - DNA, 623 bp, Cannabis sativa
  modified_base (584)..(598): a, c, t, g, unknown or other
ttttttaatttgaaaaaaattaaaaaattacgtttctttttctttttctttcttcttcttccttcttctttttctgcatattggggattcccttggtgatagggaactggtgaccaatctcagggcagataagggtgccttcttcgaggtgaagttggaggagggcgtggtgaaaacggcaaaggaagtcgtcggagtcatgcatacaaggatcaacctcgttggggagctcagtgtagtcgattgagcgagccgccttgactagggcgttccagtcaattttggagaacatggatttgagaaaatcggggtttagttcaacctctttctcgactactttcaccacttcgatccggagagggaagccattggtgaccccaatgatgttagaggacagcatgttatgagtaaggagtctcatattgtacaactattctctcttccaagctttagagactgatttcaacacaacaaataaagccctaaccctaattataacctggtttaaaataagagtatcccactgttgcaattattttaccaggatctagatttacaaccaagtatgttttattaacatcctnnnnnnnnnnnnnnnacaatgaaaataaacacataagagt

SEQ ID NO: 87759 - DNA, 755 bp, Cannabis sativa
atatatatatatatttataccattctctttattgaattgagggtccaattaagcaccattatttttcccaatgaaatggaattgtgattactacagataccattaaattaggaaaatgatgggaatacatgtgacagttaatgagtacaggaaaaccaaatataatggcacctatttttatctatctagtctcactttggtaagtttttattattgcaaatactacctttttttctttcgaaaaaaaaatgacacttattttttttttggaaagttttaaataccaccttagattgtattatatcctaactcttggctgcttttactactacccttattttttttctctctctaaagaactctttctaattattttttttagcttcatgaaataaaaaaattatcccttattattagttataataataataataagttatcaatagaaattctcataaatatctcttattttttttttttgaaagaagtgttctttattaatgattcgagcaatcgctcataagaatagacatcaagtccaaaggaacattgttaatggaaaacatacgctcagctagagacacagagtgtcgggcaacatagtgcgcatcacaattcgcaaaacgcttaacaaaaactaaggaaacattactcatactatggagaagggtcttgcaatcttctaccactaaaccgaatgctgaagcaaaaacctcagcactacggacagcttcagcacaaaccaggctatcggt

SEQ ID NO: 87760 - DNA, 689 bp, Cannabis sativa
ctgaatgttttattttaaatttcagatcagcactatacaaaaatcacaacatttttgtccatttctttgtttcaaatttgatcaccttccaaatcatacgttcttctcacttccaccccaattttactaattttattatgaccttaaattcataataactatatatgatggattatgctcctacagctgagtggaatatgatggatttcagtttagaaaaaggaggtttaatatctacagtagttaaaatttttgtttgttgtaataatatttttttcctattcgttacaacaatttgtcggcaattatttttagggatgagacttgagcagaagattaaaaataacagataggaaaaggcaaatgttttacaacgatgaggaaataattagtggggcaatctccataggtgtattattttggtgttttgctctaaaaaatggcgtggaattttcgctcttagagaacaccaatttagtgaagagctcggaacttttgtttgaaaaaatagggaataattgcggtaacaattttcaaaaacttaaggttgatcagattagtctttaattttaaaaattgggagtaatagtcctaaagttactatttttgttaatctattggctcctccttttaactgatccattttttttttttgaataaaggagtttcattaaaaattaacaggcatc

SEQ ID NO: 87761 - DNA, 656 bp, Cannabis sativa
  modified_base (359)..(376): a, c, t, g, unknown or other
taaggggaccgacagtggtaaccctgattacaaacggaaggctgaggcttccgaagtatcagggggttatagaaagcatgggggaattgaggtggccgtcaaggtcatggatcctctttcagatcatgtctagaatattcaaaatgcaagactaccatcagggtgaatgatgggccaaggctgcatactatgtttgatatggattatataaatcggatgttcaaggattacctgaatagatgtgtgatcgtgtttatcgataacatcagagcaatttttgcaaaggttacaggatcataagctctatgctaaatgcaaaaagtgtgaattttggttatctcgtgtctcatttttggggnnnnnnnnnnnnnnnnnngggatcatggtggatccagccaaaattgaagctgttcgagattggccaacaccaaaatcagctactaagatcagaagttttatgggtttagctgggtattatcgtcgattcattgagggttttttttcaaaaatagttgtacccttaacggagttgactcaaaagaaccagaagtttgttgaactaatcggtgtgagaaaagtttcctggagttaaagcaacgcttaattactgctccagtactaactcttccttcagataaggaaaagtttgtggttta

SEQ ID NO: 87762 - DNA, 541 bp, Cannabis sativa
tataatttgttatttaattcattttcaaaacacatagcgaaatatttttttttttaaaaaaattaagttgctgatattttaatttaccaaatgtgttcaaaagaatttgaacttgttttcgacactgtaaattattcggaaatttttaaagatttacaaaaatagtactcgttttgctaaaagataattgatcttcattgataggcaatagtcaaaaaggtacaaaatatgagcaattattcatgccactagacttttgcttgtttcattgtcaaaggttggctaagaaaatgtgcaatggtgtgtgggcaactttgttacaatgaatgaatgagatagtatgggaagttctacataaattaacacatccgcaaacaatcagtttccacaaccatagacacaagcaaagaagaataccttgaatcaccctagtgctcctgcagcatagggcctcattgtagaagagaaaggaatcttaagagttcaaacaaatctcatcacatttatgagtaaacccccattcccacttctatgtttaggg

SEQ ID NO: 87763 - DNA, 5988 bp, Cannabis sativa
tttatacttttccatcttcccctgaaaatttcaaaacaacttgcattaagattataattggttcgcagacgcaaagtctgcaaattcggtagctctgcaaaaccaagtggaatccttccatgcaagccaccatcacttatatcgacactcagaaggctgctgatattggctaaccaatcaggtatttttgagttgaaattgttaaaactaaggtctaaaacagcaagtgatgttgttgaattaacaaaagaaactgagggaaaaggaccctttaagctacaagaagacatatgcaactctgctaaggatgggagcttatttagtattatcccaaaccaatctaaacccaccattgaaaggtcaactccatccatcttaagatgctttagagagactagacctgtgatccattcaagattatcaacatataataattccaaggcctctaagtcaaggtactccaatctagagagatttcctatatttgaaggaaaccaaccactaaaccttgcataagagagatttagatacctcaaatgcttcaaggatccaaaaaagccaggaattgggatgttcatgaatgtgttgtaactcaagtccaagtgtctcaatgacttgagttttgtcaatgaaggccttattttcccaccaaacccccagaagtgatcatacctgtttcgaagatcaactgtaataactgttcctgccttgttacaccctattccccaccattgacaacaattgctgctgccattgttccatgatccaagcttgtttagtggatcttcaagaccagttttgaagtcaagaagagcatttctctcatactcagaacaagtcacattcaattgattgtgaacacactctcctaatacaaagaaaaagataataacttgtaacatgaccattaatggagacattgtaacaaaacacaatattttattttagcaatgaaccatcaacaaatctcaacttattattatataatgataaacttaaacagtaaaatttaatttaagaagacaaaagtcaataaactttttaataccaaactacacgttctttgacttacttgactcaagtcaaaattatttaacaatagttactgtatttcttggtaatgttgtaattgttctatttttctaaatgtgatcaatatataatcctaaggcataacaaattaagaatatatagcgtgtttgacaacacttttttaattagttttttgtttttaaaattagaaagataaaaatatttttcaaaatcatattttataaaattgttttaattttttaattttttaattaaaaatcaaaattttaaaaaattttaaaacgaaaaaaaaaatcattcaaatttttttaaatagttttttaattaatatttactaaacgtacccctaatatttattaattttttaattagttggctgtcttgttctcagatcgtttgacaaaagaaacagaaacattaggaatggataaacgacacactgaacatatatgacaagaaaatttctaagtggtttccaaattgatttcttcaaaggtgagaataattagtggagagtggaccctgtgaaagaccataaagcaaaactcattgacttctgttcacatgtatgctaatatttaataataatgtatctgaattttcttttcaaccttaaaatttttctctcagttcaattatagaataatcactattgctagctcaaaattgtgttgaaatgatgcaacctgttaaaaggtttggattaatggtgttacaaactctcttcttcatattaggagattatgttcatggtagtgatgctaataatcagttgaatgtgacttgttctgagtatgagagaaatgctcttcttgactttaaaactggtcttgaagatccactaaaccagcttgaatcatggaaaggaagcaattgttgtcaatggtggggaatagggtgtaacaaggctggagcagttattacagttgatcttcaaaacaggtatgatttctacaaccttagtggggaaataaggccttcattgacaaaacttgagtctttgaggtacttggatttgagtttcaacacattcaaaggcatgccggttcctaaatggttcggatccttgaagcatttgaggtatctaaacctctctaatgcagggtttagtggttcatttccttcaagtataggaaatctctctagattggagtatcttgacatagaatgttcctacattgacttattagaatattcattcgggttatatgttgataatctcgaatggattacgggtcttgtctctctaaaacatcttgtgatgaatagagttgatctttcagtggtgggattagattggattaagatactaaacaatctcccatccttgacagagttgcatatgtcttcttgcaacttgattggtccaattccatctatttcttttgttaattcaacatcatcacttgctgttatagtcctaagtgaaaatagcttcatcaactcgaaattacttgattggttggctaatatcagcaccctagtgactgttgatgtaagctatgctggcttgagtggaaatattccacttggtttttctcagcttccgaatatggaaactttacgcttaggctggaatcacaatctcacaggaaattgttctcagttttttgagggaagatgggaaagtatacaaattcttgatttagcttacaataagttgtatgggaaaattcctgcttcaattgggaacatgtcatctctcacttacttagatcttagttacaataatgttcaaggtgggattccaagctccattggtatgttatgcaatttggaatcatgtgacatatcaaacaataatctaagtgagagtttgtctaattatcttgaaggaacacatagtacttgtcatactaagggtccacttcctagtctaaagtccttgcatttgagcaataatgaattggttggtatgttaccagaatggttgggtcaacttaggaatcttgttgagcttaatttgggctataacttgctacatggtccaattccaaaatctttatggtcattacaaaaccttacagatttaaaacttgatgggaataaactaaatgggactctccctaatagtttaggccaactatctaaattgtcttccttttatgtttcattcaatcaattgagtggtgtcataactgaaacacattttctaaagctgcataagttgaaatatgtacatctctcttccaactattttacaatggctttcaattcaaattggacccctcctttccaggcaaagtatcttttcttgggttcatgccgtttaggtccttcatttccaacttggctaaaatcacaaaaggaagtcaatttcttagatttatcaaattctaccatttcaggctccattcctgattggctttgggaaatttcctctaatcttgtattgttaaatgtttccttcaatcaattaaaaggtcatctaccaaatccattcaacatagctttatctattgttgatttgagctcaaaccaatttgaagggcccattcctattccaaatggtaacacagaattacttgttctatctaacaataaattctctggtccaattccagatgacataggtgattcccaaccaaacttgagacttctctctctttctaccaaccaaatagatggaccaatcccaaattctattggaaagatgcatagtcttggagtcattgatctctctaataataagttggttggaaaaataccccttacctttggaaatttttctaacttaaaagcattggacctcagtaagaatagcttgtctggtactattcctcacaatttaggtcaactaagctctcttcaaactttgcatctaagtgacaacaagctttcaggaagcatcccactgtctttccagaatttgtcgagtttggagacacttgatcttggtaacaacagattagcaggatacataccacattggctagggaatggtttggagaatttaagaattcttaaattgagatcaaatgcatttttcggtgaacttccatccttgctttcaaatttaagctcattacaagtgttggacttggctgataatggattcaatggaagcattcctactagctatggatgtttcaaagcaatgtttcgagtccaaagggaaaactgttatctattctatggaaatagtttatatgacacatattataaagatagtttggtgttgaatgttaaaggccaagaacagaagtacaccaagactctttctcttgttgtgagcttagacctttctgccaataatttaagtggaatactccattcagatttgacaaatttgttgggtttagagattttgaatttgtctaaaaatcatatcagcggtttcattccaccaattatttcaaagttgcaacaattgtcatctcttgatctctcaaacaataggctttcaggtaccgttcctaatagcttgtcatcactttcattcttgggacatctcaacttgtcaaacaataacttctctggcaagattccttacaatggccacatgacaacctttgaagcttcatcttttgctggaaatcaaggcctttgtggcaaacccctcgatgtaaaatgtccaagtgataatgatactgattttgataaagaaccaacacttaagaatcataatgatgatgatgacagttttcttgataattggttttatgttagtgttggattgggatttgcaacaggccttttagttccttttttcatgttggcaatgaaaaaatcttggagtgaatcttatttcggctttgtggagactgtggtagaaagaattcccttctttgagcataaaatcagaagtgcaatacataaatggtccaaaggacttcatcattgagatttgtgatgactgcagctgttttattaagctttgtgacactagaataattttgctttgtcatttttcttacacagtaataagttattttatgtttttcattttctagcatgtacttcattctaaattagcaattagtaattgtttttaatatgcataattagcaattagtaatgattaagggctcgtttggcacgtggtattgtattgtattaatattatgtaatacaatgttatgtttggtattgacttgtattaatagattgtgtaaagttataatatatttttaataaactcgatcccaacagcgatttcaggttgggtctgagtctcgcgtcacaggtatagggtttggggtgaagtctgggttcgggtccggggtctgggtttgggtccgagcttcatgtccaggtcacagcccgggtccgggtccgggtcccgagtcccaagtccgatctcgggtcaggtcctacgtccgagtcccagtctgaatccaggtccggtcctgcatcctggttcgggtccatgtccaaatctagtcccggctctcagtctggttcgggtatcgtgaactaggttcgagattggggttgatcgcagatcttttgtaaatattattatacaaattaatacgaactatttgttatgtattaaataatagaacttacattgtattcaaattttggttcgtagtaattaatacaatacattgttttatctaaacatagtattatttattatttaatacaatacaacccttatacgtcctaccaaacgaatcctatatatattttctcacatcaagtataaagagatctgatttgctaaaaggaatcagtgcatgatatgaatatgaattaaaaatctatcgagtaagatgtaagagagtagctatgtatggatttaattagatccttttatctctgtaagttattcttatcttgtaattatttaatatgaatatgaaccagaaataattatggttgtaagctgattaatatgattgtcaaaattttattttgttttgtgaagaatagtactacataaatcatatcaatggtacaatataatttttactaattgattaagca

SEQ ID NO: 87764 - DNA, 792 bp, Cannabis sativa
atcttgaagctatttttcgagttgagaaacgacaaaggtggcaaatcagatcaacccacgaagccattttcaggagcttttggtctgaaccaaactgatattctccagagtagaatcaatgcgatccaagactgattatattattatattgattataatataaagaaaaagtgttaagctgttgttgtgagaaccaaaacacagtaaaaagtttgaatttttaacgtcgaccgttggattcattaggttcacggatatattatatgatgcgttacatgtgagcttcatcttataaaaatatatttgtttttgtttaatattattctatcttttttatcaacataaacaatcttaaacttaacttcagcacttaaaatctattttgtttaataatatttccttctattaaaaactaatcaacttagtacaaacaaaaccataattgtcaagtagcatcactaaagtaagtttatttttcttctacttatgtataaagaaatgtctaaataaagcattctatggaaacttgtttgaattgaagtcttacttatcttcttcctcttttacaaatgtattaaggtttaagagcacatttggaaaggaatattttagatgaacatgaatgtaatttaaaataattacttgatttaacatgtttatttgatcggataatagcagtttaattttgtgtatatgcctatttatgttatatcatattattgtccaattaatacaacatactctaagttgatatgttataattcccaagttatagtgaatctttcttaagtt

SEQ ID NO: 87765 - DNA, 545 bp, Cannabis sativa
ttattattacttttcttactaagtccttgtgactcaagggtgttatgtagtgcaggtaaagggaaagaaaaattagatcatccatgtggtgacagtcttttctagtaatgtacatattgacctcgccggcatgcgtgccgggttaccaagagttgttttgggctgtgtcgattgtgtattaaggttttatgtttttgaagcatcattgtatatagttttttttgtaaaactctttataacagggttccttcgaacacgctttttatgccgttataatgtccgtttttagtgatttattttagtcaagtttttattattatcactgtttttaataattaattattctattagtattaaactagtttataaaatcatacacgtgacgtccctatagattagggcgttacacttaactatgcaataaaatttaaaaggtatttcaagaaatggtagaaattgatgcaatttatatgaagtatactttgttgaggttgacaaatatgggaaactaaaggttgttccacccattaaaactgattggcaga

SEQ ID NO: 87766 - DNA, 581 bp, Cannabis sativa
  modified_base (79)..(81): a, c, t, g, unknown or other
  modified_base (553)..(555): a, c, t, g, unknown or other
tttgaaagttaataattgctattggttattaatcttgaatatgtattattaaaaatttaaaagttattaattgttattnnntatggatcttgaatatgtgttcttaataaacttagcaacgatattattgattattattagttattgattttgactcgtctgtctttcacgagaaaatgtcttgccaaatgaagtcgtgttcactttggtttttgcaaaagaaaacattagttgctgaataaacttctcttggaggttcaacaggggatgccttaagagcaaaacttacttatggagactgatattatgttggaaatagaagaggtgaaatcccactagtttaaaatttgaaaacaaaaatctagggagctttggtataagcatggagatcgtaactccaaattcttccatcctgctatagtggatgccttaagagaaaaacttacttatggatgctgatattatgttggaaacagaagaggtggaatcccgctagtttgaaattcaaaaataaaaatttagggagatttggtattgttgggttttatgcccnnnataaaactctttacaatctgattagt

SEQ ID NO: 87767 - DNA, 888 bp, Cannabis sativa
ataacgtgttataaatttagacagctatgagtaataatacttatatttttttctgctcttcactttgctttcaattctttatcaaacttacatatatgtatatatatatatatgagaatacaggcatttatatgtatataatcattatagtttactgttacaagttgaatactattcctatattattgtagttttatcatgtagagtatactatatgtctatcctatataattattcataacaatttattatttaatattatacttaatttagctattatcatttatatccaaggcacaccactttatcttttatttagaaaaataagaaaaaaaaagtggcaacaaaaaaaaaaactagattaatttttatgttatttttggtattttgtttttcatttaggaattcaaagtttcaacgacaagacactagttctgtagtaaattaaatatattcacattataggtataaattctcgttatagaaatgtcgagaaagcgcttgttgatcttatgaaccaaccagcacatattacaagaaggtttacaaacttcacatcacaagaaatcataaaagataaaacttaaattgaggaaattagatggcttgcatttcaagcatacccttttagaggtcatgattaatctaaaacttcaattaatcgtggaaactttttagagttgttgagtttcataagttcttataataataaggtagcagaagttttagataaagctccacgaaatgtcacatatacatcaccaacaacacaaaaagaatatttgcatgtcttggagaataaagtgaggaatgcgattcgtgaagaaattggtgatgcaaatttttctataatagttgatgaagcacgagatgaatctaaaaaggagc

SEQ ID NO: 87768 - DNA, 598 bp, Cannabis sativa
atgcaaggctttgcataacagtagattgttatatttaattttttttactataaatttggtcctcgtttttaatagaacgaacaagtcacaaaaccaagtactctaatattaactttatttactaatcccaacgcaaacctcaaattgcaattagaaaaaatgagttaggttggcgaggttgaatggtttggtgcgaaactccaagatcttggcaaaaacctgaagtgtaaaatatttttcaagtgtgctctagatctgactcgagttgttgcatcctactattcttgttagcagactctcggtaatggaagaaagaagccaagacattagtaattgatcttgaacttcccattccaagtatgcaggattaacagtattcgaggtacgatcatttttagaaagaatttgacgaggagaagatgattcttgaatgtaaaattgaagacgattacctcttatggcagcaaagaaactgttgtcgccatagccagtagttgtggtcattcagtctaattgaaaggctgtggttaaaataggctggagaagcattgttattttctctatttctgttgagcggaggcatttggactccatcatg

SEQ ID NO: 87769 - DNA, 681 bp, Cannabis sativa
ttcacaaaatctttctgtatgtcctaggactccacaaatgaaacaaaaggtaggcaagtcttcgtatttgaacgtagcatggcataccggtcctccttggatctgaagcttctttttcttctttaatggcacatccacacgaatcttaacccggatccttaaataatcacgccaaactcccatgaaattgttaggatcggatcgaagaaacgtacctatgtaattcccaatgccttgaatgattctttctgacatgaatcccgtggtcatattatgcaattgaacccataattcaagatgcagcaatgctacctgccgtggattctctcctgtcttcactctctcgaacacaagaggtgctctatcaaatgtccatgggctgccctcaattactcgttcaatgtcaacctcgtgatagaattggaataagaacagatttggttctaattccttaacgtataaccctctgcctggctgccaaagtgtagctattttattctgcatcgcctgaaaatcaattggtcgattcgttaggaaccttcccaccagcaaccacctgtcatcaatttccgataaatcatctgatacattgtcgaataacagaccttcctcatcatcctcttcgatcgctaaaccagacaaattccttcccacatgttctgactgattctgtctattagc

SEQ ID NO: 87770 - DNA, 681 bp, Cannabis sativa
agcatcgttacaaaacacacaggttgttgctacaggaacatgtttaatctgtagttgaactcgagttgctaagcaatcggttaaagcacgccaagcaaaatgaaggactttcggtggtactttaatcttccaatactttttccagaaggtagtaccttcatcattggcccaatttccttttgaatcttgaatgtgtttgtaggcacttttaacggaataaaagccagttgcttccttgctccaataccaaacatcttcgtgagcttgattgctaagagggatttgtaaaatgatttgagcatctcttaaattaaagatgtcagaaattacctcattatcccactctctttgattaatcttcataagttgattaactgtgcatgcttcaaggctcggatgtgatgaggtaatacatggttgagggtcatatggaagccaaggagtattaagaacagccgttgaagaaccagaaccaattcgaattctagcgcccactttcacaaggtcttgtgactcaaaaatgctcttccaaatgaagcttgggttactaccaagtgtagccgtgaggaagcttccttggggataataacgtgccttgtaaacacgactcacaagggattgctcatgggtgagaaggcgccagccttgtttgccaagtaaggacagattgtaatcgcgaag

SEQ ID NO: 87771 - DNA, 908 bp, Cannabis sativa
ttttagcggttgtgattgactccagcagacccaaaacatttaggccttaggtagtcagggttgttaaagaatttctcgacgtatttcccaaagaatttccgggattatcgccacaataggaaatagattttgtgattgacttggcacctggaattgaacctgtttcaaaagcaccatttagaatggctccagcggaactcaagaagctaaaaatacaacttcagaggatgcttgatttagggtttatccgacccagtgtatcaccctggggagctccggttctgtttgtgaaaaagaaggatggatccctcaaaatgtctattgattattgggaactgaacaagttgacaattaagaacaagtactagttacccagaattgatgatttgttcgatcagcttcatggacagactatattttcgaagattgacctgcgatccggttatcatcagctcagaattcgggaagaagatataccaaagactgcatttcaaaccagatatgggcactatgagttcttggtaatgttattcggattgacaaatgctccagcggcctttgtggatctcatgaatagagtatacaaggattttctcgataattgtgttatagtgttcatcgatgacatcctcatatactcgcagtcagaagaggagcatgagcaccatctccgaatagtattacagcaactcagggatcataagttgtatgcaaaattcaaaaagtgtgaattttggttgttagatgtatcttttctagggcatattgtcgggaaagatggaattatggttaactcaggaaagattgaattaggggtgagcaatggtcggtttggtcggttttttacacaaaaaaaatccaaaattcggttttcagtttttatggttctaatccgaaaatcgaccgac

SEQ ID NO: 87772 - DNA, 583 bp, Cannabis sativa
gttatgttaaattccattttgggcagtctattttgaaaaattataaaaaaaaccatgtgataattaaattggtcaaaatggtccccttaacatattttttagtaattttttttctttcaaaaagagtaacaatattatctatttttaacaatcacttttttcaaattatctcaaatttaatttaagctcaatttaaaaattgttgtttaaaaaatgactaaaattatgcccatgagactatttttaccattttaataacacaagggatcctttttatattttttctaaaatggagggccaaattagaaaatttacctaaaatagaggcgaccaatttttgtattatcccaaaacaaaaaatctaaatattagagataaatatatgttttcttccaaaaaaaaaaaattatcaaagtttttatttaattaattatagttttttcttgtaaaataaaaaaatggtatggtagaaacatgttgaaagggaaaaaaaattaaggtttagggataaattattttttatttatagtattggtatttaagcatgtttagagcacttataaataagatataatagactcaa

SEQ ID NO: 87773 - DNA, 1474 bp, Cannabis sativa
  modified_base (578)..(579): a, c, t, g, unknown or other
  modified_base (667)..(672): a, c, t, g, unknown or other
tgtaaagggttttatttagggcacaaaacccaacattctcggctggagatatttggaagaacaattcaactatcatccaagctgtttgaggatgtcgtgggaatcagggatgggagagaacctgtggcaacagaaagtgaccgtgacctccttgagtttgacaaaattttaaaggccaaggactataggttttccctgactctgctgaagaataagctgaaggaaagcagcgagagcgattacctgtttctcattaagtttgtgcttatttgtattggaacagtcttcctgcccaagaatggtaccgaggtcaacactagctacatgcactctttagttgatacaagtcaatttagaagaagaattgggcgactgctggctttcgatatcttatgagctctctacagcggtacaagactaagatcacgaaaaatgtttctggctgcaccatatttttacaggtaagttttcaaattattgtaatggtagtaattttattctcttgtgtactgcagtgcttatagatgtatgtatttgtgttttgtggcagcttgtatatttgactcatgttgactggnntgctagtcacgtggaccgcactgtggctccaattgacttttggaccacaaaacagtgcaaatcagtgtacaagtggattcgagaccannnnnntcacacaagtggaaaggtacatttagtacttcaattttctgatgcgttagaatttgatttgggagatatcctaactaattttttcgtgtactaagcaggtgaaattgaccaacacctatgtgttagtaccaagttttgaatccgctacagttgggcaaccaacaaatgatgcaatatacaaagttgtctgtgagttgaaagatgaggtcttctgccttgatttgaaggtgaacaacacaaaagagctgttactgaaggtagtctcaagttaccttggcaagggtaatatgaatgaagtgttcgagatacctgagacgactacagttctgtgctcgctttctttcaagggggagaccgagaagaaggatgatgtgggtgtggaccaaaaggatggtgaagggacgaaggataaatccgaagaggatgtcgatgatgcactgagtgtcccttcacttaatatatcagaagataatgtcgttgttctaattgagaagcttgtttctgaagagtcgtttgaagatatcaacttttggggagaagaagtcccagttattgtaaaagaggaagttgagcagaccgtcaaggatgattttgatgctactgccttcgaaagattcaaagactctggaggaaaggtgattggggcgttcactgtaaacaaggtttattcgaatcaacagtacgagttctttcgttatattttctctagtgtcaatgatccgaggtaatctcctgtttaatgattattgtttattgtttatgtagttgatattagtacatttattgtatttgattatttgtt

SEQ ID NO: 87774 - DNA, 782 bp, Cannabis sativa
  modified_base (103)..(127): a, c, t, g, unknown or other
ttttcaattttaaaaacacaaaactgattaaaaaagtgttaccaaacgacaccttcttaactaaaaattaattattaaataataatgtcatttaatatatttnnnnnnnnnnnnnnnnnnnnnnnnntaattaacaaatgtaccctagaataatacttcaatatgacttgcatagttcttgtgtgtgttttttctcttcttcctattaccacaaactcatattaaaagtaaaagtcgatgaatgataatattacaacaaggatgatgttcttcagggttgtctattgttgttttgtcaaaaactatgctataactccatggccaatgtgtcaaggtgtttgttgggtcatattggaagttctttctacttttaggaggcatcagtgtaaatagttttcatctagggttcttatgaaaaggtgacaacaactagggggtcagaatgtggtgttcttttaataataagcccaagagataaacttacattacacatccttgtgtggtagcctatgaatcacctctaactgtaaatgagagttactggtttttaaattatttatgtgaagattggtgggtttagtggcaggtgagggtgaggctattattgaagaagacaaatccccatagaaatgcaaagacaattgttgtctgcaaccataaattttatggtataacccaaaagaatctatacatctcaactccattgtattagaagtgaacaaataggcttaagactgattatttatttattgctacttcttccaataggtaagtctatgcag

SEQ ID NO: 87775 - DNA, 1219 bp, Cannabis sativa
gaaagctactgctgcagaattatcacaatataatttcagcggtctcgcgataaaggctacaacatctagtgctgaaatgaaattctgcaaattgcttaataagtagcctcataacacgccatatactctgcctccattgtggatgaagttgtgagtgtttgcttgatactttcccacgatacaactcctccagccatcatataaatgtagcctgaagtggacccttttatcgtccacgcatcccacataatcgtcgtcattgaatccaactatatccagagtttcagctcgccgataggtcaacatatgatccttggtaccctgaagatactacatgaccttcttagccgctttccaatggctaagtccgggatcactcaagtacctacccaacacgccaacaacaacaacaatatcagggcgtgtgcatacttgagcatacataaggctaccaaccagtgacgcataagaaacaactttcattttatctctctctctttatcattttgtggacattggctctttgagaacttgtcacccttcactatcggtaccttcccaaaagaacatgaatgcatgttgaatcttttcaagatacgatcaatgtaagtttcctgagacaaaggaagaataccattggccctatcttgaaggatttgaatcccaagcgcataagaagcatcgccaaggtttttttttttttttttaatgtcaaaatggtcaaacaagagttgttttgtctcagccaacagatcagaattattagaagcaatcaggttgtcatcaacatgcagtaccaagaaaataaaactgctcccactgaccttcatgtatatacattgatccaccacattcttcctgaaaacattttgagtgacaatcatatcaaacttgagataccactgccttgatgcttgtttaagcccatatattgacttcttgagtttgcgaaacatgtgttctttgccagacttctcaaaacctacaggttgagtcatgtacacatcctcatataggtcaccattcaagaaggcagtccttacttctatttgtttgagttctagaacaaaattggcaaccatagtcacaatgattcacggcgaatctttggtggttacaggcaaaaaagtttctttgaaatcaatgccctctctctgactatagcctttagtcacaagtcgagccttgcacctctctacttgcccatttgagtcacgtt

SEQ ID NO: 87776 - DNA, 561 bp, Cannabis sativa
aaaggctcaaatggtgcaaaaatagtggagataggaggatttagggtggtggttggcgaggatttgggtaatttttttcgggatgtggctactgtgtatcatgatgaagaagaagacgaagtgaggtctgtttgccgaaggattagacttatacctctatggcgtcagttatttgaaataaactgacgccatagtgtaaaaaatacacgtgttaactatacatatagcgtcgattaatttcaaataactgacgccataaagggaaattccaaccattcacaacactaattccaaaacatcctctaaatgtactacataaattatatacctacggtttttattaaaaaactgcatttaaatgtcaattttgtatcaagcgagtattttacaccctttattttatcttttttatgaaaatggttgaaaaaaacaatctctaaaggctcatatattatagtagtgcatacatatacatccctgaaattgtgagtatcaatggcgatgttgcgacatatatactgaacaggtatataagcttattgaatgcgctttcacaaatta

SEQ ID NO: 87777 - DNA, 608 bp, Cannabis sativa
agtgtatattttgagttaaatttacaaaatatattaaacaattggtctacttttatatttgtgctctaatgcacaatataattttttttttataaaagtcaatactactattaatactggttaaaaattaattttatttatattattttaatattttataaatataagaatctttttaattaatgaatagtattaataaatggcaaagaggtaataaaaaatgtgatatttattatgaattaaaatttgactcatgctatcttttgtgttaaatttaacacaattttaacttgagccaaatttaacacacattttacatcaccattagaattaaattttaacaaagtgttttaaaaaataacaatacaccacatttataaatctctactggaaatactctagcacaagtacttgtagcatttgacaagagtatcaaaatattaggggaaagctttcatggtttgtaccttcttcttttttatgaagttagattaatatatcacatatatagggaaattttattttacatgcattcattagggtaaaattgatacactacccaacttttcctaaaacctgaaattaaccatctctctctctctctctct

SEQ ID NO: 87778 - DNA, 660 bp, Cannabis sativa
taagaaactgatgaaaatgaaagttctacttgtgaatatgggtgttgttgttctttacagagtctattaatctaaataattgtcctttcatctttttaataatagttaggtctgtgataattagtttataatattgtttattacttctatgatttagaaattgtacatattcttaccatttgaagtgtgttaataatcataagagattttgtttgttctaatctgtatggtccgagattttgttctcaaatctatttccagaattttttcatttttttcaatatatatttttttgtttcatgtgaatcaatcccatttgtaactgtatttgttcttacatatatattttagtactgtgtttaagttcgggatgttagagttaaaatgactcttccccaaatcagttagaagttggttagaattagtttgaaatagttgcttagctgttcttcaggtttgatcggctaagcttgttgatcttgattagtttctgtgtatataaacaactgtatctgattattcattgagcaatacaatttatgtttactctgaaccttaacatgggatgcttgtttatcttggtgtgttgatcaagtgtttggttacatttattagaaacttctctccatataaatgcttctaatttatggtgtctagtca

SEQ ID NO: 87779 - DNA, 571 bp, Cannabis sativa
gaaagagaaacttaaaactaaatttgaaactgaaaaataaaaattaaaaaaaaaatgagagaaaagctgatgcaatttgaggtggcatgcatggagtgtgtgtaagtgatatttttgtaaataaaagtccattaaaggcaaaattgttgcctacacttggaggtattttgggataagttgaaaactatccctttttattacacattaactaaatataaatcagaaataattttaattaataaataccttcttttataattaaattacctaaattaccaaatataaaaatataatctcacataatttatcaaaattagagttctcaatgtacataatgaggatataacttacaaaattaggtacaaattaaagaatagtaaaatgaaggtaaaaattaaaataaaaaataaaaatatagtataattttcccaaatatttttataaataaaatactaatatatattttgggaaatatcagtaaatggccttatttttcactgtactaaaagttagtgtctcttttttaaaataataaagcaaatgttcttttttattttttgctacctaaaat

SEQ ID NO: 87780 - DNA, 574 bp, Cannabis sativa
ataccacaataggtgtaaaatcaggtcatgccatgttgctgctacaatctttataacaatggcattcaccaaatctacaaatctaacatcagactttaggtattattttattgatgttcttgacaattaattttgacaaaagaattataaatattgtttaaattaatactacactatggtatttgtactatattttgaaattgactatgtaacaataaaaaattagccatatcaaaaaatttgttacctgcaggacttttctgctatgtaagtctcaaaaggaatgaattcaactcttgtgattgacaaaggggaatatgctaataacagaagaggaagaaagttaaatttgccaagattataaattaaatttcatatttcctagtgtttataaaggttgattaactgttactaaacaacagctttcttataaaacaagaaaataactatataaaacaagttacacctaagacctcttattctaacaaaaatactggagttagggcatgattagtaattcacacatgaatcttagaaaattaagcattaaacgtttattaatttcgcacagcac

SEQ ID NO: 87781 - DNA, 968 bp, Cannabis sativa
tgttagttagggtgttacagttagaatatttgtttgcatgttttcagatcacaaagattcaatatttttgaacaaatttatttgaaatacacaaacaacataataattttgcccttgatttcttttttcaagtacttacagatacttgctaagataataattgtaacaacaaatgaaaatcatggggatttaagtccaaagatctttccgttatcaaaattaatatttttatcaatgtttgcagtaaaaccaccaatacactatacaaacttggtaaaattgcaaaattcaagtcgttcttgaacactaattgtgtaactacttggtaggttctttcaattttcattttggtcttcatacaataataattgaagtcgtatttgcaagtcttacaaatccagtatcgctttctttgtatcttttgacttccactgaataattagaaggatacttaataaattctcacacacaagttttttttttatgtgcattacatcgagataatgtcataaggacaaattttttcaatactcaaattcaaaaaataatactcttttttgacaagtttagtttgtgagaaaaatgattctatttgacacccctgaattttttgtgtattctaggcaaacgatattgaatttgctccagttgtgctaaaatatcaacccccgtcaataccggtggtggtgcactcttctcaatcttcccatcatatgttattcttctacttctagggtcgttcatttcccgaaaatgtctctggtaaaacttttctattccctgctaaaaccttttcacatacaagaattttcccactatttttttggaccttgtgtcggtacataggtgcgttgaaatagtatatatgttcggttttgtgctcttaataaaaattattttaatataatcagatttactaattaatataagatcataattcgcttttatgttgcatgtttcacatgatt

SEQ ID NO: 87782 - DNA, 546 bp, Cannabis sativa
atttttaactacacttataaattaaggggcatcatagtatagtgtcataagtacagggactaaaaaagctaattattgtcattttaataactttggtttagagatattggaccatcactcggtcttgtaatatttggtcagctttcttataaaatctttagctaatattgttgttgttgttgtttttttaataatttagataatattgttaaacttatacattttatttttttgtttcattttttttagttaggtaaatgaatacaactttctattggagtactaaaattatgattatcgtagaaaatgagaatgatacgaagcatttacctattattatttcttaatcattctcatatacattattcataattttaatttttttatacaattttgagcaaattttaatacatacttgttcgaaaccgctcaaagaggggcttcttttcctagtttgaacataaacagaattatttatttttgggagttatatttacaccatttaaacttataaatacaccccattattaaaaaaaatataaactt

SEQ ID NO: 87783 - DNA, 1211 bp, Cannabis sativa
tagtcttatccttaattttggagattggaatgttaacagaattaaccacctcttttcaagggacatcgctcatgatattctttcccttaccaccccttaatactcagaagcttgaatccctattttgacaatatactagctcagggcactatattgttaattatggttatcacttagcacaaagaattcatagagctagcagactagcaccctccaaccctgactcaaatgccgactggtggaagtttctctggaactttaatattccttccaaaatcaagcacttcactcgcagtctttgccacaacactctccccactactagaaacctgcactttaggaaaagtcatccctctcccttatgtccccattgcaacttggataatgaaacttctcagcatgctctgttagattgtaagggtgtcaagaaggcttggacatgtacgtctttcttatctccgattaaagcctcaaaaggaaaacatatctttgatactcttattaatgctaaatcccaatttacaaaagacgagtttgaattatttctctgtatattgtagaaaatttggagtaggaggaactctcttgtgtttagacatttgaaggaacgactctctattcaacaggaagctgcggcctacctccaatcctatcaacatgcacaaggagtgcaggctgttcccgcacaggttgtcacaccaaccaccacttagaccccccgaggcagaacaattcaaactcaatgtggatggagcgatttcaagaaaagaagaaaaaaaataggtgtaggagccctactccgtaacttgacaggccaaatcatagctgcatttgccaagagtacacaccgcatgatgcagccaaaaagtgcagaagtatgggcgttattgcaagcactacacttgtgtcaaagcaatcaaattttaattcacactgattgtctaaaccttgtccgcaatatcatttcatcaaacagtatcttatctaatcatggagttgtcattgatgctcttagagaagtgttaacttccttcccaattgtttccattttgcacatcaatcggtaaaggaaaaaaactacccataatcttggccaaatgtctcttaggttagttagcgcttggttttggtctggatgtgacccctacctgtgttctttgtaattcatcaggtcactatcccctcaaaaaaaaaattattagagataagtt

SEQ ID NO: 87784 - DNA, 589 bp, Cannabis sativa
taagtgactaatacctttaaccacacaaactttttagtcataacataagaatgataatttataataaagtaaatacataaatgatgtagaagcaatacagtgtatataggagtatataagaataactcaaagtgattgaaggaggatcaccaaaatatagcttgaataaggtttcaacacttttgttaaaaaaaattattttctcatctattacacttagaattttatggaaatgcttttaagaattatcaagtctcaaaaaactctctagcttagtgtttgaagatagaagagtggtgtctaaatgagtgaaccataagatagaagagtggtgtctcaaaaaactttctagccaaactttaaaattcaaaactcacttacccaaggttgttaccaatcgtgtaagagagattttaggataagaagaatgttaaagtaaaaggtgaaaacgtctattattagctacttccgatttcatcatgtttcttataaaaatggcctaaagcgaaatatacgaaccccaaaaatacatcgaaacacgatgaacaaatctccatactggttcgtatattcagctccaatttggagc

SEQ ID NO: 87785 - DNA, 2949 bp, Cannabis sativa
atacctaatccaccaagtattgcttgaagtgaaaataaaagaacagagtgcaatcacaaaaggctatattaatatatttatttcatattaatctgaattaattatacaaaaaaagggagtttagtttaaggaaaatatataaaacaagagttacacatttaaataaatgacacgtgtgaccttcagatggaaatactaaggatcagtacataaacctttcattgcaacaaagagaaccaacgatcctactttctcaagaatgcaactcaaacatggatcaaaataataagttgcatactgcagaaagcttttccatcataaaaagcacccattataggaattctcttgatccaggtttagcgaaaataatgaattggtaaggcagcggtgtcaagttcaaagaagcctctaagcttaccacctctctcttcggtcagacggaatgcaggaacttggtgagagaacttgaaaaaatcagcctggggaatactccacaacgttgatcctcccaccactcgagccttaaatactgaggtaaaaccatcaacacgttccaaagacaaagcgtttattagtaaaacagtagctgacagaacttccactacctcatattcacagtttttcaagtcactgcagtggaggttgggattccagttcctgtacaatgcccaaatttcacccttcctaggaaggatgtcatactcatttcttctacctgtaagctctgctttcactggatgtgaaaaagaagttacactatcataaacctcagcctcaacatcgacaaccttaaatctaccgcacgaaacaggcatgtccttatcagaccatctaatgatgttcgatgatgagacagatgcaagccatttaatatgcagtttgaaagatgggcgaaaatcaattttcttgatttgaccataatattttggcaaggaatcctcaacacagtacaatgcccatatctgaccaacctgaaacttgtgtttggctttatcaaaatcgaaattgtagaactcagtatctggaatttccacttgttctaggcttggagcagaaggaatggtagaactgtcatgctgaagcactgaatgcctcattcgcaagtcactgccatccactgtcatggctttaattggaggcaaagcagcaggatcaagttcgaacgatcctattggaactcctctttcattacctttcattttataggacggaatcatgtgggaaaacctcaatagctcaactgggggaacaagaaatgtcttctttcccaccatttccatccgacagaaaatactcacaaacccatttactttgctcaatacatcaacatgtattccaacatctgcagcataatcagacaatacttcaacatattcatattcacactgacgatgagcagctggatcacaactccaactaaagtcccagtttttaaaaagagcccaagtctccccctttcttggatatatcacgaaagtattcatacgactacctttttcacaagaaactatatgacagaacatacgacaatcatctgttgtcaatgactccccgtacttgaacttaccacaagaaaatggcatccccgaagagtgccattttgattcattctcatcagctggttctggctctaaccaagttaggtggacactgaacttgggagaagatacccttctgatctgagcatagaatcgtggcatagcattaaaaatatcataagcagcccatacctgccctacggcaaaacactctgctttcctctccatttcaaagtcattaaaatctggatcacaatatttatagaattcctcgtatgacatctcctcaaggcttgaatcagtattagcactactttcagaacttttcttcaatccatctacattaactggctctttaggttcttcactcttcctggctctgtgtactaattctgcattcaaatttccggtgccaaagttaggacagacttgtgctttccctttgtgcgtactgcctttttgtgtagggaatacagatttactatttggtgcatttaggtcacatgccaaaaatgacttctggcaactatgacatcgaaaagatttattaataacatctttacagaactggtaccttactgcacaataggggcagacagtccaaaaagtttctcgtggctgctgcttctgagcattcagaccaaaaaggttgcttctactattgtttggaaccacatttgaggtccaattggccttatgattggggacaaaggtcgcaggctttctgctctttaaatacttgcgcctgacattatgcaagagacgttgatctttgtccaaaagtattgaacgagcttctgcaatcagtttaaaagcgatttcagcaccagccaacttgtttctatcaggatgaagttggaggacaaacttccgatattgcttcttaattgttgcctcatctgctgtctcctcgagttgaagaattccataccagtccatctcatcccctgataatttctgtgcagcagagcaatgcacatgacacaccataagcaactgagaaatattctcaacattaggataaagtcgttgggccttcaaagcaatcttttgagccaccacaaactccttactttgcatcttcttctcagcaaccctcatggccctcagggcctcctccaagcgtgaatcaatactagcattaccttcaaagcctttcttcaatccatccattttaactggctctttaagctctttgctcttcttggcattgtctcgattaggtacaccttctttctgtttaacccctttctcatcatctttcatactagaagctacatcagacatcacattagatgtctttgccttttcaatctttaaaggactcacattcacatagccatcatcatcacgacttaagcttttcttgtaagagacctgttgtttatggcatgaaaatctccgtatattt

SEQ ID NO: 87786 - DNA, 763 bp, Cannabis sativa
cctttaatatcgggaattatatcctataatttagcaacttatgtaatcttacttttcctataaatagtgaagtcatttcactatttaagaggaccttttttcgcattccaaaaaggcacactctgcaaaaatatttgtacgcttttcaagagctattgagaaactcacatgaccgaaccttgtgatctttatagttcttcataataatacaattaaaaggaaattagactattaccataatcagaggtcgaacctctataaatattgtgtatcgtttattgttcttattttattattaattactctacaaatattctgtattgttgactaaaagcgaggtcaataaaaatattttcaaattaatattttggatataaaagaaaataaatacaaattaaaatataacaatttctacaaaatatatttatgattgtaataagtcaaatcataacattattgttataattaaaattttaacaatttttaacactttaaaattttcaaatatttttttcttcaatttaattattttacctcacagtttaactacaattatactaaattggcccataatactaaaattaacatatataaaaagaaatacgtgcaacaaaatattaaattttttcgacacaatcatttttaattttttttagatgtaaagtaaccaacaagaaaagagcaataagattcgggttacaattacaataacttatttggaaatggataatttcaaataatctctctatataagcctaatgat

SEQ ID NO: 87787 - DNA, 1035 bp, Cannabis sativa
catccactcgaccagaataaatgtaataacataactgccttgcatcacacatagcaagaaggtcacctcacattgctaatactaataaaggaatatgacgagacgagctacttcccaacacttagtatttttctttaagatggacaacagggaaaactcatgtcaggcgagatgtaaccttccacgttagcaataaccgtttaagggataaaactaatgaacggttgggtagttatcagatattattccacatgtgattaaatgaaacgtggggattattcacgtttcatgagtagttgtatttgaattgtatttgaatcaatcccaaaaaaaggtaactgccaacctatattcctataaataggagcagattccatgaaaaaatagacgacaaaattaagagagaaaatattattattcaaattctgagattgtattccgtactcaataaatatccctaataatttttaactacaaaactacataaaatatctagtgttatctgattatttattacttctatatatttctgtagagaatttattacgcaaaggctattttattttagttaacaaaaatctacgttaacagaaactacttggtcgaccaatgctatatttttgacacaaatagtggcagtggtcgaccacaatatggaatgaggagttttttttggccaaagtgtgtttccaacatcaatatgtcaaatacaagtgagaaaagtcactcaagggtccataatccacacaggcgatcactgccatctttttggccaaaaagatggtagtgctctcttaaccaattggctaaagtggttttgtagaattcatatcactaaaataaccaagaaacaccatccaaggcttcccataagcaatggttgatcactgccatctttttgctccaattgatggcagtggtctcccgttagggtttcagacgtcaaaataaggttttggggtcccaagactcccaaaatatgatttaccatcaaaaaacaagttaaaacacaccccaaggggtctgaaaacatgc

SEQ ID NO: 87788 - DNA, 1121 bp, Cannabis sativa
aacactaccttaagctcttccaaaagccaaacataaaattctacaaatccaaccttaaatcaaaccaatttctcacaaattatcaagtgaataaagaagaatatagtgagagggagagggtcgattttggggctgagaaaaaccagaattttaattctaatatgctagaaatttcatttagttacaaatatcacaaatgtcaaaatggcacaaatgcccctagggccatataacatacatacatacatttaagggaaatcaagtcatcactcattcacacaatatccaaataatttcagaatattcaaacaaccataaaatgccaatataaaattctgaaagtgtatttcagccccgaacccaattcggcccgaaatactcgattgtgactataccgcgctgacctgtcagaaagtacctgaaaaaggacacaacaagtatactatataataatatagtccataagcacacaattaaattaaattcacaattttacccttctcagatcataattacgtaaatgtccctggctcaccaacggggtcttaacatgtcatttatcaaattaagtcacatgtaattaaagatataataatataattccataataaacatacattaactagttaggggttgctaatccatttcctttatcttagggtattacaattaccccctccttatagaaattttatcctaaaatttacctgaacaactccggatatttatgctacgtatctgtctcgagttcccaggttgcctcttcaactttacagttcctccataatacttttaccagtgcaattgtcttgtttctcaagactttttctcttctatcaagtaattgcaccggttgttccttatatgatagatctagttgtagttccaatgcttcataatttagaatatgggacgggtctgagacatacttttgaagcatcgaaacctggaacacatcatgtacagctgccagtgttgggggcatagccaacctctacgctacttgccctatcctctcaaggatttcaaaaggtccgatgaacctcgatctaagctttcttttcttaccaaagcatttaatacctttcataggtgagactcggagaaataccatgtcccca

SEQ ID NO: 87789 - DNA, 612 bp, Cannabis sativa
gcacttagtgcggattggatgttgtttgaccaaaaaagtgcagattgaatcggatgaacaaccctaatctccgctacttcaggttgcatcaaaccaaaacggcttcccgaaatagcttcaataagatgaccatttgaatctcgggccatacaaccataaccaaacttgttctctggttgaaagatagcgccatcaacattaaccttaaccatatgtaacattggtttctttcagtgctctctaacattattaatatcatctactaacaatgcgcccattttttgtgattgagcactagtccattggtcaagagttgttctagctgatcgcaccacttctaaagcagaagaagtttttccatttcacacaatatcatttcggacagtccagatttttcaactcaccattgcagcttctcaaataacatcattggactgcgaatcaaacaaactaaagaaccacaagctaaagtcattaccacttatagcagcaacattgacacaagaaaagtttcagcatgctctactaaaatcgcagccaataagtatatgaaaaatagtttcctcagttaagttacacaatgggcacataatctctacattaacatgtttt

SEQ ID NO: 87790 - DNA, 800 bp, Cannabis sativa
gcatgctggtccaatttccatggaatatcattaaggaccaacttgggagcctctcgatgctctattgcctcctcctctaagtcaacctatttttaacggggatgcttagacataatttctatacaaaaagaagataatccaagcaattagccaccctaactacctagcatagaaagttagggagctgggggtcctcctccataaactgcttgtagagtcttaactagactaactatccaaaaacgagaactcccagggggtactcgctctagataggaagtcaggaaaaacacatgaagaaagatgacagaaattaacatcaaaccaaaaaccagaaggatgttggatgaaaataaagatttgccaacacttttgtcaccactccaaaaatttttaaatgaaagtttcaaaaaagtatgcagttcatggtgcccaaatcaatctaacgcaacaaaagcacaaaacaataatgtaacgccctaactctcagggacgccacgtgtgtacttttacaaacttattattactaatctataaattttgaaaaagtgtggtttctattaaattcaacataaacactttcattttaaatactgtcgtaatatggggatcccctgccaataaaattcttttattactaattacaaatccattagtacaagaatagattatacatccgatcatataaaagggttgatcctgtttcaaagccaagacaacacggttgatatgtacactgctgggagacctctgacccatggccgaacagaactgctaatcttcttacctgcaccatgaag

SEQ ID NO: 87791 - DNA, 959 bp, Cannabis sativa
attaattaattttttattatttttactttttttttctctttttcattaaattaattaattttttattatttttttttactcattttcatatttttttattttaattaataaaatatatgtaaaaatataatatttaaatgatatagagaaatatatagagaaactaatgtatgatgtaatgtaaatgtgtgaagtaaaattaagagtattcaatatttatagaacttgtgggcttttcttcaaaaaaaaacaatatttatagaacaaacagtataatttttgaccaaattgtatacacggtttgaacaatttcttaaactgcaaccaagtaaacatgaattacacaaatcattttttgcatttttttctcatgatctatgtaatgtgatatgcaccatatagcaagcattttgaagaaaaattcatgtatcaatggctagtgactactttgtgaatttttaacaaaataattcctcaattttttcttttcaatattatacaaattcataatactcctagcaattgtaattcatggaggaggcacaatcttagagcatgttgttaactctataatatagagttattttttgttataatcttttagatatgtgttaatttagagtgtttttaggttaattttcttatgtttttcttttttttttggtttagttcattttgtttgattttagtaataagtttgttatttttgtgttttttagaaaatttttactagaaaaataaacgttgaaatttcaagcctaaatttgatcatgttttgttcaaattttgaaaaaagttacagcataaaaattttaaatcttattttcagctttcgaagacatcttgaatcaacttatttagagtttttaagtgaaagttatgtgtgttttattgagggatgtggaagtataaaaatagagtggattgcaagggaactgcgattgcaggtctttcatacg

SEQ ID NO: 87792 - DNA, 1202 bp, Cannabis sativa
  modified_base (511)..(511): a, c, t, g, unknown or other
tgtaaatcgtattagataatgtatattgtataattcgatttacaatgtatacttagataaattgaggtatagtaatgtatttgttgaatatgtatagaagatagtttataatatttttatattgttgtgttgttttttatgtttttacaggagtgagagaaatattttaataaacctgagaatcgtgtttagagtaagatgatttacttctctaataataatatttttgccggagtgggaacactagttttgtgaaagcttttgttgttcttctgtccattttgctatctcatgtgaacttgtatggtcggagatcggatattaacaagaacacaaagtatttttagggagtaagtgagacagattctttggaagatgtatcattttctacatatagtaataaactagtaggtttattttgttataaggtaatacaaaataaacaaaattgttatttgtacttcaagctcatatctctatttttacacagtattttttctgggatagttgncaagtatgtgaatgtagataatgctctattcttgttgttccaatactatttttgtaccaaagattgaaaacattctaataaaattgctaactctcttacttctttgagtgttacatgcatatacagattctgcaatatttgatgtatgttttgttgagtatggtgcgaaaggtaaattttgatgaacttccgattgttgatcgtatttttgtgttcactgtttggttgatatgtcgaatggtagaatgagtgattgcttgttggttttgaaaattgaatgatcaaagttgtgatgtatgcgattgaagcttttttttgttcactaatggaatttttttttcttgagaaaatttcgatgtgtgcgattttgaatttatttacaatcgcagtgaacgatttcgcagatatgattgtagttttgaggaaggagttcgaggttgaatggttgatgagtcggtgatcgagcttttttgttgatcaatggtgtttttttttttgagaatggtttgaatagtgagaatcctttgagttatagttttataggtttccttgttagtcgattacacacgcgcggttgaaatgatgtgatcccgtagataatagaggagcacagcgcgtgatgggacggttttgcaagtttcatgtttgcaattctggtattgttttttttaattctcggtagggatgatga

SEQ ID NO: 87793 - DNA, 713 bp, Cannabis sativa
tttttttttgtatttctattatattcttaaatttcactaatatgtttgttctcttttactttagttatttaatttcatcgaatacaatttgaactctagcattgtgtaagaacaaattttgaccagaactaggtatgctattgtttttattttgatatgggttactttgcaattttttgtatttattgattttggtggtctccattttttttttcttttcttattgttgttttcaaaggaatttttaatggttgggtttgaaattgttgaaggaggcgaagaagttgctatgggaggatcgtctatttcataagaacatgacggttccgaatgaggctaatatcgacttggccacttgatttaggtaatcacttttatttttctataaaggaaaaactatgctcaacaacaatctattagcaattcatatatattgtggagccggaaaagagaatagtttcaataactactattattgctattgttgggccaattggtgtatgattggtagtagccgccataacaggaacaggttactgaaattatgactaatttgttcgtatcaaaggttgtcttattggagtttattgcagaaatctgagaagggtctgcagccaaaagatttgagattgctgccaaggttgtgtaaggaggcacacctctgaaagtaatgaaagcttgacatgttctgtttagaccattgcagaagtagc

SEQ ID NO: 87794 - DNA, 570 bp, Cannabis sativa
gattaacattgaatagagatatcgtgttagttattctaagttaaatttatcattgctccaataggattcttgaaactacaaattataagataaattgggataatcgataaatggagattcatagtttgaaatagggaaaccaatgctctaggtttttactttctaattaaaaatcgttgtttgtttatttatttttctatttatcttattatttttttattaattataatttattttgcgttgtctaattaaactataatatttagtaaaatttaataatcaatccttgtgggttcgacaacctttttagttttaaaactttgctataacaacactgtacgcttgcagtaaaaaattgtgtatcatcacctcaaaacttttgaatgcctcgcatatgcctttactcttgatcaaacaaggcacatgttttcacccaactcctgcaatacctcatccaagaaaggaatagtcatgtctatacgccgagtggctgactcagaagccttcctactagcaactgacccctctcctctaccgcccctcctagtaccttggtcgacagactgaact

SEQ ID NO: 87795 - DNA, 697 bp, Cannabis sativa
aaagcataagatcatctctaatattataatttgtattaaatttggtctaaaatatgaactaatgctatatttgctattgttccccaatgtacaataatattttaagacaatctctaatagatggtgtaaattttatattatatttgactcaaaaaatatgttaatattatatttagcttaaattttataattatgttctaatgtataaaataaactttgcgttaatagaaaaatataaatattaatgttttataaaaagtatataataactatattagggcttataatttggaatgtcgtattagctaggttatattgtattgtattgtattagattatatatcatatttttatataacactatgttaaactttaatttatactaaaacattatatatttaggtgtccataaaagttaatacaacatatagttttaaataaaaatattacataaaatacaattcaatataatattatacaatacagtacggtgtaccaaacaaacccttaaatatataaataaaaatatgaaaaggtatgaattatattaatgagtgatacaaaagtaaacgaaaaaaaaaaatgatatttattgtggtataaaattcagcctatggtatattttgtactaaatttgacacaacttttaatatgtataaatatggtgtattgccattttttttttaatattttgcta

SEQ ID NO: 87796 - DNA, 1193 bp, Cannabis sativa
  modified_base (385)..(391): a, c, t, g, unknown or other
  modified_base (463)..(479): a, c, t, g, unknown or other
cctatttatagttacatagggaggcagttaattacaatcagattaatatcccataacaatattcccctaaaattataggatttgattacgtctcacgtaatataaatgctattattatttaaaaatcacacagctgttatttatctgcttttaccgagtcaatgttgacgtggatttagatacgctgcaaagtgtatctcgctgggtcacctcactaggatagcaacaataactccgatagcgagctgaagcttttcccatatctttctgaggttgataatgtaaataccttcgtttctcctattgaagacataacactctatttgacaatcacagttcttggtgacaaggtgaacttcagcagccaacatcatttgaatgtcannnnnnntctgagagagctgactcgacagagcagtagatctcattgaaagatgtctggagctaattagtgaaggtaccnnnnnnnnnnnnnnnnnagcgagatggatgcctcgctattcgttgtttgtataatgtatattatacgctaagtgttctaacagattacatgtctcgtcttcatctctttatacatagcgaggttggtgtctcgatttgtaatactgatgtcgtccttatgatcgtgtcttcatatacgaaatagtttctcgtcaatatgtgaattaatagtttgtacatctgtgtctcgcttaagactttacagtcaacgagttatagatattctctatcagctccacatttaatgagttattccattttaatatcttctaatataattgtcattatattcgttgattcgcattctcccaggttgacacgtgttctcctctgaagtgctagccgaatttcgggtataacaatatatcatatatgcatgctatataaaaatcattatttctatacatatatattcccataaatatatatatatattatatctcatcatataatatacatataactcacatatattacatgttatatgatatatatatcactcatatatactaacatgttataatctcaattataatattatatatcactatatataataatatatataatacacatatatataactcgtacacattatatattttcacatatatcctttaatgttaccaatcataaattgggcacttatagtattaattgggtgatttggaggagttttgagctattagaaa

SEQ ID NO: 87797 - DNA, 727 bp, Cannabis sativa
catgtattgcacttaatatcacttaattgaacctaattaaaaagaaaactaattatacgtgcattgtatgtaacatcaatatgatgtatagaataaatgtgaatcatagaataaaaaattaagagtagagaataataattataattaatagtaataaatgaaaaaaatttaaacatccatatttattatcattgataacactgttaaaatttgtgttaattattgggactaaattgacatttaaaacgctaaaagggtctatgtcagaaaaaggaaaaaaaaaacctaaggctgtaaatgcataataaaaaatctcaaggactaaagtgacagtcatgctaagataacaaaattcgggtttgcccctttcctgaaccggtttttgggtcttacagtacctgcggaattacctcctcagttaacggtgggttgagctctgaatagagagagagagagagagagagagagagagagtggttaagcatgagtggaggaataggtttggaagaagagaaagaagaagcagagtaccacaacaaagacttcgagtgggaagagctcagagcccacgttgaaaacgccccgtcgttttcccatcacttgctcccttatcaaccccaacaccaactgctccaatccgattcagacgcctggaaaagctttcacatccgtcattcttccggcaagttcttcaaggttcgtcttttaattaattaatttatttatt

SEQ ID NO: 87798 - DNA, 593 bp, Cannabis sativa
taaaacccactgtgtatttccaaacagctttgaatctttttaattaatgcatcaaaattagtattttgtaaaataaggaaaaatattggggcgttacagtgttgatccgttttcaacccggatctaattttcccgaccctaacccttaaaatttgtgtcgtgttcgtatttgtgtgccgtgtcgaaacccattttaccaagcctaggtaaagtattgggtaatgggtattgtagtgagtaaataacatcactactaaatactaatccaaaagctggaccgtttttgcaccacctgtcaaaccaaaatattatttacaatcatgttaataattctatttttaaatcatataattcgattatactgatcatcatattccctaccttagtcaacagagaaatgaaagtagtggacaataatacatatggttaattgccagctgctaagttatttactctatcttaattaattaaagaattaattataccaggagacgttaagtatattttatcagtagaacctctatccaagaatatacttgggactaagtaaattatatattataactaaatagagttacattagaaaaaaaatt

SEQ ID NO: 87799 - DNA, 707 bp, Cannabis sativa
atgaatctggtggggacgtctccacgcagttctgggagaggcttcccaggtaccctatttgtcatttggatatagggtactaactgcttggattttcttttcacttttttcaatgtctggtgaaggcagtgactttcattttgccttggtgaattttgaggaggttctcgaggcatcatctattgaagtacctcttactgaggagaatcctggagatctcattgtagatgaggggccttttgaaccatttcaacctaaacgacatcataagagcaaaggaaaggcaaagctctcgcaacctctctagttcctagagttcttaacaactctatttgggagatagaccaaaggccaaacttacagaggaattatggtcttttggaagcgtactttaaggatgaaggagtacgaaatgttccatgactcatgtggcaccgcatgtgtgtccttggagagtttgtttcccaacgtgtggaaggttttggagcatggagttggtctcatatctcttgcggtgcccatcttccactcaggacttacttcgcaaaattttgtgttaaagctggaattgttcccttccagcacctactagtagcatacaagtttctaaggaaacaatttatattctgaaaaatcccagggaaagtctgctccaaccccaaaaaagattttgtatttttattagttaaaatcccaacctatgcgag

SEQ ID NO: 87800 - DNA, 804 bp, Cannabis sativa
aatcactgaaacagtaaaattgaatgaaattacacaaaagtccttaaatctaacaatctcaatagttcagggggaatttttagcggccaaaaaagttctggggggcataattttgtacattcaaagttcggggtgaaaaaaaatcctaattagcttttataaaatattaatctaatatatttattataataatatttttgataatgttgttgatataatgtcttaattaaaatttaatatataattttataaataaaatatgtaagtttattatttatttatataagacataaaatttattattttatataaatgtatagaaaattaaaattgtgtttatgtatctgatgtagaatgtataattaaatgtaaataagttattatatattgtaacaaaattatataacatatgtaaaattataaattttaaatatgtttgatgaaaaagaagtaggtgtagtggcagataaaatcaaagagaagcaaaaagaaataatatatttctcaagctagggcttatatttgacaaaggctggggctgagatctgtgcaagaaagaggaagaaagagaggagtgaggaagaaagggagaaatgaatttaaatttaggattttaattttttgtttaattttttattattttataatatttttaaaatttaatatttattttttcttttacatgaattacttgtaccaatcaaaacagtcacataattgtctatattgcagcagtgttttttaacatttaaaatttgaaaaatgctaaaagacatgtctaacataatttaatataataacttt

SEQ ID NO: 87801 - DNA, 932 bp, Cannabis sativa
  modified_base (371)..(389): a, c, t, g, unknown or other
tatgatacaatccaaaccaaatttgaaatcaaaacggaaaattgcactgattatttatttgggtctattaatttgggtcaaaattatctgatgcgtacactataattttttttacttttaatcacaacaaaacttataaataaaagtgaaaaagtgatgactaattataaatcatcattcttatgttgtgactaaaaagttcgtggccaaaggtattagtcacaaaaattacaatttgttgttactaaatatatttttagtcacaatacttgttgtgactaaaactagattaatgataacttttatctaaatactatgttttagttacaagtaatattttgttgtgaccaaaagtcacatttagtcacaannnnnnnnnnnnnnnnnnnaaaaattgtcactaaaaataataattttttgtagtggtacaaactaaaatctagtagttcatattttaaatataaggttaaatttggcaaaaaaaaatattatatttgacacaaaatgctaaattagaatgattaatattaagttaactgttttcaatattgtgggaaacatgtggtatttatagcacatggtattctaaagaatacaagaaatgccaattacaaactctttattaactgtcacatctaaaaacaaacgtgtggaagtatttttgttttatttttattttgatgacaatgttcgttatagttaaaacattattcatgcaaaaattttagattttttgaatagtttatattgcagtattgacaatagagttcttggtattttagtcccttcgtgtttaaaaaatttcaaacttgttaaaaaaatttaaagggaggatattgtaactataacgaacactgctacaaaaaaaaattgaaaaaaaaatattctggcatgtattttcagatgcaaaagttttgaaagaagttgtaatt

SEQ ID NO: 87802 - DNA, 1312 bp, Cannabis sativa
agaggtaaaaatgatagactttaaaaaagatggtaaaaataaaaaaggacaatataaaaaaagtatagagtgtaatttcctcaaagtattagtctaattaatcttttggtagaagcgttgttcatatttgacctagctagtgttgtttttcaattttgtcctctattataatttcttagttattatctttcataatatattttcactaatattcttttgacctcacatgcaaaacaatatggatatatgttaacaaatcaaaactataaattacctaagggaacttttcatttttattggttttaaggtataaatttgtaaaaatgtagcttaatttgggaaaattaaaaaaaaaaaaaaagggttaaaaatatgagtaaaataagtaactgattacccctctagttaccataaggttacctaattacctctctaattatcataagaggtacctagttactcctctaatatttgattacctttatctaattttctcaattttttaaaaaaattttattaaaattttctcataaaatataacttttttaaaaaaaaaaaaaaatcagatgtataaaatcttataaattttttaatttcctttaataataataagagtaaataccattttggaccttgtgttttgtaaaagttactaattggactctctgtttagttaaatgacaaaatagactatgtattttctaaaatagtacaaataagatcctgaactaattttttatcaaataaaatttaataataatctgatctaaatgtattatgacaaaactgtttacattttttgtatctgttcgtgttaggaattgtctttaagttgattatattaaaaaaaaaaaagttatcgaaaattaagctcaatgtcctatttttactattttagaaaatacaaggtctattttgtcatttaaaaaaacagaggatccaatcgataacttttgcaaaatacatggttcaaaatagtatttacctaataataatataatgaggctacatatgtggattaattttttaaaagttttactagaatgtgggaaaaataaatatataatagaaaagaatatgctgttataatattctagaaagagatatatactaaatgaagacttgacaatgagaaagataaagaagaatatagaatattagatgatttgtcattttagtgtgaatcttgtaaagaatattagagtatttcattataaactatgaaaagtggagttttactttatttattttattgtattttagaggaaaaaattaatctctcattagttttgtttggatgttgacttttatt

SEQ ID NO: 87803 - DNA, 1064 bp, Cannabis sativa
aacatgtttttgaaaaatatttttcactttttcaattttaaaaacaaaaatctgattaaaaaagtgttaccaaacgacacctatgcttacatttctttaaaaaaattctcataaacttatacttaccaatattttgaacatatgtcaactttagtattattcccaaaataccctccccatttacatcaactccctctctcttcccttcttcttcccacccgatctactccaccaccacaacaaaaaatacattggaccattggacagtatcgggctacatcggcccacattgggtccgatgtcttcaaccttcagccaaaaaatacatagggaccatcggactgcatcagaccgaccatcgggctgcatcggacccacattggggtccgatatcttcaacctccagccaaaaacttcattgaaccatcagagtgcatcggacgggccatcagacacgttaaaaaacctaaattttcccaaaatacatatttgaccgatcccaccctaaatctaaccctaactaacagatttcacaccacattgcaacaaaacaatcgatttctaccataaatccatcaatttaaaaccaaaaactttatgaaaaaattgaaaaaaaaaaaactcaccttcacctttgacattctcatcggtaggcggtaggcggttagaagtggtcgatttgatttgggagagggccggcgttgtaggtggtagacggtgaggggttttttgatttggtgaggggtttggttgagagagaaccgagagagatagaggaagagaaagagttggggtattgttatgagaggggtattgttgggttttttaaaaaatggtcatatgttttcaattttgaaatgtattagtttaggcataaaatattagggtattttatgcatagtttttcaaatttccctttttgctccctaaatttttatatgtaccaaattatgtcttttaaatttgtaaggtcgttaaaaatacccctgaactattgagcttgttaaatttaaggatttttttttctaattttagtaaaagagtctaacatggatgaaaattca

SEQ ID NO: 87804 - DNA, 986 bp, Cannabis sativa
  modified_base (743)..(753): a, c, t, g, unknown or other
gagggtaaaagaaagaaagtagatagtgatatcgctccaggtcttcaagattgcttcctctcctctttcattcacttttcaggtctatttttgcttgctttggccttctgaattgtgttccttatataggaatgaaaggtgtgcctccaattgggaaacaatctgaattaggtcaaaaatctcgttttccgtacctggttgcgacctacttaagggctggttgagaccacaggcaaaactcaaaaaactgagtttctgccaaatctccccagtcgcgaccatggtcgcgaccaaataaaagggtcgcgactaggctctacactggtcgcgactactgactcctaatgagcagctttggtcgatttttcaccaatttgtctcgtctattcgtcaattgactgaatttgaactctaatgcctcggaaacctgaaacaaggaaaatcaagcgtaaaaccgctccaaaagacaccaataactgagaaaatgcttaactattagacccgagacataggctaaatataacctaacacgcgccccaccctgcaaatttcgagttttctcggccaagcatcttcaatccgcgcccgtttgtggctgcgtgcagccttccttggccgcacgtgcagccctcctgggcagccaacacataaatgcgatttttgtgggatttttccccaaattttgatttttcccaatttttaaaccctaaaattaaagtaaaatattatttttaatatatttnnnnnnnnnnntcaattttaaattaataatatttactttttaatagattattataattttttttatatttttaggtttaaatttgaaaattgatttttttattttttaaattatggtcagtcttaaaagtttgttaatttccttaatatttatatattatttaattataaacttagatatttcaatattgggcatattttaaatttaaagatagtattatctttttaatttaaaatattatatt

SEQ ID NO: 87805 - DNA, 833 bp, Cannabis sativa
  modified_base (323)..(325): a, c, t, g, unknown or other
aaaaaaatgggtagcatcgggccaccattagatccctattgatataaatgagaatgagaagtatggatggtgaagttagaagagaatagaagggagaatggtagtatgagtattaatataaagtgtgcctacttttttaattttggtaagtttgtgttcaaaaatttaacatacactaatagcgtatttactaaactgtaactggaattaaaataaataataagagaaatgaattagtttaaaatagaaaataatatattattattttgtttacttcaaaaaaaaaaaaaaaccaaaatcatattattttgtttacataactnnnaaaggtaatcgaaatgctttaatttgataaaattgttacaacatgtaattattttctatttatagattttttaggagtatatttatctttttttttatttttaattaataaaattaaaattaactaaataaagatattccttataaaattgtatgagaataaattcaaatttcctttaagaaaatataaaataatgtgaatattaaaacacaagagcaggacgccgtctgtgggaatcgaacccacgaccacatggttaaaagccatgcgctctaccggctgagctaagacggcttgcttgttcattaatttctgtaataatttatataacttgattattatctcttggaaaccaaagaaatttataaaaaatatcttataattaaaggataattgcatttttctaaatgaattaaatactatgggtgcatttggtaatactttttttaataaattttttgtttttgaaattaaaaaaataaaaatatttttcaaaatcatgttctat

SEQ ID NO: 87806 - DNA, 672 bp, Cannabis sativa
  modified_base (634)..(634): a, c, t, g, unknown or other
ttttttttaattataaccgatttgagttattctatgttatttgtttgtattcatgttatagaactggttctatttaaattacaaccggtttgaattattgcgtgttatatgtttttattcataatgttatagaacaggttctattttaatttataatctgtttaagttattttgtgttatttattctatttattatgttatagagccggttatatttttatttatatctgagacatctacttctattgacttgtcctgtgacttttccaacgacagtgaatttttcggtgacttttctggcgagaataacttttctgacaccagtaacttttctgataccgatgacttttccagcaaaatttattattaaaaatttatcaaatctattcattgttttttccttatattttaaactttgattaatattttttaatatcatatctttttatgttatttatatatatcatataaaaataaattctattaaattttttcatatttattagaaaaaatccttttaatgtatgaaaaaaaaaccctattatttaatatatatatatataattattaacttcttttattttagtttaaattcattaaagactacttctatcactggaccggttgctggtangagttctttgaagactttttctgctcctggggtgtctg

SEQ ID NO: 87807 - DNA, 1222 bp, Cannabis sativa
taagtactttcatagtattgctagttctcggaaaaggaacaatcagaatcggcaattaaaagatagtaatggttattggcaaacctgggattcgggattggaaagggtagtagctgactatttcactactctgtacgaagctcaaggacatgtccaacactccatcactgatggtattccttcttcgataagcagtgatcaaaatgaggaacttttaaagccagttacaactgatgaagtccgtaccgccttgtttcaaatgcactctgacaaagccctcggacctgacagaatgaacccggggtttttccaaaaacattgggacattgttggggccgacattgtttctttggttactgatttctttgcaacagggagcctccccactgatctaaacatcactaatcttgtcttgatacccaaaaagaagaactttatggctatgagtgatctctgtcccattgctctttgcaatgtcatatataaagtggtctcaaaagctcttgccaataggatgtgtaacatcattgaacagattatttccactacccaaagtgctttcatccccgatagacttatatccgacaatgtcatggttgctttcgaagtcatgacctacctcaagaggaagacaaaaggaaaaaaaggttatatggccattaaactagacatgagcaaagcctatgatcgcgttgaatgggattatcttcgggaagtcatgtctcgtatggggtttcactctcattggatcgatttagtcatgcattgtgttaccacggtttgctacaatgttattcatgacggtcatgttattggtcccatccatcccactagaggtattcgccaaggcgatccactttcatcttatttatttataatctgtgcggagggactttcaactcttatccaacaatatgaagcaaatcgcatcattcacggctgtcgtgttgctcgaggggctcctcccatcactcacatgctatttgctgatgatagctaccttttttgccaagcaacaaatggtgcagccgaaggggttatgtctcttctccattcttttgagcaagcttccgggcaacaagtcaatgtcgcaaagtcttctgtcttcttcagccccaacattgataaccaaagccgaacacttatttgctccactcttcaaatgtctgaagctgatgaaggtagtctttacctaggtttgcctaacattattggaaggaac

SEQ ID NO: 87808 - DNA, 2093 bp, Cannabis sativa
  modified_base (47)..(51): a, c, t, g, unknown or other
  modified_base (1884)..(1885): a, c, t, g, unknown or other
accaatgtgatactgtcaagtagtacagtactatcgaccataatatnnnnntatactcggtacgctagtcataccctaggcgtaccgatgtgatacggtcgaatagtacctaagccaacatacatttctaatgtaatctaacaggcctaactaacatgcacactaaacatgtaattacatatgcatatcattatactaatctcacctcgtttccaaattcaggtgtgccgaccaacctgagtggaacaattgctcgacgaattataggctcctaaatcacatcgataacaacatgaataagtgacttgccaaatcacaaccgggacttaggttttaaaccaaaaacctatctacatcaatttaatatgacaataccctaaactagcagggaattaaccaaccaaagctctgaaactaactcaaattgaaaacacgaaaaagtgcaggaaaccggcatctgatccagttaaccagttttacaaggcttgtaaaaccgattaaccggttttacaccaggtaacctaaaaattttgaaaacctaatcaattcaactccaaaccttaccaaaccttccagaccttcatatgataccccaataaacataaccaaggccataaaacacctcaacaagcacaaaatcaagattcaccattagagactaaagtttgagttttaaaactcaaaccatgtctaaacaccaaattaactcatcaattaactttcaatcagctcaaacaaccataatatatcattaaaatacaaaatccaacaactctaacaactcataacccaacatctcaaaaatcatgcaagagaagctacataaactaaagaaaccatagaaaagaactagaaagcttacccaagcttgaaacctcacaaaagatgctaaataatctctgaattgctaaagaaaaaccatggttccttcctggtttctagagttcacgagagacagaaagactagagagaaagggtttcttttttgtgtttttcctgtatttgatttttgtaaaaaatgagagtaaagcttaactttacttaattagtttcagcaatcgaattaataaaaatttgatttaaggattaattactactcactaaaagacaaaagaacttagggaaaaaagatcattttgcctccacttaagccaaaaagccgtaaaattacttaggggtattttggtcaactctaaaatctcgactattctcaacattcccaatgtctatctatattgcctcgctatattaaaaaaatactaagatgtgattgtaatagccaaacactgcgttccaatgttgttggacacaaaacatgcaaaaatatgaaattccatatataacatataaaaggcattctgaattcaaataaatctccgtaaactgataattcataactactaaataattttcataattgagtcctatttatctgctaaattccaaattaaagctaagcggtctttacataagccatttgattataatatttacaatgaaactttatttttttttacaaaaattagactttttttttacacaaattagaattctcttcttgtataataaatttttaaataattaattatttttaaatgatattaattttttttatagctagaagaactaagtatgagattttctattcgagtttcaggttgcttcattttttggggtagcttgactttattttttgagtgaatgactccttataaaaaaaaagatggaggagtttagccattttttttttagaaaatacattcaacctatttcaatttttactttttaaatatttaaataaaaagatttatatagttaagtgtaataattataaattaaagttataagtataagaaaattttaattatgaaattatatgtgtannattttaaattataaagagttgctataaaaattttaataatttaaggacaaaaaaattgctaaaagatccttattgaataagaaattaagaaaaattaattaacagttataattaatttaattttaaaatataattaattttcattaaagttttataaggaaataaattattaggtgactattaggttataagttaattattatttatt

SEQ ID NO: 87809 - DNA, 644 bp, Cannabis sativa
atctttctattatcatttttctaccaatccatatatctaaaaaatatatttctattattattttccttttaaacaataaaatagaaaaagtgtttatatttcttaaaaaaaccactaatgtgagccgttaccaaaaaaaaatatttttctattattatttataaaaaaaaaataaaaaagactatatatgatatttctaaaaaattaaaaatattacggttaaattaaaattataattcacaacaaattttaaatattattatatttcatttttataaataacaattaacttaaatattatttaattaaaaaataatgttatttattgaataacattaaaaaagtattaattatacaactaaaaataaacataactaattatataaaaattaagaatataactaagtatacgtttattacacgtaatactaacctagtagatatatgtatatatatttatactaggtatttgtaacatgcaatgtaggtttgtttaaaaaaaaacatgtttacttagagttgtattagagttgttattatctaattattaatttaaataacaataataattaaatctaaaacattaattatattttttaaatatataaactaattttaaatttatttataaaaactatctaatt

SEQ ID NO: 87810 - DNA, 684 bp, Cannabis sativa
catctgaaaaaacaaataacaaatcaatattactgctaaaaattaaaaaatggtcgacaacatatcgacatcctgtcgatattatgtcgacattatgaaacagagaacaacaacatgattttatcgacaacctatcgacatattgtcgacaacctatcgatattaacacacttatgacacacaacagcaataacaacaaattatcgacaatgtgtcaatatactatcgacaagaggccgatattccaaataagtggtcactcaaaataagcaatccacactgtcgacaacatgtcgacatactatcgacaagatcgatattaacaaacatttaaaaattcacatcctactgtcgataacatgtcgacatactgtcgacacatcatcgacattatggctcaaacattttttttagtcatgtcgacatcctatcgacatacctacgacaacctatcgatatacattaccatcacagacaattcaacaagttatactgcattcaattttggtcgacattatatcgataacctatcgatatcttatcgataacttagtttgaacaaacagacaatactgatgaacatgcagaacaatctaaaacaacatctaaattcacatacacaatctaaaacaatgttatctgaagaacatacacaaattcgcatccaaatctatgaaatttcta

SEQ ID NO: 87811 - DNA, 602 bp, Cannabis sativa
ataaactaccctaacaaaaatgggacggccagagtaattcacgccacagagaggctacaaactccaccatgatttttatttaacgatttgaggcatatttatttgagatttttacatttcacactatatttttgatttaattgtcaaaactaacttggaaggtattagtaacgtttttcttaatttgtttggatatgtttcaatatcctatatgcatgcatttgtctcttttatctttttttctcattttattaactttaaaataatttttgactacactgttactcagttaactttaaaaaatactattgggactacttttcaatatttttaaaatgtgagaaacatatatttttttgctattttagaaaaaaaaaactatttagtgactaatataataattagttattattttataatttttttttaaaatctcagttaacattcattttagatctttgttaaatgaattatatatattgtaaggaatgaattatattatattatatgataattaattgacttttaaaataataaaatgtatataaataatttatatataaaaataagggaattatttcatatactatttttttaacttt

SEQ ID NO: 87812 - DNA, 799 bp, Cannabis sativa
tcaaccctagcatgtgtggcaactataattccaatcttcaaaaaatcatatctttttcaatttaaatccaaatttagttccgtaaaagactaatttgcttaatttttaaccaaattttcaaataaaataattttagatcataaatcaaattattttacatagaaaattttgtaataacacaatcaatcatcaaaatcacataaacacaacatgaaacatccaaagtaatcaaaaaattattttaagcccatatttcacgaaaataaatcattaccatggctctgaggtcagttgttagaaatattttacttttaccgagatctactaacataacatgtaatgtatgttggattataattctataatctaacatcctaaatatgaatttcctaaacacaatgaaacaaacacataaaggtgataggaaatcttacattgatggtagcaaaataatatgtaacccttgatcctttcccttgatcctttctgtttgatcctttctgttgcagagtatgatcaagatctgaatttggattctccttcaggtaataaaaagactacatagtcttccacactatcttgagtatggccttgaaatgtgtgggcaattactcaatgttcaaaaattacaataagaagaagagatttagaaaatatgagagctctgtttattcttctattttgtgtgacaaagtgagtccattgtgttatgaaaataagagctttcatattctatttatattgtaactttagggttagatttaaaagtcaaaatataataaaaaaaaaagataaaaaa

SEQ ID NO: 87813 - DNA, 733 bp, Cannabis sativa
  modified_base (433)..(456): a, c, t, g, unknown or other
cctccttctgatatccttgttcattatttggttccattaatttctgtctttttgcgttttgctctttatactcgttttcgattttattcttcaattcctttgatttcattttataaatcttgcataacatccaattgcattgctgcaaaagataaattaaaattaataacttgtttaaatattatgcaaaaacaataatatagagtgatttaagtaggagtaggtagttacctgtgggtgattagattgagtcaattgatactcagtcattttccaataagtaagtgttttatttaagtccttaaaatccaaagtccttttaacacctatttcgttgttttgttcatcaaatattttcttctttgttgcatttccatgccatgttccacctttagcttttcgagtcgacctctttttattattattattattnnnnnnnnnnnnnnnnnnnnnnnnattattattattattattgggataataaaagtaccactcattttcgttgatgggttgatataaggctgttaactcatctggatgaaagtcattaattgtatgaagttgttgaatgtgattaagtgggagtaaatgagggttaaaatttttatttgtcaaataaaattgaagaagctcttgatcatttggggaaaatatgaccccaggaacagaagtcatagtctccattgatggttggttaatttgttgtgtgtgtgatttggattggtagaagaaa

SEQ ID NO: 87814 - DNA, 1400 bp, Cannabis sativa
cgagaaccatccaacacagtcagcataaccgtctatgaataaagataaagaaaagttgaccggttatttaatattatcccatgtgcacaaagatgaaacgtggggaatgtccacatttcatgaagaattatgaataagtagatcctaagggaataactaacaccccgtgcatctataaatagggacgaaatctagggtaaaagggatgactaatcttttttttttttttgttatctattatttattagataattaattgctatataatcaattctgcaatttatttattataaaaaggctaatattttagttaacaaaaaatatgtgttaacaatttagttctttccttgagagcctttgtaataaaacgtagaaaaataccctcctcaaaatttgtactcatggcagacgatactcggcgtaatgaagagaatcagctagaaaagacaacccaacgtccgggaaaggagccttaggctttgcaaagaactaacactgttgaaactccccatcctagaagaaacattggagattttaatcaaactggtgaatagagtccagaaaggtgaaagaaggatgcttatgatccaactagatacgttccactgatggaattggaaaataggtaactttagcaacgcctagctaaatcaaactggaggaatgccgagttagagtgtgaagtgacgacagcaaaggctacagaaggagtggcccctcaaaatcgacctaatccatctacaagacgactaagggggacgcctcaaggttctaaaaccacgagacaagggaataatcaaggaaatccctcaaacactcaggaagaacaacctagaaatgtgagagatatcccaatggaaggagaaaacccataaaatcctagaaacacaagaaatcaagagactaaacgtgataatctatgaacttcccatggatttgcaaaataagggaatgaaaaacctggtgtaccagagtcttctcgcatgaatacaaataccagatagacacgacctaaaaaccatgaaattttggagcatgatgcgagaaatgctggaaattagcctgggacaagttgaacctaaggcatctacaaaggcctaattgtaataatagagatagtacacacacttgcttgagtaggggtcgtgtgtcgaatctcttccgaaggggaaggctaatgcaagaaaagtcacaagatactggctcgagtacaaatccaagtggatcaaagtcaaggacccgcgggcatagcagatcgacctaaactcatgcccatgacaggcgaacgtcagatgaaggtggatcacgatgttattattaaggtgaccaagagagtattagtaactcttaaagttaccaatctgaaagttactcgaagacaagatctgtgagtaattatg

SEQ ID NO: 87815 - DNA, 1118 bp, Cannabis sativa
ttatactaaaatattatatatttaggtgtttaataccacatatagttttacatcaaatacaattcaatacaatacgactaatcggcatttcaaacgagcccttaaagtctgtttgaattctcatttcgacatactaaattatatactaatattataagttattctatgttagtggaaacgttaaataaattatgctaattatttgcaactgcatgattaaatatgccgtatacaatattaattatagaatttatatatatatataagaaaattataaacaatttaacctagctaccgaaatcagaattcaaactgatgatttttacagagtgcttatttcaatagatttaattaaattctgtttgaatccttattttgacgtattaaatttttagaattttctagaattatttatgcgataatatggtatgaaaaatagagttaattacaaacatcaattataatttatatatatatatgttttatgtatatatatataggtgattaaaatgtagttaattatatatatataaactttttgtttcaggttccaagatcatcattaggtaataactaaagcggcgtctaccttatatcaatggaagcttcccttatataataatttcaatttcaattaatatttctttttctttaattatatattaatctcaccttccttttgtggttttcatattaagaatttcattatgtttggtcttatatataaaaatatatatgtgtgataataggagagaaagagagagagacgatatatatataaaaatatatgatcaagaagcctcatatataatcatgatcaagtatatatgcatgcttgatttgaaaatttataatattctttgcagtttgcatgcatgaaccaaatattgagtcctttttttatttctttaatttatgatcaatacttttattattgtatggctttactcttttcattacttatattgggctataaataaaaaaaaataaataaataattaaatatataaataaagacaccaacttttatgtacatagttcattgtatgtgcataagtattaattaaaattatgtagtgacaatataattgctttttaagtcatgagttagagtagat

SEQ ID NO: 87816 - DNA, 947 bp, Cannabis sativa
aaaaaaaaaaccatagatatttcaaaataaaaatcaatcatttgtagcttgtaaaaaaaacaaaaaattcattaatattttatagcaaaataaaacttagtattttcgagaaaaatgaactaaactaaagtagatgtcatacaaactataaaatcactaagaaattatataatatcttttattctatttagaacaaggatgtattataaatataaaaaatattgttattgagtgttagtggtgctcaatactttttataggtagtcctatgattgattagcgatattttttaaaagttacttttttagagcattgttattaagcaccaatgatgctcatcgtcttctataggtggtgcttcatggttagttagtaatatttttttaaagttattttcttaagttatatgagtctaatacttaattacactaacagtggtataacactgaaaatggtgctcggcaccattggtgcttttagcaattctctcttaaagcattgctattgggcaccaattatataaaactcgatacttactcataccaatagcggtatgacaccgagaagaatgttaggtatcagtggtgtctttcagtagttttcaaatataaataaagaaacctacatagataagtgagtttcacaaattatttgttatatcaatatttagagatattgacaacaaaattatttgagctatacgacttgtcacacttaaccacaaaaattaattttttgacgaaaaaatccttcaaactaccattcagttttgctatttattattctgtccaaaaatttcagctacgtgccatggtggcatgtgcactatgtaccctgatgtacacatagtagatttttagtggtgtatataatattaattatttaaatattatttttttttaagaaaaaaggtaattacatacaattatttaaatattataaaaaag

SEQ ID NO: 87817 - DNA, 500 bp, Cannabis sativa
cccatgccctcgcaaagtgctcactcatcggtctcgaaaggcactcgcacatcactctctggatctcagtggcaccctaaggcgcatgtggctacaacatcaggagtcgaaactccaacttggcttcttgacagtggtgcctcacaccatgtcacaagtgatcttgccaaactttcacttcatgctccatacgatgggtttgatgatatcgaaatcggtgatggtaccgggttacacatttccaaaactggttctacttctcttacaacaccttctcacacttttcaactacatgatgttttatttgttccttccatgaaaacaaacctcatatccatatctcaattttgcaaatccaataatactgccattgagttcttaccatcttctttttgtgtgaaggatctactgacaggggccacattgctggaaggacaacctaaagatggtgtgtatgaattgccagttttgcagccaaatactcgtccttctgcattcct

SEQ ID NO: 87818 - DNA, 2128 bp, Cannabis sativa
attaatgtatgttagtggagtgtaacttcttttaattttaagatgatccattatgtaaaaataaaactacccactatctctctcttaatcacaattaatatcaactaatttcttaacaaattgtgcaaagcctccaatagtactccacgccatatatcttataatagttgagcatcatcacttatgatcatcaacattattcatcattttcatgtgagaatgcttgtcaaatttaattatggcataggtatttttttttcaatgaaggtaatttattttattaacagtttatttctttaattattttttatcaaaatttttccttttctttttcatcttcttcttaacacattattagtttattggaggttggattacaattttgttgaaattattatatatttatttattgatttaggcaaatacattccacaatatatattatttataccattttcattttttttacagagattcttcaagaaagacacaaaatggaatggagacaactaatcaatcttggagcttcaaaaaacttctagtcttagaaagaatgaaattgctacagatagagatagatatatattacatacatttgtaccctcttttcttttgcaaagtgatattacaatagttgtaaaattttcaactttgttataaaaattcttgtcaaatattgttgtacacaagtttcatgtattttgattgtatgaaataaatttgaaaatttagtttaattcagattgtgttattattaacgtaaatttaaattttatacaattttgaatttaagtttttattatcttaaaaactaattaaatataaaatttgatgtatttaattaaaaattatttatttaaaaaaatttataatattatatataattgattttttatcttaaaaatattcatatatagcaacacttttaaaattagtgttgctatatgtctttattaatttataacatatggtaacacttttataagtgttgctttatatttatattttttgcaacactctaggagacaactcttttataagtgttgccttttaattttctttagttaaaaaaaagtgttactaaatgtatttttttctagtagtgggtcagaattcgggtagctactaaagacccaatccagcaaccggggaccactcatataaggaaaatgattccattgcctattcctattttcccatatggcccaaaggactttaatcacatcctcaaactcctctttagcaagcttctgctgaaattccactagtaaatccatcatggagtttcctctactatctttaatcagcttgtagcaaggcattaacttccatacagttttgaccttatcacaagtccaaagagcatgggaaagagactcaacgtacttggcacaaatactacaagtcgggtcaatcgacatacctgtatgatgcaagtttgtctttgccgagagccaattttgacaaagtttccatccaaataacttcattaggggaggtaatgtcagtttccaccacatcttccaccaaggatggattctatccatgtccgagcactagctagggctatgatttaattccctagctactctatacccattcttcactaagtattgcccaattgtagagagaggccaaatcaatgtatcttccgtgtgagtatcaataggggtccccaagatccaagaaatatcctctttgtggaaataaaggtgtagaatatccttgttccactctcaatcttcattaagaggattattaacaatggtatgggagttcgaatcctgatggtggtaaagaatagttccatttggcagggggatccacttatcatcccaaatttgaatgtctctaccattaccaactctccaacgggctccttctctaataatcttctgcccccacacaattcctttccatatacaagaagctctcagggggcatttggcattatgaaaggaggagttgggataataactatttttcaatactcgggccaacaaagagtgaggcttatagaactaggagctttgtttcctcctttctgtggtcctccaatcaaattttcaaatgtctaaaggttgttgattaactcgtgaaagttaaatgtcaacttgttcatgacata

SEQ ID NO: 87819 - DNA, 515 bp, Cannabis sativa
gagccaagcccagcaagacagtaacaataataataatatgcaatatacatatttacaattcagatgaatattgatgccaccacatctactgtctatataacaaaaacctacgttgctctcacacgtctatttacaataaggccttagattggtttatctcggttctgattaccgcgtctaacctaattatgccttacccgcataattctttatttcaacatatataacataacattgcattcaaatcgcttaatcactagagtagtaaccctagggcatataaccgctcactttacggtaatataatcttagtttttcatttaatcgcaatcgtaatatctacgtgctaactactgtcttacctgacatctcaagtatgtggagattctaaacccccgggtattcctgaacaagcgctggtaatcctagtcacaattcctaagatttcacaaatagggttaatcccaaaaatcaacttcacataatcacttaattgtcatttcattcatagatag

SEQ ID NO: 87820 - DNA, 547 bp, Cannabis sativa
  modified_base (498)..(521): a, c, t, g, unknown or other
caataatatttcgacacgtggcatttgaattaggtgtaacggatctgttaacttggagaccaacgaacaaataaaaaacatgaccttgaggactattgccgctatttttgagctgaactttttgggaacttttatcgcaaatttcccatcaatattattaactttgctactcacataatgataccactaccaccttaatttttgtaaagcactatattacacacacatacacatatgtatcgttttttttttgtatgcactaggttaaataattttgtcatgtttgtaacataaatattaaagtcttaaatatatctcaatccaataaacctaacccctatattattgtactaagtagggttgagttgtacaataacaaaaatttgaatgatttaagcttatccaaatcacaattattggattggcccattaaaagacctctaacccaaccaactcaactcatgtgcacccctaccacctctctctctctctctctcnnnnnnnnnnnnnnnnnnnnnnnntctctctctctctctaacttctctct

SEQ ID NO: 87821 - DNA, 1692 bp, Cannabis sativa
acctaaattggaattcagacgtagacatggacacgaactcatacacggaccaaaatactgacccagacctagaccgggattgaaacacgggacctagacccagatgaagacgcagacctagacacgaactagggacccacaaccaagacccgaacgtggaccttgactcagacctggatccataccgagatctgaaaaacccgtaaccgaactcgaactaagactcagtaccctgacaccaacttggacccagacccggacccggaaccaaacccggacccagaattagaactcgaagtgtgactaggacccaaacctaagacgataacaaaacccaaaccataactcaaactcagaccaaaacctggacggagaccttgactaggactaggacctaagatctaatacttgtacatggactaggaccaggaccgggacctgtacctgacctggtcctaaacgctcaccgaatcctgagactcgcaacacagaccacgatccacaccctgacaaggacccgaacctaaacctagacaaagatagggatcgagacctggacctgaaccctgaccgcgacctggactaaaccaaagactcaggaccagactaggaccgtgactaggaagttgaccaaaacctagagctaaactcgggcctagccccagacccaaaccgtgacttgaagttgggccctgacacgtcgtgtacccagaccaacactgagacctggaccaaaactcggacccatacctagacttgggaccctatccaaaacctaaactcggacctagataaggatctagatatgaacctaaacttgaaccgaggcctgcacccagaccaggatagaaactcggaacctagattctgaacgagaccctgaccaagacccagacctggacccacacccgagacccgaactcgaacctggacctaaacccagacccagactcagacacagactcggacaaggaatcagacctcaacccagacctagacccaaactcgaacccagatactgaatcgaaatcaaaactgggactaggacccaaaccgaaacctaggactcggacctggatggggtatctggacctgggccacggaacccagacccaaatctaaacacggtactcggacctggatggggcacctggaccttggcccctggtcctggactcggaccgggacctaggactggaacatggatataggacctgtacccaacacacgaccattagaactgggattgagaactaggatccgacctcggacctggaccctcccctagaatttggaccaggacctgggagtcgaagtggaactagacttggacctaagaccgtgaactagatctggacccggagcttgaacctaactcttagttcgtgtttgatctaggacccatacccggactctccaaccaagaccttgacccgacacaagtcttggtcttagaccaggaccggtcacggacacggaccaagacccaagatccgaagtggaacgtgatcgggaccaaagattgggatctggatcttgacccatgacccgaggcttggacccgacccatattcggcatctaggtcttcgaatcataccaagacccaaatctagcacaatttctagacaaagcatccaaacccaaactcggtcccgagacccaaaatcggaagaagaatcggaataaggact

SEQ ID NO: 87822 - DNA, 812 bp, Cannabis sativa
atacatatttgtactcatcctcaccggtcgaagagtctaataaaatagacttgtggagtaggaatagttaacgcctgaagcacgtaaaaatctcgtatttgttatttaatctgttatttcctttctaagctctaaatattaagtttttaaaaatctctataaaatagaaaagtgtgaaaataagagatttttcttattctatgagtttcatttaaagacaatcgtattgcattattatttcttgattaattaatagtgactagagatgtcttgttagttaattgagttaattctatcattgctcgagagtagattaattagttacattaggattcttgaaactacaaagggtgggtataataaataaattgagatataattggtaaactgagattcatagtttagaataggaaatcagtgctctagatttttattattatattgacattgttgtttgtctatttacttttcaattaatgtattatttcattcttatcatcatttcctctaaattgtctaattaaaatataaaacctaaaaagtatagtaattagtaaaatttaataatcaatccatgtgggttcgatagtatttttataattaaaactttactataacaacattgtacgcttgcaatggaaatcatgtatcaagtttttgtcactgttgacgggaattgaaagtcttaaattaattgctaatattattaataaaagtttttactttaaattagaattttttttcctaatattgtttgttgcttgtgtttcagtttatgtgaagaaattgaagtgcgacacctttcacaccgc

SEQ ID NO: 87823 - DNA, 508 bp, Cannabis sativa
taacgattattagatgatataattgtagtagggttatctcaaaaaaaataaaaaattgtagtagggactataaataaaatataattgtagtagggactatgaatataatcatgattattagtaatatacgatgataacgattttaattgtagtagtaactacgagacgatgataataattttaaaatgatatgatcaatttttttattttattagatgtattgttttagatctttattttatttaaagattcttcaatcttttctctttttcattataatatttgaagctatctcttaatttgtttgctttatttatttatttttttagtaaataactaactttatttaaaacaaaaacaaactaaatggaaatattagttagttacttcccttaaactgccaagaggaaccatcttctccactctagcgcaacaggcaagaagatcaaccacgagattcaaggaccaagaaattaatgaacacaacctgtacatactcgaagttatt

SEQ ID NO: 87824 - DNA, 503 bp, Cannabis sativa
ttcatggcattcactaatagggatgacaaggatctgctggaaagaatatttggttactgttgaagtattcggcaaaaagtacattacaaatttatcggcattaagctcttgacctgaactgtgatggtaaatatataaggcacgcttaataaccccacaagaacgtttattagcttgacagaatagcaaactatcaacaataaataaaagatgggttatggatggtgctctacgggagacaaccaatcccttaagccgtctaaattgttcctcatattgcaaaagtctagagaggcctcagaacaaataagaaagaggtaaggagaaagtggatcgccttaaacctccttgaggtaatactgagctcgaaacagcaccattaatgagaaaaaaaagtgtttgtatgcatacaagtcatgatgagtgaaatccatctaatattaaaacctacttttcccataacagcagctaaaaaagagcattccacccagtcaaaagctttg

SEQ ID NO: 87825 - DNA, 560 bp, Cannabis sativa
aagaaatagtaaaatgatatttattattttctaaattttagattaaagaaaaaactctcaaggttattttgctatccacgctgataattgagtgataacaatcaccatcgaaaccttgtttcaaaaaaaaaaaattattatccaaaccaaaatgaaaacaaatatataaatatatatatataaaaaaaaaataacataggaggacccacttttgtaaacttgtaaaaattatagagcttgaagattttagctaaatctccaccatcaattcatgataattaaattattaaattcttcattttaattatgagtgatgttagtggcacacaaaaattgtacacattttttacctacaaaatatgtacttaattaatttttactatatattcttacaaaggaaaaaaaatctgctataattattatattataaacctattaggagctaaattatttttgattatttccttgagattaattatacatgaccattatacgtaaataatatgtgcaaaattaaaataagtcataataattataatactttcttcattttgaatttc

SEQ ID NO: 87826 - DNA, 578 bp, Cannabis sativa
catgtttgttgttctttgaggttaatttggagcatgttattgtataaatctttgtttgtatgatgcttagtattttaattaagctttagctgagattttggaggtgtttttaaggttgttgctgctgaaaattatttgacttgagtgagttaagctcaagctcttgagcttgatgattgcttagttaaaacttggtttctttgtgatatttatgcaatctgaaatgctgagttactgctggaattggtgttggatgtatgagttttaattccttgttgattgttagcatcaatatttggtaatttgtatgtttggttgagttttgggatgaaatgattggatttttgttgctaaaaaattgcgttgagctgctggttttctgggttctgcacccagatatcgcggcatgctgcggcccgctcctctgagtggacgtcggaattggtccgaggtgccgcgacatggtttgggcgtgccgcggccggccctcatgtttttgggcagtttcgagttgattttcaaaaattcgtaacttttgatttcgaactccgatttgggagttctttatatcgttggaa

SEQ ID NO: 87827 - DNA, 510 bp, Cannabis sativa
tgattgccaaactgtaccagctagggatgcacattttccacatggggacggtcccgcgggaatctgcccttaatggagtggggacggagatcaaattttgtccccgaatgttaaatggggtagggacggggatgacactccatgccccgacggagacccgtttaatttattaatattttatattatatatatgtgtttgtattttagtatattaatatcatttttacaatttttaaagttgtatttttgtgtaataattgctatattagatagtaaataatatgtaatattttatctttcatgtaatttaataattttatacatttaaatttttaaaataaactttatttttacaatagggaattccccctgttcccgttccattaggagattccctgcctcgtccccgatggggaataagcggagataaggcggagatggagattaaaatccattaaaatccttaacaggaatggggacggaaaaagcactccccgctaattcctcgcc

SEQ ID NO: 87828 - DNA, 755 bp, Cannabis sativa
tgttgtatttaaattattttttttatcttttcaaattatgcatgaaaataatatttttgtaaaataaggcaaaatattggggcgttacagcctcccaagagctggttaaagtcaagggtggccgacctgttatttgaatccctaaaccaatctagccattcgacccaattactactcaaatgaatattggtcctaaagctccaaatacacccaaaccacacagcctttgcataagtgcagtcccaaaagaggtgcagactactctcaattgaagatgaacagagtgggcatagcatgtccatcatgggaatggaataaccaattctttccctagtggggaggcaattggagagtatcctccaccaaaacatcttcagcctgctgtgtatcttcgctccccaaatatatctccaatgtctatccccttccaggtttcggccaatgttctttaataatttataagcagaattaactgagaaattaccacttggatcaggcaaccagagccaagagtcatttgtcatacaagtaggaagattaatgttgagaattctttgggcgtcttcaacccgaaaccagttccggatcaaatcctcatcccactgtccatccgaaatgaagttactgaccaagcttatgccctccgaagagtcaacgcaaggtgtcggttgtcgaggattcccaggcacccacgggtcaaaccaaatggacgtagaattcccattacctatttttctgcagatgccctgctgcaa

SEQ ID NO: 87829 - DNA, 647 bp, Cannabis sativa
  modified_base (417)..(428): a, c, t, g, unknown or other
  modified_base (563)..(563): a, c, t, g, unknown or other
ccttactatggcaataagataatttaataatgataattaattaatagattatttatgataaattaagttaaatatttgtgaaatgagtcaaagaaatccacaattttctttacggttagactacttatttgtcctactcctatacatgcatatatataatctgagatgagatatctagctatttccacatgccaaattaataaatataatatgataaggtgtaccagtactattgatataaatataaatattacattaaattatgattattaataaaaagttatttccacatgccaaattaataaatgcataaatgaaaaaaaaatatattaataaaactacttcaaaataaaagataaaacgaaaaataaattaaaacaaaggtcccgtttggtaatacttttgttttttaatttnnnnnnnnnnnnataaaagtaaaatttttgttttttaaaatattgtttttgaaaaataaaaatgcgttctgtaaccacttttatttttcaattttaataaaaacataaaacaaaagtgtattttttgtaaagtttatttttattttnattttttgattttatttatgtcgggtctaaattcgggagtcggatttgggttcaggtcagagaccgggttcaggaccagggatg

SEQ ID NO: 87830 - DNA, 743 bp, Cannabis sativa
  modified_base (512)..(515): a, c, t, g, unknown or other
tcaaactggttataactaaaatagaactggttatatttatccactagttaaaaatttgggacaaaaaaactggttttgtaaagcaactaagataaaaactcacacacaaaaaccagtttaataaaataactcaaacaaaaacactgaaacataaattaaaaataaactagttctacactaaaaaacctcttaacacataatacctcataaaaccgattataatttttttttaaaaggtgaggatcaatttgaaaaaatactgaggcataaatatgaaaagaaccagctccataaaaaaaataaataacacacaataactaaaaatataatataaaaaaaccagttatatacatcaaatagttaaaaatttgagaaaaaaaaactaggttcgtaaagtaactaagataaaaacccacacacaaaaaccagttaaataaaataaatcaataaaaaaactaataccttaaattaactaaataaaaaatcagttctcgaaataactaaattaaaannnntttctaaaataaataattcaagaattaatttttgatttgatttaataaaaagagaaagaaacactcacaattacagttgcaaataattacagttgagggaatttattaggagcatactcaaagtagttctcctcaaccaaagcaaagaacaaaggacttgtgctattatcacctctgaacatatccctacaaaagaacaaatccaaaataatattgagacataaattg

SEQ ID NO: 87831 - DNA, 1534 bp, Cannabis sativa
ccgcggcccacctctggtttgtggcctgggagtggaaccgaggtgccgcagcctgcccccttgtttttgggtaaattcgaacgtgttattcgaatcttcataactttgtgatctggattccatttcgagagttctatatatttttggctcgttccgagctctatgtgaatatctatattttcaatgccaagtttatattatgtgaaagtagaattagagattaaccctaaatttgtaaatcccaaaatttgtgactaggattaccgacacttggtcaggatcacatggggatttggaatctccacatttgcgagacatcaggtaagacagtagttgcatgtagagttatgcgcggtggcacttatgttgaaaattttatatatgattaattggaaaatgagattagggttattggcctaacatgagcggtttaatggcctagggttattaccctattaaattattaatatatattgttatgccaggagattgcaatatatgtaaagttttagggttatgcgttcaaggcataattaggttggactcggtaactaaaaccgagatgaattattataaggccttattgtatatagacgtatgagcgtaacacgtaggtctatgccacacagacataaataggcatgtgagcgtaacatgcaagtctgtgtcatatagacaaatgtgaatggcattaatgtttatataatgtgttaattaggattattgatattttaaactatcttactgggcttggctcatgggtgctctactgtgcaggaaaaggtaaatctatttctgatcagccatgagtgcgagagttggatgatgtatgtacatgttcaggccactctagaccaagcgggttggggtctaccagtgatgaacatttgtaactctgttttgccgcttaggacagctaatggaaaagacttgttatattttgtaaaatatttttgggatcccgagatatgtaaccttagattgtaaaattaaattattacaagttttattttaattctgtttcagtttaaagtttaaagttcccgcacttttctgcttagtaatcacgtttaggggattagggtttcttaatcaccttgggtagcgtgcctaattgttagggtgttaccgttgggtatcaaagtgccatgatttttaaacatcctgtagacccgacgaatatgtacaaacatcgtcagagacaagctcgactcatggtgtagtaagtgttgagagtaaatgcctttctgcttatatgatcatttatttaccactttccattttaggcagtatgtgagcatctagagtatttatgtgatatatgatggcaagtttaaaatgtttatttaagttgaatggaatagttaagttagggtttaagccaataagtgcataagtgtggtattggtgcttaactcactgatgttgttgattatagtggtacttgtaaaaaggacactccgtaatcatctagaccacagggcgagcaagtagagcttggggtaaacaaaaccaattcaccggcactgcctgc

SEQ ID NO: 87832 - DNA, 562 bp, Cannabis sativa
cactctttccctacacgacgctcttccgatcttatttagggcataaaacccaacaggcagtctttctgagacaaaggaagaggaggaggctgtacctctaaattttgggggatacaacgaggccggagagtcggtttctgtggacgatgatttcctggttgaaggagtggactacgtcactgaggagcttactgctgcagttcctcaaaggagacaaagtgccttgggtatcaggtgggtgagtcctccttccaaggtcattgaggtacgcttacgggatctcgaccagggcggctatctaggcgagctagaatgttatgttcctacttcgaacaactgagcctccaacccgaagaaggggatgtgcgcctggtcgggtgctcattccaaacaaggggcactgctgcctttgcacccgtactttaggaaggtggcagacttcttccgcctctgttcgatccaattcactcccaagggcgtcaagtatctgtctaccctattcgttctctaggccacctagaagtgggatatgccttttcctcataaggttagctggtttttt

SEQ ID NO: 87833 - DNA, 1130 bp, Cannabis sativa
tgactattttattcatagctaaattatcttagttctttttacaactacaagtcacaacctcatatatgaataagaaattttctgatatttatataatttattcaataataaatattaataatttaacattcatatatatatttatcaaaatgttcaactcttattagtaatcaaaaatgtctttacagatttttcaaagcataaaccctaataactttgctcgaggtcctaattgccaatagtacgaatacttctcgtgggtgcatggacaagtattgaacttgagcaatcagctcaattccctccacacgtgccacactatggaggactattttaaagacaatagttaatacagtactacgagctgccactcacgaagaaaacactcaagagattactctatggttatacttgataaatccacacagttgccaacaaattcacgtgaccaggaaacaaccacaacacccaggtccgatcaacgtctttgattggttggggtttgggttcgaggtcaggagccagcaaggtggggtaagagtaatggtcagtgtttgggtcgtggtcgagtcaggtcgggcctgggtccgggataggtaccacctagggtcctcggtcagcatggtggggtcgaggtcgaattgattgtaaaaatagtataattttgctcatagttgtacacaacttattactacaagtctatactactaaatatagtattacattaaaataaaataatatattacaacacaatataatataatatggtgtactaaactgatgtatactatatattttaattatatatatttggtaaatttaaatgtaccaaacacagtatttatatatatatatatattgaaatttgtttgattttgtttttttgaatttataattatgttcaatactcatttaatactctgagtaatttgaaaaattatacctatttagtatgtgggcttaaatttagaactttttttttcaatatatatgaccgatacatattcacttacctaagtaaatagttaatttgaaattgaaacttatattatttgatcatatttataaaattttattaatcaaatttaaatacaaataacaattgtttatatttaaataagtctacttta

SEQ ID NO: 87834 - DNA, 583 bp, Cannabis sativa
ttgtgatatttctaatgaaaagtattataatgatgtagtttgtactgcaaaagtggaagagtgtaaaattattctaagatatgatatgagcatatctgagaacactttgaaatttgatagattggctaaatttacttctgagataacaattgtctcatgaagggcaaagtttatatgtgttttaaattcacatatttcttgagataccaagatcatgtaacacctgaaaatgttgctacatgtgtgtatgtataaagaaatggcgaattatacaaatgattgcaaaatttacaattctttcatattaatattataaaattaaaatacatttttttttttaaaaaaaaaaggttgtattacactctctaaaaagttatttcaatagaatttttagaataacttgtagattttaaaaaaatttcgaatagctacatgagacagtttcttatttcatgtcgaataacccaacattttttttggtgacaaatgaatgagaatgattaccattcatgtcataaaagaaaagctgattgctaattataacctcctattacaatttcttagtcaacctctacgtccgaaa

SEQ ID NO: 87835 - DNA, 575 bp, Cannabis sativa
gtgagcttttttatcagtgaatattgtccttcagcctcaacaagtcttttgttgatgtaatagatcgaatactagatattgttttcttctttgatcagtacgacacttataacatgctctgtgacagccaggtatatccctaactcttctccatcgaaaggttttgagagtacgggaggtttcgcaagttatctttttagctcttgaaaggcattctagcattcctccgttcattcaaacttcttgtttccgcacaggatattgaagaaaggaacacacttgtctgttgactttgaaacaaatctactgagtgtggcaatccgaccaattaaacttttgacttctttggattttataggcaatttcatatccaggagggcttcaattttttcaggattgggttcaatacctcagacgttaacaatgaagccaagaagcttacccgagctgactccgaaggagcagtttaagggattcagtatcttgctgtatttcttgaggactttgaagcattcatccaggtaatctatatgccccccagccttccttgatttgacgagcatgtcatccacata

SEQ ID NO: 87836 - DNA, 749 bp, Cannabis sativa
agtttccttttgtccttcttcacttagttcagattttaatagtttttctctgtatacaccggtctgcagatggcttatgcttattcccgagctaagtcggctgcctttaagaatgccgccatttccaacactatgggggcggaagtggacttagccaggaaagatgtcgatgaagccagcgttcaacttggggctgtccggatggagctgggagaggtcaataagaagcttcttgctactgagaagaaggtggccaaactgaccaaagatctacaagccatcgatcagcttgaagccgccattgcctccttatctaaggaagtgaccagccttcaagaagaaagggaggttctccaggctgtcttccgtaggttggaagaagagaagaagaccaaggagggggagcttaaagttgaagttgagaagtataagttagaggccgggtagcagagtttcgaagtggagaggcttggagggaaagtgaatgctctagagacagctggtctcgagattttttatgacttttggaaggccaatcctcaggcgaactttgattacttgggtgacactaaagacatatttctcgagtactacattgctcaggtggcctatggggaatccgaggcgaccacttccacctctccaactggtcaaaatgttgaagtgccccctgctcagacaaacgatcctccagcttcagctcctttttatctattcggccataaggcctgtaacaccctaactaacat

SEQ ID NO: 87837 - DNA, 840 bp, Cannabis sativa
aaaaatgagtttctgcagctggaacgctcgaggtttggggagttctcgagcgttccgtcacctctcccttttggtcaagcaacatcagccaactctgctttttgttatggagaccaaattgcctgccggtcctggactttctttgaagtacaagcttcattttgataatgttttagaagttcctaggcaaggtttagggggggtcttttgcttttttggaacaactgtattaatgttactgttgtctcttactctcttaatcatgtggactgttatataaataattctaatgatattaactggcattttactggttattatggtctccttatattgattcaaaagtttttacttggactattcttactcgattatgtgacactgctccccttttaccttggttagtaattggcgactttaatgattatttatctcttaatgatcgtaattccacttcctcccctccctcccatgccatgcaccattttcataactttctgcatactcgtaatatgacccctctccctcattctgggaacaagttcacttggcgccatggctcaattcttgagcgccttgactggtgcacgatttcctcttcttggaaaaggcttttccctcatgcctctctcactcatttggggttttatggatctgaccatagagccctgaaactccaattagaagacccttcttctacgcatcaaaagcaatcccgctttcatcttgagaattttctaatcaatgacccctccttttcaactttggtctgtgactcatggtgcctcccttcctcttcatctctccccccttttgcaacattttcttaacaaacaatcc

SEQ ID NO: 87838 - DNA, 3326 bp, Cannabis sativa
  modified_base (3296)..(3297): a, c, t, g, unknown or other
aacatattcctatgcccaattaatattaagaatactaatttaagtacaattccttcaagtcatataagaaaaataacatattcctatgctatttacaaattacacttttccaagttgatattgacgcatcattcaattaatttcactaaccctattttctctaaaatcaagattagctagtacttactaatggtgatcaagtaaaagtaagcaattgcacaataaacactcttgaatgaacaaaatcaattcactaaacataacaacaaaatatcaaatcacaatttttagtcaacaaaataattctagcaaaagaaaaattaacacctaataaattgtgcaagaattataaattataaaattaaaatttaaaatttaaaagaaaagagagatagagatagaaaaaaaaaaaaaaaaactcatatggagtttatcacaatactccaagtttctctttcaaatttctctttttattcctcttaatttttgccaatctcaaaattaaaactctaaataacattcaaataactctttttttttttttcccctggactggaagcaccactgccgcttatcatattacgtcttcatagcatggcaccacgtgtcctctaacttctcttcaccttctttttcttctcttcaccttctttttcttttctttcaacaaatacaacaaagaaaatatgtaattgtaaaggaagagccaagacttaaacaaatggcaacttataattcaacaaataatggagctatgaataaatttgtgaactggcattctctagtaagacattgatgtggatgcataaaatcttcttttatactgaacacattagagtttctcctttaaatttaccactttagtttttttttttttaacttttgaccataatttgactccataattacatttaaattctacaaaatacataatattgagaataatatttttaaaatggggaactaaataaaattgataaaatgttacaaaaattaactaaaactaatttataaatactaaactaatatttatgcaaaattaagtaaaaccccataaaagtcactgaaataaatgaaaaatacttgagaacaaaactaattaatgcacaaaaaaagctaaataactctattttcatagagttgtcatctccgtcgaggccaatgcattcagcaatgaagtctgctaatgcttgtcctttgattattgttcgaggctagtaggtgatcttaatctgacctagttcagctgacaacttgagtatgtgccttgatgcttttggcttcatcaaaacttgcctaagtggttggtcaattaacaccttgatcgtgtgagcttggaagtatgatcttaactttctcgaggctagtaccaagcagtaggctagcttctcaatgggtggataccttgactcgaccccaatgagtcacttgctgatgtagtagacaagatgttgtaccccttcttcttcacgcactagagcaacacatgctcggtgattgtgaaatagacgtatagttcttcaccatctattggcttggaaaagatgggcagcttggctagatgatgtttgaaagcttggaaggcttgctcgcattcatcggtctattcaaacctcttgttgcttcctttaagtaaattaaaaaagagaacacacttatcggttgacccagaaataaatatgctaagtgcaacaattcgtcatgttaggctctgcacgtcttttatccacgacagtgacttcatgtcttgcaaggccttgatcttctcgggattcgacgtcaaatcacattttagagggttgagcttcattcgatattctcgcaagaagttgaagcatttctctagatctttgatgttgtcttcgaatcttttcgacttaaccaacatatcattaatgtagacttctacattgtttccaatttggttatggagcatatgattgactagtctgcatatgattgactagtctttgataagttgcacatgcattcttgagtctgaagggcattactttgtagcaataaagtccgatgtcagttcataaactagtatgctcttcatttagtgtgtgcatgatgatctagttgtaactgcactaatgaagttgttcttccataatctttcaacttcttccttaagagctttagaacgttctttatcaaggagcttgtgttactgttgtacatgcttgaagttcagtttgtctatgttctagaaactaatttatactatattttgtttttaaaaaaaaccatccttcttgtattcttaaacaatacatataataaaaataaaatatattttaaatattaagataaaaaaaaatattagaagaagattaaaaaaattatacatatttaaaaaagacaaaaaaattaaataattattaaaattaacaaactaatgtatttatttttctccttttaatattaagatttatttataattttataaaaagtgaaaataaaactaatagttagtcaactatacaaataagaataatgaaagtcaaaagaaccttgagtggcgtttatttgtaaatatgtgtaaagtcgctgtcggaggcccacgtgcccataaaggccctgtaattgtatgatatccaaaagtagcaaactattgtttgggttcatacttcataatttcacattattttatttgtcttttccttacatttaatttgatcacacgatgtacagtagttttctttttaatgataacttggtcccaacaatacttctattttgcatatattagaggcacaacaataaataaataatattattcacatattcttttacaattgtgtttaaatgaataatagaaaaagtaaaagtaagatacaaattgacatagaaattattatcatcataattaataaattaaatatattctttgaaaaaataattacaatactgtaattataaaagtatattaaaataacttattaatgctaaatgataatattaataaataaaagtacattaattatgtgacaaatttagtacatacaaattttggtataccattaaactacttatttgataattgatattatattattagatatgttagtattagtggcctctaatatattgctaccagatataaatgaatgataatgtataacattatacttagtaactattaagttttaatcttataataaaattttaataattaaataaattattaaatatttacctacatacccttactaatattatatttgatagtaatattggataccacatttggtttctaaatttgtcgtcaaaaaaaaaaaaaaaaaaannaaaaaaaaaaaaaacaaaatagaaaaaaa

SEQ ID NO: 87839 - DNA, 517 bp, Cannabis sativa
taatataattccacaataatactcaattaactagttagagttttgctaatccattttcttaattccagggtattacaattttctacttgacacgaattttgataaaaaaaaatatggacaacattaataagagcatcttcaatggttaaattttggaggatgtttgcttaagtgaaatgcttatttagaaaaatacaaggatgctataccattggagataaattggtgtaatcatagaaaattatgttgatgctactatatggcattgatgctatcttttctttaaaaaataaaaaattaaaggtaaataaatagtgtgacaataattataagatcataattataatatttttgaagggtgttatacactagagtatttttagaagtaagagtataaaaaataaagtctgtttatcgagttttttggcaactaaatatttttaaagcataagaaaagaacaacagaataaataacaagataacaaataagagatttttacgtggttcatgcgttaac

SEQ ID NO: 87840 - DNA, 1399 bp, Cannabis sativa
  modified_base (1141)..(1142): a, c, t, g, unknown or other
ttttccctaaagagtagaactaaattaaaaacacactaaaaattaacttaaaaataatactaaaatcaacctaacactaagtacagtttactatacactatactactagtgtgtgtgattttgattctgatcacatatgtggatatgcatgtagtaaacatgttgtgtataattcgattatgcataactggattgatatgtaataacatctttcattaacgtgtcgtttaccatgaaagagttattcatatcacaacgatgatcattagtagaccagtctgaatcctaagtatacatgaactcttgtttatgttcattgagttctttgattcactcattatagtttatcaaagaagatgattcttatagcttctattttgggagcttaataacatgagtagttgggaacattttatacaataatggagtccaagctttcctaacaaattgaatattagctcccttatagtgttaattctgggagtgctaacagttggatccaaatctataataagttatagattaattgttcacattgaattaatggtacataagcaatcaagagataattagaagggtaaactgataattttgaccaactctaatcatgaactaataattggagggtgaactgcttatattgattatattaatggactataagtaaaaattctataaatataattctatattgcaaatgagtgcaattcaatatttatagtggaatattgatgaaattaataaatcagattaatactaatcaagtatttattggagcttcaaaatataggtctatggtccccaagtcacctttatacaacattgtataagagaagattttatttgatgagtaaatttgagtgagaattaatttctaagagaaatacactcttaaggaaaaaaatagtaattcatagaaattattattttgaataattataacaattatgaattgtataattaaatagtatttaactatttagttctatttaataaaactatattaattagttaaacataatattattcttaaataatattaaagaaatatatcattttggtaaaaataatatttattttaatcattgtgaaataaaatattaacgagaattaatcaattattatttattggcaaaataannaataaatcttatttatggtaaaattgagaaattaattttgaaccttaaaatatggtccacacatgtaggatgacatataaaggcccacattaattttgtttgattattttattggttaaaataatttaaattaaattaattaattatcttttgattattgaattaaatatattattagataatctatttaattaaaaaagataatagtaaaataagaagatttaattgatttctgttaatgagatatatgatattta

SEQ ID NO: 87841 - DNA, 609 bp, Cannabis sativa
gtctataaggctaaaggatttgaggagaccttaggagagagtagggaagcattccgcactaagttttattattttctgtcagtatattctgcctttgttttgttttctgttctgagaaaaagagtatgttagcttaattcatatttgttttttccgttttgctgtatttctctaatttactttttgttaccacggtttcccccagaagtgaggctccctaataaattcgtgaggaggttagccatggacatatgaccttcttcccttttagaaggaaagaaactggttgcaaaacaccattaccactatgtctaatcaacatttctacatgttactcaaataacataaattgttctctagtccttccttgtaataattttgtatcgaacaaggtgaatttttgtctatactttttcatctctgcagaattcagtaagtgaaaactcatctcctttcccttccactcaaatttccttcccaaggttatgacctcctttcatggtctgattgcaatagacattgactttatcaaataaataaataaataaaattgtgttcatcacttgccacatgactgcttctacacattatgatattactcttccaaca

SEQ ID NO: 87842 - DNA, 690 bp, Cannabis sativa
tgaaaaataattgtgattatatgcgtcaaactatttagtctcatgatttatctttacattagatttacactgacatgataaccagtgatgtgatttatttacacttggttaggtgaaatgtcttttctgggacattaacaaagtaaacttgtaaggatgtatagggtttacatcggacgagatcgatattgatagtagaatagatatcttaagttactgttatatcttttctaagtcaatattgcttagttgatcttagatcaattgatgtcaatcctgagatggtttagctttaagctagttgtattattagagttctttgacttgttcattactggcttacccgtcggtataactcatacttacatcttgggaactcggtaacataactgagtgggagccttaatcatagatataaatatttatagcttctatgattatttagaagtaaaacgatagttttctttaagcttggctaaatgagttaaatggtgaaggactcattttagtaattaaattagtttactgaaatatcatttacaaagagctaagtgtttaaaagataaaatgcactgaggggtaaaaaagtaattttgtccataatcgatgtagaccatctatagaggatcattgattagtttgattgaaataatagatgatttataatatatctatattagatatataaag

SEQ ID NO: 87843 - DNA, 600 bp, Cannabis sativa
aaaaaaaaaaacttatttatcctactttataataattttccaataaattggccaatctaatatatgttcacaaaatcatttttatttaatataaaaaaaataatatttgaataattatttgaagaaaagaatgtgagtgtttttatgattaaatgatagaaggatattatggtaatttaaaaaacttaaagatatttttgtaatttaatattaaaaggtccaaataagcattctcacttttatataggttagagatatattcttaaaatgtatattgtcactacttttctattctaataaaaactaaacacaattttataaaaataataattgctaaagtttttatacgggtgatgagaatcatgtggttccatctcaaaatcaattggccgttatgggtggagtagcccatgttcttatatatgactcaatacttttatatttaatctatgtgcgacaatattctccaatatcccccctcaagatggatggttgctatttttgctcaccaatcttgaatcaccttgccatttgctcgcttatttttgttcggatctcaaccgtctttgcaccatttggatctcgtgcggctggctaacc

SEQ ID NO: 87844 - DNA, 1134 bp, Cannabis sativa
gacatttgcaaaaacacggtttttcagtattgtatatgttcttgctcaatcaataaagagaaatttgtggtgtttcagaactgtagtagagccatagatcacattgatctatcagacttgaactagtatatatcttggtgttagattttatagttttactactttaattctttctggttttccatgctctatttatccatctttttctccaattattgttcctgatctgtgaatcttgtcattactaattatttaattgtttaaagtttagttattttgattctactattttagtcgtcagttcaaaaccacaagttaaacatgacatggatttttctttctgctctatacatggaaaaattgtttttcttttacattgaatatcgtaacacaataattttacataattcctaagtggctgatatccatccatatacttgattaatttgaaaatcagttagaccataaatcacatggatttattatggataagagccattcatagtttttagaattatatatggccacctctttcatggcctaccaaccatgtgatgttgttttgtaatattaacacagcaacaaataacatccctctgtttggtagatcttgaaaattgataattatagcaataaattattatttacagatgaatttaattagtaatttctgtgtatgtaaagaacatctgtggattagctccatagtccgaaagtgactgaattgtcaagtaaagaaaaaaattattgcaagtaattgcagcattttaagtgtcagaagattaaaacatgttgagatgaataaatgggaattggacaaaaaattaataacaaaatcttgaaagaaatagaaaattaattttttttttttttatagtattcagtaatcatgtttcgtaacatcctcattctgggagccataattaactcctcaagaaaaagagaataaaaaatctaacatgaaaaaaaatgttctattctgtgttgacattgttcactttacaaaaatgttccaatgaatgtgcctagttttgttgagtttcatgaagcattcagattggagatgacatcgacaaacacatgttgtgtgcagggaattgttaggcctcccattggatgatcatatccatattc

SEQ ID NO: 87845 - DNA, 602 bp, Cannabis sativa
ttctagatatttttcacactgtttaatattttgcatcccggtgatctcttttatctcttcattgcaccccttatttgtattcggcgagaataccactccgcttttctctttgcttattgtctgtccagaccactcttcatatttacgaaaacaatggagaagtcttgtagcattactagccgaagcttgggaaaagaacatagcatcgtctacataaaataagtgagaaattggcattgcattcctagccacccgaattcctgtgatcccaccattcttttcctcctagaaaattagttttgacaaaacttcactgcataatatgaagataaagggcgatagtgggtcgccttgccgtagacctctcttaggattgaagggagcaagtggtgcgccatttaggaggatagaataactgacagtagttatacattgcataatcagcttgcagacgtggttgttgaatccattagcttttaggacctggcttatgaagccccactccatctgatcgtaagccttattcatctcagttttaatcgccataacccctttcttgcctttcttgtttttcaatgaatgaagaacttcttgagccatga

SEQ ID NO: 87846 - DNA, 690 bp, Cannabis sativa
aagtacttcagtctcttcttaatgcaaataaccctttttatttaaaaggtggctaaagtcaaataaattattattttgtggcgtttagccaaaaaaatatgatttagttgtgagacacaaagtggtgaaagaaaaaagagaggaaaaaatagtttggattggaagaaacatatcacgaggagggttaggggggagagggtcccagattgggatactgaaaatagtatcttacctaataatataaaaatgaagatgagatgagacccagaaagaaacatgtaggcctccaagctttaacaatatcaatatgaagaagtgggctgttttctttttacctctttactctattctcatgaatgatctcatctcatctgcaactgcaacaaaccgggtatgaaggggcacttgtacttttgctctttttggattttctttccactctacgctcattcccccaatcaaccactaaatcacttatttatatgagcttagccgggtatcaaataattaattagaaatgcaagtaaataatctatttttaactttagtgatagttaatatctttttttttaaataataaaataaatgttattttttacattttaatacttaaaatacccttcattatataaaatgtattataaaaatattttagagtaatatgaatataacatacaaatactatacctt

SEQ ID NO: 87847 - DNA, 1075 bp, Cannabis sativa
caacactttctacaaatgtctttctaaaattcttgcgaatcggcttaagcttgtgcttcactccattatcagcatcaatcaaagtgcttttctcaaaggtcgtcaaatcactgataatattcttcttgcaaatgaagtcattcatgccatccattctagaagatctgggaaggttggttgggccgctattaaactggatatggaaaaggcgttcgacagagtggaatgggattttctaactcatttgttcaatcatgttggtttcccaattcagttttcttccctgatcatgcgttgtctttcaactgttcaatttcgcctttccattaatggctctctcactgatccctttccttcaacgcgtggtatcaggcaaggggatcccctctctccatatctttttcttcttattgctgagggtctctctgctgcaattcggttacatgaaactcaggaccaattttcaggtattcggatttgcagaggagcaccccctttgtcccatctcctgtttgctgatgacagcatggttttttctcctgtccaccctcaagccagtaattccctcaatagtattctcgatctgtaccataaagctactggccaattggtgaaccgtgagaaatcctccattctcttctcccccaataccacttctctggcccaagatcttttccgtcaagacctccagctcatgggagaaggcttcattagcaagtatcttggtgctccccattgtgttggcagggtttcaacctcaatgtttcactacctgcttcaaaaggtttcctcaaaacttaattcctggaatgaaaaattcttctctaaagctggtaaagagattcttattaaagcggtagtccaagccattccctcttttgccatgtcaagcttcaaaatccccaaatccatttgttcaaaaatccaaagtttgattgctaaattctggtggggatctcagggcacaaaaaaagtgcactggaaaaactgggactctatttctgtttccaaattctttgggggtctaggttttcgaatcctttcttctcacaatcaagctctcttagctaagcag

SEQ ID NO: 87848 - DNA, 624 bp, Cannabis sativa
agtgcacaaactgaataaaaaattatgtaaaaaattctttacacacagcagcagtatatacaaaattcatggaccagaacacatcaacaaagaatagaaatggtctattaaacaaatccattaatacacgacaaaacatcatcaacacccacaataataaaaaaattaaaaaggaatacctttcttagctcttacaatctcctgtcccaaaccaaatgttccctgaaaaagggaaaagaaattacaatttggtataaagcaactcataaattaacaaagagaatccatagtagtgcctccttcacctgaaatgatttttcaatatattcaatccctacaattccatttcatttagcgcacacatatatatgagtcagcattagaatacttttttggggagattataagcacatgatgaattagctaccaagtaacatgcatctacaatattacatatgcccacaccacaccacacacacgaagatatatagctaatattattaaatagttagctagatatattttttttcctataataaaattattaagaatatgcccatgccttttgtcaatttctaagagataacaaaaattcagaacaaaaatatatatctaagagataaa

SEQ ID NO: 87849 - DNA, 770 bp, Cannabis sativa
gcaaactctttcataattttcaacttggaaagaacattcaagtaaccaaagaatgaatttatatataaacgattttcaatatatgatataattaaatcaacaagtctcacaggctgattttgtttggagaagtattatgtagggaaagagctcatttcaaaaggatatcgatggctagtcgagaatggaaataatttgagaatcttacaagattcttgcaatttttaatttctttgatatgctcaatatttcttaggatttgtatgtgattgatctaaagaaagagaaggggggatgaggaatttacaaagggagttttgaatgctgaggatgccaagctgattcttcttttactacctgtggataacaacaattttgtggggttcatatacagttgcaagtattagtttagttagttatttcggttgtaaacttagacaattaattcagttattttgtgtcagtttgcttgtactctcagcctatgcatataaaggcttttgttctgtaattgagtaagagacagagagagagagatcgagttgtgagctgagggattcactttgagttgtaaaagagcatgggtaattcaattcatgtctctcaagtgcctaagtttctggtgtaggagcaagactccatctagtgtgtttgctgtctattgttgttgattgactgagttacattcattataataaaggcaaagcctcaaggcagttcctcccaaggattagatccaagtgttaattcacttgtgattgaaccttgta

SEQ ID NO: 87850 - DNA, 557 bp, Cannabis sativa
aaaatattgaattcatattgtcatgatttaattaaaaaaaaaaaatagtcacaattgataatttttaaaataataaaatactatatatagtaaaaattctatttaataatactatatatttaagaataatttttaatttattacgaaaaattaagttctaattttgagttaattataaataaaaaaattaaattataattagttttatattttttaagttatgaattataagaaagtatatttaaataaaagatataagtttataaatttatttatgtaaaattaattagtaattttatatatctatcattccatgtttagaaaaaaaaaaaaaaaactcctcccccacttgactttgtatatatccatcattccatgtattaaccaacaacaaaaaaaaataattaaataggaacttatcataaattaatttattttgcacacttgcttgtagctcaatattgaatgttttaacaattcttttaattatttaattttcaataaatttattcatggcttaaaaagaaatattgaatgttttaacctaatagatatta

SEQ ID NO: 87851 - DNA, 616 bp, Cannabis sativa
aatacatataaaaagaggtatgtttcaaataaatataaaattaaaagtaaatttgattaattgatgaataaaagaggcatttttcaacttacctcgtatgagttttcaaaaatataatttttttcgaaaaagttattttatgggaaaatttaaaaaaaaaagttaaaaaatataaagaaaacagtataagataactggttatccttcttatggttacgggttaccgtacatggttaccttacttagtttcttaatatttttcaattttttcttcaatttttctcataaaataatttttttggaaaaaaaaaatccatatttttgcacagattttataaaaaccagtagaatttgtaatttcatgttttttttccttacattttatggattatgttttactattttatagaattttttttaatttaaatttatgcagagacttgtgaaagcaacatgaaaaaaaaaataaggtgtaaatgatatagcacaaatataaagtgccatgcaaataacatagtataatgttattatacgtaaaatgtaggagaattacatcatatactaattttttaacttttttttaaaaaaaaacttacggtttgggtttttaaagtgg

SEQ ID NO: 87852 - DNA, 657 bp, Cannabis sativa
tgtttatttcattgttttaaaattaatattaggatgttaatgaaacatacttgctagtaaatctagatcctggtaaaatatttccaacaacttaggcacagagagccgccttcagaataaaacaacttaagaagattgtttgcattgcgagatgaataagcatagttagcataaccgtttacagataaaaacaaagagtagttatgcaattattttattattatcccatgtgatgtaaatatgaaacgtgggactaatatccacgtttcatgaatggttacaaggataagatcccaagagaataactatcaccttaagactcctataaatggggacaaaatctaaggaataaaggacgaccaatttgagggaaaaaatagaatcatataaatattttcttatattctgtatatgatttataaaaaatcccagaataagatggactcatagagtatgaagaattaacttcaaaatcacgttaacaatcttcttattatttattatagttatttatttaattctagagtttatttattactaaggctcatttattggttaacaaaaatctacgttaatagtttgacgctttcattgagaggcttttaagaaaaaactcagaaaaatgccctctctgaaatatatttgaaccttccatcc

SEQ ID NO: 87853 - DNA, 544 bp, Cannabis sativa
ggagcaattttttcctacaaagtttttccaccaaaagtggacgtcaataggttgttgtggagatgacctataataagcaataactatacatcatctatagttgtatctattacaatgattttttttttttttttggtttaatctctaaaataggatttggtctcttggatttcatctctaaaatgggattttaatcacacccaattgaagaagtggattaggtgttatgattgattaatttctactatgatagtttgattttctttaaattggtgatgtagtttgtgttctgatgctattattataacaagagggggatgataacacttgctgtttcacaacattttattattgttcttcaattttttttttcaaatgtacatactaaaatgatttattttaaagaaaattaaagaaagggaaaagaaaacagtgttatacagttggacagtgaaattggttaggatttagttagttaaattctattatgttagttgcttcgaatacacctatactactcgtctatatataaaaatcactttgc

SEQ ID NO: 87854 - DNA, 587 bp, Cannabis sativa
ttaaagggatgttcagaacttccccaaagccttaaatcttatttttctaccttctactacaacaaacatgcaatcattaaataagaaaaacaaaactcaaacactatttagaatttcaaaaacttaaagattacttacttgatgaagatgaagaactgaggaaaggtggaggatttgaagtgggaatttgaatgtcgtgcttcagtcttaaataaaatcccactgaggaagattggtcgaggtgcacaacggtggtttgaagggagcgagctttattaatgagcgattcaatctccgcctgaagatcatgtggtcttgatggtgtcgaagaaccaatggttaggactaggatggcgctcctaggtattcacgtgcacgaatatgaaaaagaagatgaagacactcgtcgaagtaatggttcattcactagagaaataatttttacttttttctctaaatatttgaatgcgaaattcaaaataggtaaaaacggtgaataaatgatttttgcaatatttatagtaatgaattggcaatctgcgtgcccttaaatcaatggctccgattgtatccaaaaaaatacaaaa

SEQ ID NO: 87855 - DNA, 8832 bp, Cannabis sativa
taatgatgattatatgtcaaaactaatataattctctttacaattacaatccattataaaagtaaaataatactttaataaaaaatatagtaaaaaaatcaaaggtctagattatcctttcttttaaatattttataattataaaataaaaataataaaattattttagtccatacatattttattctattacatttttatattaaatcaaatacaataattcaaattaaaatgttcattctaattacaaactaaatatagtaataaattgctattattattcttatttcattacattaccattaccatttcattacaccaaataaaacaccacctaaaagttatttcactctcaatctattacacaacaaacaaaaaaggaaagaacatttgcataaaataagtttaccaaagctcaaaaccaaaccaaccaacatgtgtaggtagataagtgaaggaacaatatttaacatggagaataatttgagagcacgatttgaatcagtgcaaaaatgatattctttacaaaatgctattgaatcttacacttgaccttttttttttttgaaagaaaagcagttaatctagtgggatgctatcatgaccccaacttaatcaggtggtttatatgtaacaatttcattaacggtccaaagaaatgaaggccgttgtaatacgattgaactattatgattgtagaaatgtgatacttgtaaacctctttaatttctttttcaattattttcaagaatatcattgtaaatttagactaatatttcactccacgaattggtgagagcaagtagacacaaaagttaccctcccatatccaatttcagattacactctcgttatccaggccgagaagacaaagaaagaaacaaaatgaataacaaaactaagtcaatggctctcctcttaagtctcctcgtctaccgaactcctaacagaattccaactcactcatttcagaccacaccaccaccaccgccctctaacccttcccgctactctacactccatataggtacactactcacctattctcttggaagcttctccgagtaagacgtctcactattcaacatgctaacctccaccagcagcaacttctgatgaggccgtttcggtcaaagggacttggcctgtttcatcagaagccagatctcctgctgcatcaccattgtgtgactgctctagacattgatcaggaaaaacttcagactgcaaggatggagcaatgttatttacatgtagccatgtcagctcccacaaactgtccccacctaaagcacttctctgcacaagcactccgcttgtcttcataacaatcaaggtgtccttaagcagctcgggtactagttcctgaagcttctcacttttcttacctctaactttcacctttatatatttctccattcggctgagaacacccaaccataatttgcaaaaggttgtcaattgagatagatcaggaagcaaccgaagaaacaccttcggcaagagcttcattgcaagtataagtgttccttccatgtttcgatagtctttttgagagtgaccttgggcgatttcaagcaagtcatcaagcatggtgaagaccaccatatcaaaacactgtagccagagagtgtgaggaagatgtaccccgtccactccaattaagcacttttgcaacgacaacaaagcatggtttctaacctcttctctctgatccaaacaaacttttcttaatccctgtatgagacgcagccacatctccccaatatcctgagacatcctcacagcatcctcctctgccattgattccttagcttcagaggcccatctagttaagcaatcaacagagcctgccattaaatccagagcacgaacagaacgctctgcctgtccaacacgagactcagcaaactgccttgatgcatctacacagagaacataattagctggtaacaagtgggctccatcagacataatgaataataatgcatcaaacccagcctcggaggcttctggatgcctagcagtgatagaaagtagagatgtaatggtgcgccaccctaattgtgatctgatatgagaagcatttgcttttactaggcgactaacttcttgtgtaatttgctcgcagtaagcatctgcaacccgagcatcgagtttcaacacaagttgcaatgatcgcaaaagttcatcagcaaggttctccttgtaaggaagaagacgctgacaaattcgaaggaggccaaaaacagccttctccaccagagcacatggcatgacagttgactgaacaatattggatatgtgatcatagacaccctgccaaagaagcacgatcctatccctgttattcagggtaattgctattaacaactccagacagaaaactgcagtatcctcatcctcaggagagctgttccctttcggaggtctcccagcagcccagattagtgctcgtgcaagctgcaatagagattcagcttgcagaaacttactctcagtaaatatgctgtcaatgtggcacttttgaatagtctgtagagtgcgctgatgagctgcaagctgctgctcagtaggttgcgaccttggctcctctgtatcaagggacaagagttgactaaatcgtcccatcaatccagatgatcttctaggagtacccatgggaggcatatgagcagaagatagggaattcgtgagaggtttgccatgtccagagtcagcagtgagctccgactcatcagctgcatcactggccacacgagctgggagaagacccagtttgtgtaaccttaagatgcaatccaagatatttctccaacctgtgcgaatgtaatcaccataactgttggcaatggtgaaaactgtcacagttgccattctggcttttgtgtcatcaccaaatgccagtacaggctcttcaacagatgatgggttcagcagtgttgtgaacttacagagagacacaacaagatcatcaagtacatcttcaagatgatggcatgctgatatctttgcaacagctaggaatccattaatacatgtttgataaacctcctcatgttctgcatgatcaaaaaccacagaaattgcagcaatcgttggccctgacattatagcgaacatatcatggtctaggtaggctctggaatccgacactataaatggagcagttttctttgatttgtgcattaggtcaatccatcgacttggagtcatttcaggaaaaccagcaccttgttctggggttgtgcgaatctcattcttgattattgagtggtagagttctattaggaagtctcgagggaggtcatttcctccatttatatgccgattatttcgaataaaatcctcttctgtcatttttttcttcacttgtacattgtgctgatctgtattaagcattatcagtgaatatgataacaagagagcagcatccttgttagctagaatcagtggcgattgctcataatatctctctgagaatgcctccaggactctctgtatcttttgtgactctccaggcagtctgaatgtttctaaaaatagtcgcaatgcagtatccaaattcatgtcttggaaatcaaaagtccaagcaaattcatggagaacctgaacacagaaatcatcatgattccccagaaaatccccaactagattcttatccaatccagcagtatatctgaaaaagcatgccacactttgaggatcaagtttgtctggcaagagatgtgttccttggaggaattctaaccctttctttggatcccgattaaagtgatcagctccaatcatcaaccttcttttgatatatttcctccgacgaacaaatggaacccagtgactaggatcactatagttatcacacttcaccatccagaatggggtatactcttcaaaattaactggggtgtactctgatccaactgatccattgctaaccctctcagccataccctgaataacagcaataagaccatccaaagccagaatgtgcattgatgacaagggacagttaacagggaaagcacttttcgacaagagattagcaagatcttcaaagatattactgcaggttatatcacaatctaagttagcatacatttccaccataaatgttttctgtcgacagaagtcgacaagagcctccatcgcaacctcctgctgctggtaagatgctccatatctgctttgtgcaagcctcaaaataacacaagaaaaaaaggcctccagctgtaatttgaggtcagtacgcagatgatgatacagattaagaacaatgctgcataccatagaaagaataagtgggcttgttgacaggccaaactgcattagattacgaaacaattcatcctgaatcaaacccaacaatctagggtggtgacgaatagaggggccacccaactctatagcagaattaatcaaacctaaggcaaatagaggcacatcttcatcaaacgctaaagtatttgatcttggacccattccaacattctcaacaacattcagcaacgaacataagaaaatgaatatttctaccatgcaaggtactccatatgtcggacttaagtcatagggtaaagagtcttttccattgccagccccaagtgtatcatcaatcattccaactgctgctgcaccaacagaagtattggaagcaagattcatagataatgcttgaccatcgtattcagatgccatgtttccattctccaattgtctgcttccaaaagcatattcattgttcaacccagagctctgcagataaaacaataactccatgtgtttattattaacgtacaaaataaacaatcaactattactaaaacctggctactctaaatactgaagagatttatacttcttttcatattctttgtgttttttgctttactttttccaataaattgacaaacaaaagaaatattcaaaagaccccaccccaccccacccaaataaataaaacaaatcaccaaacatctgtacctcattcatattactgattccatttaccaaagcactttctgagttgccaacatcaggcaggtgagagaagatacacctaacaagttcatgcatggtgtgccgagctatacgttgtaataactcacctttcgatcctgcttggtgcactatacggaaacaagtattcactatagtgcaaacatgttgattactcaacataacagatgctttactcttcatacaacccaaaagaacttgcaatatcttcattagaactacctcttctgaggcagggtcagtcacctcaaatcgacaactagtgacagcatcaactagcaagttcattgcatcttcaacatgttcagtgtcttgatcaatgatatcaagtgttaagatcttgtaaacagaagacaaagcaacaccagtgatgggagcgccagtttcatctgatcgaatcacatccagaaatggttgaagatacactgatgggttaatggcacgccagttattctgccatgtaaaaatctgcttacgtaatgccttcaaagactgaattagggagtgctctagctgatcatccccggacatataccgcccactccaccgtacatttctcctcattactgctaacacagctcctacttctgaattaatcatgcatgctaaagtagttttaatagaatagccatcacattcctcaggttcttcttcaattgccttgattcctgactgcatctttagtcgccccatcttggaacaagattcttaagatagaacccaaattctatctgtagctagtagctacagacttaaaactgaagcctatgcagagacagtgtagaaacataagcaaatcattccttcacaatctacagagatgacaaggcaagccaaattaacaggaagttagcatattaaaatgttaatggagtaagaaatgtaactcaaagaaggttccatcatatcttattgtatcacaactaaacaggactctaaaaagccaccaaatatttagtaagaataaagtaccatatattccatgtagtacttattaataaatagcaaatacacgtatgatccgcaaagacctacacagctgggatcgcccaaccacttgagataaactcaaagtctcaatcaattgcttcatacaatcggttgtggccaacttattagcatcaattagtctagtgaactttaactggccattatacatttcatctattaaatggcacatctcgacaaacttgaacagcccagaatgcagagaaatctaatttaaaaccaagtctgtgcatgaccagaacaagattaaattagcaccaaatatgaactccacagctccactaacagaattccattttttttaaaaaaaaaaaaattgcctactgtaacgctaccatttctgagaatcaacgccaataattacaaacaaagtctcccgacatggaattcacaaggaaagttgaaatacagaattgatcacaacagataaacacaagtagatgtaaatacaagatccggcccagctaagtaaacccaattcaataacaagtgaaaaaggatcgtagtcaacgagctagctaagaatataaaagcagcacaacgacagatcactgcgcgcagatcttcctatttcatgatcctaagtcctaaaaaagaaaatgcaagaaaacgagaaattctaaaacccaaacagcggcatctgaagctttaagacttaatccctcaaaaaaaaatgcaattacagagagaaatgtgtagagaacctgagattgggagaagccgggaaaccctaaacctctggagaagaggaagcaggaaaaggagaagaaaaagagagtcgagtaaagcagcccggggtgggtctggtaggagtagcagccgaaaccagtcagtcaccaaatctcacctcagctcagctctggtgagattttccttagccgtaattactgcttgctaattatataaaatacatatatcttgttttttcagccgtaattttccttttcaggttgtcgtgtcttatggagctattttatttaaattaattaagtattattttaattattttttatccattaaagtgttaaaattattttacgtcctgcatatttactattttcatgtacgtatttatatcttttgcatttaacttttcatgttcttgtactggaaattaacattgtaattttgtctgattgaagaaaaaagaaaattacatagggtttttccatttttattttttaagtatcatcaagttacacacttttccggtttccaataaagactcatcttttttgtgaacactcgcttccctatattttgagctcatcaaaggcgagagagcttttttttttcttttcttttttagtattatatatattttttttatcataataactaattttattgctaagagtagtcaaacaatacattagtctacaaagaggaatttcttccaaccaaagaaacctcgtttttcatatgcatatcttgctaacccatgtgctacagtattaccatttcgcatcacatgaagaagacatacactcagaaagataaataacaaggacctaatagatctaacaatacaacctcattggaaaacacattctaaagaagagttgactgaattgataatgatttcagcatcactctccacaaaaaaaacgaaaaagtctaattccaaacaccattttaaagcataagaaatagccaatgcttcagcttctttaagggagaaaaaaccaatcaaagatttagcaaaacatcttaatggaaagccatttgaatcacgaaccaaggcccctaaaccaatagtaccattttcaccactatatcagcatccacatttaactttaacgaaccagctggaggtgctacccaatgaataactcatgaggggagagaaaacttagtcgtatacttatgtgatttctgagcctaaaaccaactatcataatattgaagtgcccaactcaaaattattggagcattcctaattggggtaccatgtttttccttgttacgttcagtccaaatgcaccaagccagagtaatgaagacacaaaactgatgtggggaaaatactgacatgagataattaagaaggtcgatgatcttccaagagagactatgcttgacgaaaatccaaaaatctgaaagcttccaaacttgaattgagagagggcaaaagaaaatagcatgtatgacatcatcaaactgccagccacaaaagaagcagcttcgagaaaccgaaacatgatgagctaaaagcgttgagccagtagaaagaatatcatgacacacacgccaagcgaagaccttaatttttctagaaatttttagagaccacaaagcacgccaccactttgctaaaggaagtaacgaagaagaatttgaatcgggtatagagttcattgctagggaatatccactcttgactgtgtagactccactttctgcataatgccacgtaacctgtatacagaaataatattaatatgtaaagaatgaaatgatatatcataataaaaaataaacttatctaataaaatagttatagacaaaactcatgattagaaattatagatagttggagtactgttggaacattcaacttaaattatctattaagtttttaaggaaaatattattacagataaaaaagtacataaaattgtttagaaatagataatgaaatactagagagattttagattttatacatataattagagataatatgatatgcagtagaatgcattgttagactatatatatagtgtatgtaatatagcatatacaatgatatgaaatgcggaaaataaactttaatcatatcaataatatatgcaatgaaaggat

SEQ ID NO: 87856 - DNA, 798 bp, Cannabis sativa
gcataaaacctaacactccctacttcttgaatcgtttaggaaatggtggaggtggcttttgcaaaggcttttctacaacagaatgctgatcggatgctataactacaggggaattttagcagctaaacttgctagtcttttcttcgtttccccctctttttagattgaagagggctccttattgccctttgtttctgccacatttgactccaaaatttttccacttctcaaggttaccattttgcaatgctcattgccatctcttcttgggtttttagtgtcactaggcaaagtgccttgttgtctattcgtcaaatcattagccaactgccccaattgaatttcaagattctgaagagaagctgcctggctctgaattacaacatcattcttggccatatagtctctcattaatctcttcagggaactcatttgagatctttgaggttggtgtggttgttgaggtcttggttgttgagaaaatccctatggaaatgattgttttccttgtgcttgtgctccacttgaacttgctccttgatctccccatgacaaattcggatgatgcttccaagctggattgtaggagtttgagtatggattgttgttgcggttaaaattctggttacccacatagcaaactgaagctggatttgataggcaattttcaaaagtgtgtccatcaccacaataaatacaagagaattctgccttttgaatggcagcagctggtattacaattcctcccatattcatgttcttcaaaatattggtcattgaggccatttgagcggttag

SEQ ID NO: 87857 - DNA, 633 bp, Cannabis sativa
gcataacctgggactcgaacccaaaacctccaacacacacgcactcttctatggccacttgagctagcctcaagtggtttattataaatccttcaatattatagaacagattattgctattatacattacttatctaattagtactaattataaaagagagcatattgctattaaatattagtagtgtctagtattatctaatagtactatctaaaaataggatcttacaattagttagcgatattctataaaatttattacattaaattatataaaattcgatactaaattatgtgatatatttgagagtgttaaacaagactgatatttttaagcatttctcaataaaaaaaatacactaaacactttttggcagcatagactaaacacactttgaaactaatataatttgggtccaaaagtagataggcccaaacattagttaatctcatttggaaaaagtcattttaaacaaaaaaaaaaaaaaaatgaaagagaacatggagcaaagtgattgaaggaggatatgagctattggaaatcaaggtgaattattggtaatttcccttacatgaagcttaatgatatttttctaacaataatattacaaaatgataattttccaaacttaa

SEQ ID NO: 87858 - DNA, 637 bp, Cannabis sativa
gtataaaaagagaataaagagttaccccaaaaaaaggagaaaataaagtaaataaattcttttcttgttgaaataataaatccatcttctagactattctttgtgaatttgtagaaatattaaaaatgaacgaaagatgctttaatattagtttcaagcaaattaaaaaggtgtttggtaacattttatttttaaaatttttaatcataaaataaagtgaaatttgtgtttttaaaataataaatccatcttcaagactattctttgtgaatttgtagaaatattaagtttgatatgtttttttttggattgagtacttatttcttttactaagagttgaagtcggttatttgtattttatatatcttttaggtataaaaaagagaataaagagttagcccctccaaaaaaaaaaaaggagaaaataaagtaaataaattcttttcttgttgaaataataaatctatcttctagactattctttgtgaatttgtagaaataacataacttaaaactaacaaaagatgctttagagtgtggttggaagtaacagtgtaattactaggtaagataattattatggtagtaattacatagtttagtaattacactatattttaaaatgcaagatgtattt

SEQ ID NO: 87859 - DNA, 3498 bp, Cannabis sativa
gtttttggctaatttgttactctattatgtttctcttatcattagctacctaataaatagtttaggtttgtaaagacaaaaagtatttattcactaatatatttgaagttaatagtcgacacaaatgtcttcaagaacaagaaagtgaaagaaacctaaacctaaactacccttataataattgtttctttttaagagattttaatgatatgggttggtataaatgaacaatgaattgaccacttttaaatacaattttcaagaattggcagttgggatttagtagaaaatgtcaactagcttttatgtttgaaaatttttgaggtttgactgtactttaaagtgagtaggtttttctaaattgggtaaagaatccaaagataacaaattaacaattgcattcattcaagattgattttgacttacaattatgaatatgcttcttctaaacatacatatagattcaacaaatgaaagcatattactgaaaataattataaaatgatacatcataaataaaggactagatgtgtatggaagggtaaagctctacagtcattccctgctttgctttggctttcattttctgttgccaaactattttctcagtattcatctaagtaagtgtataatgtctcgtctttcttcgacttgcgccggctaagcaatgccttgagaaggcgtttacttttgctgggatttagttcaacatctttgccattttccttatcagcatgtaatcgcattgaagcagatttacgaggctccgaagggtactaaaacaataaacaccaagtcagaaaatgagagtagaaaacattcaataatttctgaactgtgactatccaatcttacccgtcttcttgcattcgaagaattcggtgtagttggccggcttgagttgggagtaattggtcggcttgaatttggtgtcacagacctactagtagaaagagatccagaacgtagaagtggaaaccggtgaggagaaaccgttcgcttatctgattaacaagcaaagatcagtttcggattattaatggagtaggtttagatgataaagagaacaagagaatattgattcaaacaagaacacaaacctaaatctttcttaggcatggtagaagtaaaagaaaaaactgctggtttttgagaagtttgtagtgcaggagacggggagcgccctttactgcgttgaaacaagacagtgtatcatcacaacaatgctcatcatagtgaagtaaatttaaacaagttgagtgatcagtttaatcgaaattcagttttacctggctgtgcttgttggtgtttctcgaattgtagctcgaacagcttcataaacacaatcagattacaaaaaaaccgagcaacattaacttcaaccccccaacttacacgaaatgaaacaaaaatagagatagaaaacgcactaccgtttctaaattgatgccaatcatcttcatcgtctaggctgcatccttggtattttgatttggcgtgattggcaccgtgcatggtctcaccaactgaaaaaccgacaagaaatattaccaaaatggtgttcgaatagtactattaacgaacagaaaagagctagagttcagtaattgcctggcaaaatgtaccgtttgtggtactttggagtgtttatcaccagggattgttgagtaacaccctcatgatcgatatactcttggcatgttcgtagcctctaaaacacgacacaaaaatacaaactcacaatttttgtttaggaagatttgcatactaattagacaaatgctgcaaagttttcacaattagctatagagaattgatcagaactcacttgttcaatgcaggatactcgaagttctgttccagaaacttcatccaccttttcatcaaacagatcattaaccttataactcactgaacccaaatgatccactgtatttactagtgctttaatggcataatcttttaaagtttctaccactctgcacaaaatagagccaataatttcttttactatctctaactacttaaataacaaccacagaataaggaaaaaaaaactattgaaaacaaaagcagtaccatgaacaaaattactcacatctgtttttggtcatcatttgaataagaaagttcaaaatactcagcagctgagtataactgtgatctcaaattcttcaaatcctgaaaataacaaaaaaacgacattaaagaatcaaactttaggctaaagggaatgcctaaacttccatgaaaacttgattgttcaaattcagaggaattttacctgaagactgtctgaaaatagcaagctttggtgcatagaaacctcatcgaaattcgatgcttctctaggaatgggcagagtagatgttgccatggtgcccatgattactactaagagaataatttatcctaagaaagtaaagctggtcaacttaatactcatcaaagaacaagatgagatgaatcaaagcaaaggtgggaaaatggcataaccaagcattaacctcaaaatttaaaagcctgttttccctaattgaaactcaaatccagaaactaatgagactatatttataaatatgttagaaacataaactgaacataacaggcaccatgcttgtctgcgtggtttgagtaaccacaaaaagctaataaataaaataccaaaaaccgctattttgggagctttcaacactattttatgaaagattatataagaaataagcaacataaaacaggtagtgctggccacgtttctgcaaccatctcagaaggaaatcaacatatcaattattaaaagaagaaaaaaaataaattaaatatataaataaaaacaatgttattccatacttctgtaaccactgcataaaaagagtattttgtctgagtcttcactaatacactggaaattgtataaaaattgaatgaaacccacataaagtaaataacaactaatccttaaaaaacaccaaaagctataaaatttcaatcttccttttggatttgcctagataaaacacaggtgggaattttcttttcttccctaaaagacaattcaggtgaatgaaaaagccattcttatgtcctatatgcttgttagttttctcaaaaggaaaaaagctaaagctctcacttcacttcaactaaacaaagcaaaaaaattagtgacattgcctcagttgggaatcccattctttttggtcaataccatttttctcaggaaccaaacagagttaacaaaaatcccaactgggtataaacaaaaagatgcaaaattttccaaacctggtaacttctttcccaaattctcgttaagcaaccgaaaagaaagcctgaaacgccataacccacatcacaattcgagtttctgagcataaaatttaaaacccaaatggctgaaagagaagccactcctttgataatgaccaatatagttgtttggtatgagattttgactgaacaatgagaacccaaaaagccaaaaacaaaaacaacaac

SEQ ID NO: 87860 - DNA, 672 bp, Cannabis sativa
ggccagtgaaaacggacttgtaatggtgttttgtaaagtgtaatttctgtgctaaatttattagcaatcccatttaggggattagggtttcttaagtatctttggttgcgtgcctaatagttagggcgttacagtcagccttggtaatacccatctccatagattgaggccagcctttgtaggtggaggccaaccattgtaggtagaggtcagcctttgtaggtggaggctagcctttgtaggtggagccagcctttgtataccttttccttgtacaggtcagggttccctggtgaacgaaccctcccttggtttgaaagtcacctttaagccagccagctcaaaccctggacagccatacaagcttatcttagctgacttatagactacccttaatcagccatacatggtagtacagctccttgatgggtcacttaactccttttgcttgctgcttgattgttttcccataccttataaggagattttgtcttgctattggcaaggcttcattccacatgcactctatcttagcttacgtggacatgccactttaggtggacaaaatttgggataacatttgtccctcaagtcaccgttcgaacatctaattagatagggacttcctcattattgtcttccttgtagtagcttctatcgagcagcgttgtc

SEQ ID NO: 87861 - DNA, 1030 bp, Cannabis sativa
atcatttaggctaaataatgtagtctctctcattttaattatgcatagtacttttaaatttatcttctcattcaactcaagttagctagttaggagttattaataataaatgggattattgcggcaaaagtccccaaaaacttgaggttcatgccgattagtcttcaacctcaaaaattggcggtgaaaatactcaaggttgacaaagttgtttgtccgttcatactcagtccgttagtatgactaacgtgacacgtggacgcaccagatttaatcccctttttctttttaattttcccctaaaatataaaagtaataagttaaaaaaaattaataaataaaaaactttaatattttttttatttcttttttctttttcatttattttctctttgactcagtcttcttcatcatccttgagcaggcacaaacccaaaatttgttcaaccaacaaatttttttttttgcaagctctatttcatatcttttttctttcttgccttccaccaccactaaaggttggcttgccggactttgaaaacgcccaagtcgaagccatggcgggtgagacttagctacacacaaggcccaaacatcacggggagagagaagcggtagatttgttcagatcttatcgacggcgagcggaggtagtccactttttttggtcagatctcgtcgacagagagtgccatggatgacgaaagtgatgagctctttgtaaccaacataaaccactctctaaagcccactcccacaccatcgtcgacgtccaccgcaccaagaagagggatgaagaaattggggctgggtagtgagtaccaaatcgtttaatttcaggtttggtttttttttttattttatgggttatgttttgaaaaaaaaaatattagatcttcaatcttctcttttcgattaattagaaagtgggatgttgatttcttgtataaggaatcccaaggtttctgtatctagtagctctgaaggaattatcattaatagagtagattttgctatgtcattcttgtgt

SEQ ID NO: 87862 - DNA, 692 bp, Cannabis sativa
  modified_base (389)..(390): a, c, t, g, unknown or other
  modified_base (664)..(667): a, c, t, g, unknown or other
cgtagtcggtttatggatttgggacccagcccacacggacctgaacccccacccggacctgaacccagtgccaaacccaaaagttgacccgaacccgtaccctgcgaccctatattggaacaaaaaccgaaagtggactggtactggaactaggacatggacttggaatcataattgaaattggaccttgatccacaaccgtcacaggaccaggacccagactccaaatctgacctagacccaaattgggagtcgaaactggatccccacccagacattcactcgggacccaaacccgaacctgaactcagaccctaacatggaaccagactaggggcacagaactagggtcgggacctagaaccgcaccccagtctcgatcgcgaacnnaaactctgaaatgggacctgggacatgaaccagaaccataccgagaccgggaagtgatccagatcttgatttaggattcgggtaacaggccctggaacagactagtagtcggtgtctagatatggcactcaaactaggacacgaacccagacgaacaacaaaactagaaccctgacctagacatgggacccaaaattagaaccagaagaagaatcaccgagctaggaccctagaaaaagactaggaccgtgactaggacccggaccaagacctnnnnccgaacacagacctagcctcagacc

SEQ ID NO: 87863 - DNA, 790 bp, Cannabis sativa
gaattcctcgtgcttataatggagctgcccatgacttagcagcccaagctgctagcctgctgcaaattccttttttaagtcctttactactggggaagtggcaccttttgttgccactacaaactttggcttctaagcttttttgtctttcaataaaaggttggttttaattaagaaaaaaaaaaaagaagaagaagctaattccacttgagaaattggtaacaataaattgatagttttagtgtaaggatgaataagtggttaaaaaaaaaaagctctttagtctttaataccgaagcttataaagaatcaccgtattattagtcacatttatcttttggttgttatatttacactcaaaatatgaagcatcaatattttttattatattaaaagttaaaacatatatttaaatcttaaattttatttacaccctaattttaataattaaaattgacattctcattattaatttgtcgaaaattacattaattattacaacacaacaaaaagaatgaagaaaaaaaaatcgtacaacataaaaaaataaatttattattattttaaattactttttattttcatatatgtatttatatttgaaactatatttggcatttgtaactttataatccaattagttttaaatcaacaaaatcgaacttacaattttgttttatttttattgtttgtaaaatagtgtacaaatcaaactattttatagaaagtacatgaaatgaatataaataagaatattttgtaattttatgatctatagatgtattgagtg

SEQ ID NO: 87864 - DNA, 659 bp, Cannabis sativa
tcatattaatatataatatgtcacatttaattattttaatttatattatattataataaataatataacaaattctattcttaatatcgtaagaatttatcggcgcctaagcaacatatagtataactataaccacatatacataaaaaaaaaaaaaaaaaactatggtgtaggtaattagagcagaactaatctattctccaatttttttttcattatttataacacattctctaatcatttttattttttttgatgacaataaacaaagtaaaagtattaatgaattagattggttcagcaaacaaaaaaaaagagattatttgaatttcacagaatatgaaaagaaaaacaaaacgttgactttgacttgcacatatatttattaatttggttatcaaattttaataaaaacaattgtctttttcaaaaagtcaattaaataaataaataaattgatgattgcttacaattacaatgtacaacatacaaaagaagtaattgtacagataataaaattaatcatgcgattaggttaagcattagagactcttctagtgggttcctagttagaagagaaaaataccacaaaccatgatgaaaagataatatagacaaatatcgaaattataatgcttgagaatagtggtcccatgatc

SEQ ID NO: 87865 - DNA, 667 bp, Cannabis sativa
acccctgctgaagagctgttgccttgctctgctgagttggcttcgcagttcattgccatgttttcgaaggcctttgttactggatctaaagaggtcgaacttgggaagagataaaacgttcaacttcaggaggacatcaagaagctgaaacaagatgcgacttccaaggataaagagcttgaggaactttgcaaggccaaggagcaggttgagctcgaagccaagggtgcttagacgaaggtcgaagagatgtctcgcgacttggaggtcgagaaggagaatgggaagaagcagtatgaccaggcggtctcagactacatttacaccaccctccccaaaattctggatttttacttctcaatcctcagagcagaagccgctgaaatggctgaggctttccgcgccatgtcgcctacgcagacccaaggcggtggagggaatttgtttcccgaggaggctgaggctgcggatgtcgagggagtcgagaatgaagccgtcagcaaagtcgcggatggatctacccctgctgctcccaatgcttgacttttcctttaatatttacttgtgttaaactctatctttttttttatctatgcggtacgggggtactcgcactttgtacttgaacaaatttatatttatgtttcttttgaacgactttatatcc

SEQ ID NO: 87866 - DNA, 653 bp, Cannabis sativa
  modified_base (41)..(42): a, c, t, g, unknown or other
tttgtagcagagtattaccaagatctgagcccgattctccnncttgttgattggattcttcatagtcttacacattatagaaagcctttgcgaatgttgtacggaggaaggaataggcatggccggaataaggaatgtgagtatcacggagaaaaaggccataccactaatgagtgtgattatctgaaagattagattgagactttggtcagagcaagacacctaagacaatgggtccagattctaatcatctatctcagacagggggtcgtccacgggcatatgatcattctgggacagtaaaatgccttaaatccactgcatggggtaggtcgttctcaagctcttggatcattgctgcctgcactccctgctccaccagcgcaagttgggtagtgttacttgctccaagacttggaaccccattcctcatggacttgctttgcctctagtggatggacatgtggccacaatctcaggtggaccgcattttgcaagaagtacgaagaacttgcaaaaaagatacttaagagaagtggaacaaggggaaatgtgcacattggtgcaatctccaacacaacgtcccaagataataaatttgcccatccccttcgcggaggataaagctagaaatgtgtgtttcccccacaatg

SEQ ID NO: 87867 - DNA, 854 bp, Cannabis sativa
gtgatgttattgcttgcaataataacatcatcaacataaaccaatagtataatgatgctagaggaagagtgtctcataaacatgtaatgatcggttgtagagtgtgagaacccttcttctagcaatgcagcagaaaacttttcgaaccactgcctggatgcttgtttcaatccatacagtgatttcttaagtttgcacactacatttggtggcaatggtgtctcccacttatgactataccctggaggtagagtcatatagacatcctcatgcaaatctccatggagaaaagcattgttcacatcaagttaatgtagaaaccaaccttaaatagcaacaatggccaagattagctttacagtgacaagctttgcaacaggtgcaaaggtttcaaagtaatctatgccttcttgttggctatatcctttggcaacaagcctagctttatgcctctcaatagaaccatcagcattcaattttatcttgtaaacccacttacaaacaataacatgttgatctgggggaagaggaaccacaatccatgttctcattcttctccaaagcttctacttcagagtccatggcattgtcccaaactgggattcctttagcttgttgaaagcaaacaggttcttgcatggtggaaataccaagcaccaaagctttgaatttaggaaagagcttggagtagtcaagcacctggtgtagagggtatgcagtgactggcttactgtcctgagaagcaacaaacaaattattagaagacaaaaaatagtgatagtcattcaagtaagatggcttggtgatgtttctaacaggtttgctggaaagaagagatgaaccagtagtgtcaa

SEQ ID NO: 87868 - DNA, 758 bp, Cannabis sativa
acttctcaagacaatcccaatatcttttggcctcctctaaattggctttaccaaccagaataaggtcatctgcgaagaagatatgggatataatagggcccccctactcagcctgatacgactaatagatctcttagcttgagcatcttccagtagcctagacaagatgtccgccgcccaaatgaagaggtattgagaaagggggtccccttgacgaagaccacgcgagggaataatctttccaaaggggcctctgttaaggcaaattttgagggtggtggtagaaatacactgggaaacccaattccgaaattccgatggcaccctaaagcaatcaatgacatgatcaataaatctccaactcatcttatcataagctttcataaggtcaatctttatagcaaacaggccttctcttccttttttcctattaaacgagtggataatttcctgggcaatcacattattatcctgaatattcctccccggcacaaaggcggcttgagtagggcagatgagtctaggtaacactggcttgattctgttagcaataatcttggaaattaccttatataccacattgcatagagatattggtcgatactggctcggtctcttagggttctggaccttaggaataaggaaaatattggtagcattgacacctttgtgcatacgtcctgagtggaagaattccaagaccgcttcgtagaagtcattctcaacagatccctaatagtgtttgaagaacaaaaccg

SEQ ID NO: 87869 - DNA, 1034 bp, Cannabis sativa
cctagaaactcgagaccaggcttctgtaagaatgacacgtggactcacatgagctatcaagaagggacttctcgagaataaaccttgcgtgaaccaaacttagtgagatgatgtgactgtgacatagtcttgtcacattattaccccttgcttaatgcacgacccagaaggaattatacaagtcgcgcatatactgaggtatatacgataactatgaagacttcttctgtgactcaataaagatcgattctttacatagcgagttggtccgaatgacctcgcatgctcaatgactccataaggaactcgcatgtcctcgatcatcgacgctgagaaggtatccacatacgcgactcgattaggatgcaaatacctaagtaagacgtctactagtctcgttttaatttgagcgtgcgagcttgtgtgagtgaataaataggcaacttacactatggaagtcccatacattgctatatttagtgaattggatttaaattattcttcatttattctatttacattaatttcaatttaatgttaatatttaatgtaaaatgattctataatcaatcaagttttgtgtaactaaagagacacttgctttgtatataaaggagtgatctgatatgaatagaacaagacagaaatccttgcaatagtggactaagtagaccgtgatctgactgaactactatacttacttatgttcattattttcattacttttcaatttgtctgcgtagcttcatttatgtactcgccgttctaggttgagtactcgttattttctaattaaatattgaatctttattttacttggtattgtccaaattcctctgacaacatttggcgccatatgtgggaaattaactattgattttggaggaaaatcaagatggttgggaaccaaaaaaatggaaatattggatctttcaatgtcggaacaatgactgttccactccggggtgatggagctaatccgactgacacaattaatggaggtgcgggaggaaccaatgtcactcctctcaatt

SEQ ID NO: 87870 - DNA, 675 bp, Cannabis sativa
  modified_base (223)..(228): a, c, t, g, unknown or other
ttaatttaatgtaatttctttcgttatgaatgtaatgtttcctctttagtaatgtaatatttatgttattgcaatatgatattttaatttatcgggttttgctgattttatagtattattatttttaatttaattagtaagtttatttaaattattagttaaatataataattgtggtaatttttgttaattaatatgatagttttttttttattttattaannnnnnaatataataataagaaatattttttaatgtaattttttgtgttgtaattacaatagaaatactttttgatgctaaatttgatggtactgaggccaactccaatggaacactaaaatgctaaatttgttaaagttttagactaaattcattccaaccatactctaaaacctatattgtatataccattgtctatagtgtctcactaatattagtgtgacactagactacaccaaatatatttttattattttttaatatttaaataatatatttataagtaaagattttgtatatataatatttgtgtttacttataatataataaaataatataataataaaaaatataattttattagtataatttttagtgttgtgattgaaatagaaaaaaatacattgttaaaattttattatttttgggttgatttaataccaaatttgata

SEQ ID NO: 87871 - DNA, 983 bp, Cannabis sativa
ctaatctcacctagtataaataaataaatctatattattataattaatattaatataaaatcaattaattattcttatcataagaaccattcttctttgatatgcacacctaaaacacaataattttagatctactttcttatcctttttgtagtttccgggtctcaataattcacattagtttatatatataaatatatatatatatataaattataaacaaatgtacatgtgaatatcactctgaatagatttgttaataattcacatttaaacaaatgtaaatgtgaatatcactttgaatagatttctcaataattcacatttatataatatatataaatattataaacaaatgtacatgtgatatatatattataaacaaatgtacatgtgaatatcactttgaatagatttgtcaataattcacatttgtttatatttaattttgttttgctcaaaatgtttatacgtacgttaggagtgataatagatatttgtttatattataaacaaatgtttatatttaattaatagacaagttttgtgattgggtgggactgataatagatagatagatatttgtttggagtgtttttattaaaaatgcctatttgggtgatattgtaattagttgaagattattttttatttaagaatcgttagtggatgtttaaaatatgattatgatcaagtacaattatttatggggataatggtacaattatttgttttgatcatttgttttttattcagttgagctggaattgtttgaagtttgggtagtaataattgttgggttttcatttttatttatttatttatttctacttcttattaatttatggtaggtgccctatatttctgtacaaaacctaaaatacccttcctttttcttttctcttttcctttttaatatatagattaattagtatttttaatatatatagattaattagtagtagtagtagtgttattataaa

SEQ ID NO: 87872 - DNA, 755 bp, Cannabis sativa
tttatagataatgttcccattatatcctttaggttaatgtaaaatatgttttagacttaagtagagagtgaggttatattggacaatccactcaaaaaaaaaaataaatctattttaataaaatataatataaaagtatttttaattaataatacaaaaaaaaaatagatattcttccacttatttaaattttttgtaaggaattcaaaaacaaaaattacacaaaccacattcaaattgatttatgatatttatttgtagtaattttttttgacacattattagtagtaatttaattttacttgcatttcgacttgtgtatgcatacatgagaatatttgtggaccaaaacctgcctcgtaaggaaagcttaatcatatgattaagcaaactaacgaaaaaacccacgctttaaaatcgaaacaaaatctctcaatatatatatatatatatatatatatagacatttgtgcttagactttcacggaatgtattctgtagtacattagatgggtctccgagtgtcaggatacgttactattttttaaccctaataactctaagatcaatctcagccctcaaattaaataactcattcatctaacggctaccgtacgtcacgaaatacaaaggacaaaatatatatatgatatatcgaaacaaataacaagtacgtgacactttacaatttataacaaaatgaccaaaagagggttctatacttctatatgtgagagacagagagagagaaagag

SEQ ID NO: 87873 - DNA, 1148 bp, Cannabis sativa
  modified_base (206)..(207): a, c, t, g, unknown or other
  modified_base (339)..(340): a, c, t, g, unknown or other
  modified_base (840)..(841): a, c, t, g, unknown or other
aaaaataaaaaaaaaaaaaaaaaaaaaaaactaacaaaactcctaaatatcctaaattctaacttaaatttaaatatctgaccaattttcaaatttcaagtttatttaaaatttaaatcaattaaaattctaataagataatataatataatatctcgaattttaaaatttagatattcctaatattatattcttaatcttataanntaataaattaaatattacaaaaaataaacaatttgaaaaaataagatattttatggttaggatattataaattttattaaaaaaaaataaaaaatatcctaagtttgaaaattttatggttagaaaccctannatttctattcaaacctaaactaacaaattttaagaatttcatgttatttttgccaaaattaattttaataaaaaaaatatctaataagataaaatgtgaaaactaacatttttcaaatcttataatttaatttaataaatgtatttcaaaaaataacaaatttcgaaacaaatgatatggttagcaaattttgaaatttaaactagattatttaaaaaaaaaatttaatatcaaaataagatcattcaaattttaataataaaataattaatatctgatcttataattaaaataaataaaataataaaaatttcaaaattaaccataaggctatttttgtgcaaaaatcaaattttcaaattcaaagcctactaatatctaaaactaattttaattaattaaacattaataaaaattatttttattctaataattcaatttttaattaaaaatttaaattatacacaaaattctactaaaatttgaattttgtttcaatnnaaaatgatttttgaatcaaaaaatatgacaaaaacaagtttggtgcccaagggtatgcattgcatacccctgcgcgtgcgaaagtggaaggctgactgagacaagaggctgcacgcagcctcaatggcgtgacatggtttcagacagctcgtgtttgagtttcctcggtcaggttgtctgaaaaacacgtgagggtgccgagtgtatcccctcgtgcgcgcgtgtgtgtgtgcatcagtttcaaatattttcatccaaattcaaaaaatcataactaatacttaaaaaattcaaattgagttctgta

SEQ ID NO: 87874 - DNA, 814 bp, Cannabis sativa
tcttgtattaggtgaaaaggagagaacacacttatcaggattaatttcttggccagatgctttgttgtagatatccaaaacgtttttaattgaccttgttgattgatgatttgcacgacagaaaagcacactatcattggcaaaaaaataaatgtgacaccattagagctgatctagagacttttaatccctacaaagaactaatgctttcttcatactgcagtaggcttgagaaaccttcagcataaatgagaaaaagataaggcgagagtgggtcgccttaccgtatacccctggttggaaccaaatctccatgtacacctccatttaaaagaaaagaataagaaaccgactgtaaacaacggagtataagctgtacaacagttgttctaaatcccatcttcaacattacttgagccacatagtgttaatctacacgattaaaggcctttctcatatccaatttaattgctgcataaccttttgaagcacgtttcctattcttaagagaatgtaacaactcaaatgccacaagaacattgttattaatcaatctttgagacaagaatgcactttgatattcagatataaccaatggtagaaacggttggagcctgaggataattgatttggagactagcttatagagaacagtacacaaactgatgggacagaattgagtgatgaggttaggcttcttaactttggggatcagagttatgatggtcttgtttagtattgtaggatctgcaccattatagaggacatcaagtactgaaggagtaacaagagagccaacaatgtgccaataatt

SEQ ID NO: 87875 - DNA, 789 bp, Cannabis sativa
acataaatactttatatcacatattttattcaaaaactattgtaaaaaaattgatagttatttataaggtaacatggcagttttcggtgccattggtacctaatagtgcatcaaacaacctaaattgcataaattaaaaccattcacatcgcaccatattaaattttttcacaaaatatatgagaagtaaagtgtgtgacatgcattgaatttcacatgagataaaaacatttccttaaaagtgaatataaaatgtaactatgagatttggattcgggtcttatgggttacccaattttgtacgcatggtttgattgtgatgtcacaaaaaaaaattatttaattaaataaatattatttattatttattttttattttttaaacacgttttacaaaagtagtaaatgtaccaatgatctaaataacattcttcttacagtttttatttgatcgaacatctatttaatttgtatcctaacaacggcagaacacatctcttcaacacaaaaattctattctattcaaaacctttacaatttctcaagtaaatatttttggggtgttacacaacgatatcgttcgttgcagaactattcgtatacagagactattttacacaggagatgtcatggttgatagactgtcgtgcacacttcgagcagaactgtaaaacaacttaaagagagcgacataggttgcgactcaaccataactatcaatcagtaaattcattcatgttttaattttcggtacaacaattttaagacgttatgttctactatggctac

SEQ ID NO: 87876 - DNA, 781 bp, Cannabis sativa
cttaattagtagtaaagttgttaactactctttaatcaaaaaaaaaagttgttaactactcataattttagtgataatatttctttgcaaaaataatataatttttgtgatttaattagatagatttttctgtttttttgtttttgtttaaatatgaatttcatagcccaatttataaccattgcagacaccaaaatttcatgtttattgcagaaaaaaggagaaaaacagagaatttccactcttataaagtaatcaaaggctttacaatctatgttacctactatacatttctcacatcatgatttttatttgaccattttctatttaggaactatctttatttgttcctactatatattggaagctttacgaatttgaagagcactataggttctatttttatctgagaattgttggttgtttggcttattttctcagaaaatttggatgtttccttacactgtttcgtcagatatttttattttagagaaactggtgaaagagcaagcttccgtgaagacagatttagacatggcggtacctctctttgtttcttcctgtgtctgtcggtgctttcgtttaatttgttcgatcaagctcgcacacaagaattttttaccaatatatgatcgttaaggtttggtattcttccttttttctatgggaggctgaagatgtagtgatatagatattactgatggtgatttaatcaactatttaaatgcagaacattagaagaaaagttatagaatgcgtttaatgaaaatgctaaactcaa

SEQ ID NO: 87877 - DNA, 699 bp, Cannabis sativa
ttacttctgatgcaatgccttcagacatggatccttagagccaacccatgagaagttggtcatgtacaatccatgcctcaaactcagggtttggttgagtctcagtaacaccagcttcattctcagtaattctttcgactgagatgacttcatttggacaaggtttctgcccattgagatatccttcaagtctgtgtcctcttataatggtgtataccattgttttccacaagggaaaattgtttctatcaagtttgactgtaaagggctggctcagggtgttgctgaatggagtggctaacgttaatggagcagcagccatgggagaagtgttttgagtcacggagcttcctggagagtttccagcaccagtatttcctggtgcagcttggctctgattagtcgacataggcggaggccatcggagctctgataccaagtgaaaatatattgagtggatttaatggagaaaactcagctcagtggagtgagttgatattcatttcattaaatagcagtagcaaagatacagaggaaaaacaggggccaatataggcattacacgtgtagagaataaaagtacaacgggaaagtttgttacaaaacaatgattacaaaaatgattgcaaaatcaatcttgggattccctcattcgtacggccattctccactgacagctcatgattgaatattgcttga

SEQ ID NO: 87878 - DNA, 552 bp, Cannabis sativa
agaacttggagaaaactaatttatacgatatggcctactgcattttccttctctttagattttctctctatagtaaaacctttgtaaaaccctaagttttcaataatttatctttctttctctattaaggttattttatcttaacaacacataaaagtataagtttcatctgcattgtcaactcaattacaagttcattgaaaattcattctaattgactagtgcttagtttttccgaactagggtaataactttcactctattaaaaaacatttgtacagtaaccaatccatattacaacaaacttttaccttaagtaatcgaatcccttgattaggaatgcaagatccccttgttttgctcgttgaaatctctcaaaacgaaaattagatctgaatacctttcggatttgtaacgctaagtcttagatgaaatcccttcagctatcacagcttgacttcagatcttgcagtaaaactttgaaccaccttcaatggaatttcttgcaagaacataacaccacgaacaccaaacacaactttggaacataat

SEQ ID NO: 87879 - DNA, 931 bp, Cannabis sativa
taaattctacactatttatttctggtttgtttctgtaaaattgtgttctgtagtgacaaaattacattctgctgctgtagactgttacaacaacgcttttactgaaatttagtagaattattggcatttgtaaaaatttaatttttcaatattgatgatattgatgattgtaagaaacatacacaaaaatatatgttatattcttctaaaaaaattgattaggcaagattaaattctttaatcacctataaaacaataatataacactaactttgagacaaaataaagaggagaaaatagtcatctatatataatctataatacaagagtcacaatgatttttaaaccatgtgaaattttttcttaagaacccactaatcagtaaaattaccaaaatttaataaaaaataataaaaaaaaaataaaaaacagataacatatattaaaactttcttaggatgtcacttcatcttctttttttgctttcctttatatatatattgatattgattatataaatatatatatacatattaatattaattgatagaaaactctcacaaaattttaaaaatagaatggaaattatatagaaatactttttcattttcctttattaaggtaaaaaagaaaaatacttatttttatctctgatttgactatttaaataatttaaactaaacttaccaaaaaaaaaaataataataatagcgaaaaatgctaaaataaaaaaaatcattttgtagaaatattatgttctaatatactaaaattgaaacaataaaacataaaaaaaataaaaaaaaaaatataatcaagagtgttcaagtagtcatataagatattgacaatcactttttataaaaaaataaaataaaacataaaattttaacttttgaacaaataaacattaagagaaaatattttagtt

SEQ ID NO: 87880 - DNA, 610 bp, Cannabis sativa
attgtagagatgataaggaaagatataaagtataggtttagcaattttaattttaagaagttgaaagatgaggagaggttattattgttaaaaatgacctcattgtaggtgtgggcttaagttgtgttgagtttgtaagttggctattttgcttgttgactaataaagatttttctttcttgattaaaaaaaaagtatgtatgtatattctctttaatataacttgaattagatcaaaagatatggactgggaatctccagggctggctgctttattggaaaataaaatttggtggcctaattaaaaaaaaatatcaataatagtttgatataattgtgggttaaatagtttgatataattaaattcttaaatgattataaatatcttagtatataaatatgaagggggctattatagtagggattgggtattttacctattaatagagataataatttataatccttgatttaattaaatggctcaaattaattcttaaaatttacaccataattaatatattttattatttataattaatcttgaatattattaattataggttcaactaacaaactccaaacctaattttttttatcattttatttt

SEQ ID NO: 87881 - DNA, 526 bp, Cannabis sativa
taaatctgattatattgaaattgattttatttagggcacaaaacccaacacaaatatggtctgtagagaatccatcattttaaatgccttctccatttgttcatgcatcttacgcataacgtcatccgtgcttacaagcatgaagcatttggccttgttattggattgaatctaagcatcatattttttccaaatatttttttgggcattggtagcatgctcctcagttaggaaaaaattgtggttctcacaaaccaccatcaaattcaaattatgttttcatttaaaaaaaacttttaccattcaatttttcaagtgctagtaaagcagtaaggggatttgacatagtagacatgactgaaaacaaataaagataacaaatgaataagcttgaaaaaataaatatcttttagaattagtgtaaacgtgatgcatgaatgcatacaactaaaacacataaaagaatgtttaagttattcttgtttggttttatgccctaaataaaactctttacaatctgattagt

SEQ ID NO: 87882 - DNA, 583 bp, Cannabis sativa
tatatatataccatataaatattttatgaatgatctgctaaaaaaataaaagtacaaacaaattatattaataattggaaagtatgtttggaaaaccacgagaaaattagaatcaagtgtaattaaaggtaaatatatataattttacgtatttgtcagactacctaattatactaaaattggctaattacgtaattagaagtaattgagaggtctcaattctcatgccgtcaatataaatttaatataattacgctgtataattacttcaaaatttcagttttaaaatatgcatacaatctttagtgtgaatattattaattaagtatcattaattttaagaagagaggagatagtcaatggctcatatgaacacacacatgcggtccgacgtagctaagttggtgggtgtggatcgacttctctactaatatacggttagaaagatattgataaagtttcatctcaaaattaattgaaaattaaaaaagtggtcaataaatcttatatatgctataatatttcaatacattaataatctgatattttattttttaaggtctttgctcatcaaccttaaaat

SEQ ID NO: 87883 - DNA, 1136 bp, Cannabis sativa
  modified_base (740)..(745): a, c, t, g, unknown or other
  modified_base (1004)..(1009): a, c, t, g, unknown or other
ccaattcctcaattggttttaacatgtttctctcatcttgaactccggggtcaagatcttcgtcattcttttcagtttcttctgccaagatcgccattaactgatgaccgattttcctatgctgcagctccatgcgatagcaatcgcaagccagcatctagtcgccacgcaccactcctatgctatctggtgtttggaatttcaaggataggtgcttgatcgaactgactccccctattccgattagtgctaaatgacccaacaatatgatataagccgatggcaggtcgacaactaagaagtcttgcataacagtagcagataagggtgcctcgcctaaggttaatgcgagctcgattatgcccaatatccttatggaatttacaatacttgttataatctcttttgctcctcaaattcctcatgggctcgggcttgccgaaggcaaccatttgctcatgtgcgaggtaaatattctcccgagtttcattaagcttggtataaatagtatacactggcacgtatttatcatgcttcttctgtttctttttatcctttgacggttctttaattccgtcttttctcttcgaaccagaagcccccgagttatcaattctcgtggaaacagtacttattgaaacattgtcgggtttgcttcctgagcttatttttaacagattcatttcctttcgggcttcttccttctgaacaagcttctgagccctttcgttgaactcagnnnnnnttctcactggatgtccttgtaagttatcccacaactcgcccctgcgattaaaggattagtaaagatccctgcctgaaggactgtaagttgcgtgctgtcatccaaattcttagccctagccacacccgtgctaaaacgacttaagtatgcctttattgtcttgtcaggctgtaagttgtgtgttgtcatccaaattcttaaccctaaccttggatagctactcccaggaagttattgaatgatgagtaaacttgttaannnnnntactctctgctccaacaagcgagggcgggaacaaaatacagcgtaaattgtttgtcacattacttgctcgtattattgtgttaaagttattcaaatacgagaccggatcagtggtttcgtcatatga

SEQ ID NO: 87884 - DNA, 594 bp, Cannabis sativa
gctattacagctaataaaaaaaaagttatgttttccttttttcaactatttttttattagttttcagcccaaaaaaaaaaaaaaactatttttttactatctagaattgcttgatttgacccaaatctaaaattgttaagcctataaaaactatgtcttctagaaaaaaaaaattatcccaaattgataaaacttttttttttagaataacaaataaaaagtatgtcttctagaaaaaaaaaaaaaacatagataatgggatttgggattgagtaaataggatttttgtttattaattatgatatttgtagggttttgtccgtaaaaatttttttgttgagaaaattctccttgaactatataaatcgttacaaatatattctttcagttatagtttgctcatttttttaaaataatttatttatgtactatgagttacatatataattacaatataagagtttacttaataactttaagctctttaaaatttagtttagtgacattaaacatataaacagtacatctaagaatacacatatgtactatgataattcattactagactgttatttatgtgtttatttttgtctg

SEQ ID NO: 87885 - DNA, 504 bp, Cannabis sativa
gttttaccgtcaaaattttagcatttaagttcagtaagttttaccgttaaaattttgatttttgtggttaggtgttaaaaaatataaaatccaagaaattttactgttactatgtataagaaaaaaaaaaaggcaaatttattctttttggctacatgtatctctcaatatgtggctaatatactaaaaaaggaaagagaaaattcacataaaacatgtttctaatttgtaatggaaagacccatacgtgaatgtcatttcctcctatccctaagaaatagcaccaccaacaacacaaaaaaatatttatataaaatcttggttttttttttttttgtgggttaaaaattaaaataaaatccaattaactctttaaaaaaaccaaaacaaaaaaaacaaaattgcttcaaaaaaaaaaagttaaattatatgaacatgatataatttaaattattattaatttttttattttcttgtcattacctacataaataaaataataaa

SEQ ID NO: 87886 - DNA, 686 bp, Cannabis sativa
ctttcaagttttctcatgctttcccgtatgaacactgttaataatgatggtaaagtagagttgaggaattattgagtgaatgtgatcgtttgaaggtttcagaggacttttccacaccatcaaccagataccttatttccctgtgtttatgctcttcatgtctcatgtgtaccaaatttataataaagtagtagttcatacgactatatgttgtgttgtttgatctcttcttttctttatatttctaattttaaaaattttactttatttataatatatatacatcaaaatattatattttacattatattatttaatcggtattacttaatcagtaaaaaaaaatttacaaaactagggtcaaatccgcgcaagacgcggcttagttctctagtttaataaatattaggaatactctaattcattaattaataattcttattaattataattactacctaatatagttgagggaataatattttgctactagtgaattcaaatttcgtgaggtattatttttctctagaaaaattttgaaagtcacagaaaagatttttgatataattttcaaaagatgaatttttaatttttttttctttgtaattaataattatattttattctagattttgtgggggattttttctataataaattaaaaatggaacaagtttacatttatg

SEQ ID NO: 87887 - DNA, 533 bp, Cannabis sativa
actctaggcatgcacctgacattgaagtagaggagatgggcgaggactgggaggttcctgaccgcgagtcaaatgaggaggaggacgctgaggggagtggaactgatttagtggataacacacaactgaacgagcccttgtgatgtgaggagttggtctcgcaagtcaccaaattagacctcaccaattttatgaggttgaatttgctgcgacttagcaccatgcgtccccgctctactcagagaccacatctttctttcaccaatcccgcaataatccccacagagaatgtggttgtttctatacccattcttcgctgtggagtatcgcttcccttccatccattcatcgttgctattcttaaacggtatgacgtatcccccttccaattaaccccaaacagctagcgcatagctcttggcttttatgcgatgtacattgagtacgcgcatagggagccttcaatggaggacttcagctatttttatgacataaagaatgtgggccttcataacggtttctattgcttcagc

SEQ ID NO: 87888 - DNA, 1082 bp, Cannabis sativa
  modified_base (1053)..(1056): a, c, t, g, unknown or other
tttgataattaattataattattaaatagaaagaattgacatttatagagttagaattaaaatatagaatttgtgaaaagaaagatgagttaaattaaatgacaaaaatgaaacccaataggcccatacagggttcagccataagggtccaataaatccattaattttatcttttttaagtccatttaaattctaaacctaaccctagtatctccctataaatagaataagatggctcttgttttcttagttcattaattgacatcagactcctttgtcagacaaaatagaaagtagaaaagagcctcttctattttcgaaatccctcttcttcttccttataattttgaagcctatggtgaattgagagtatgcccactcatgtcaaagcaatacctagcatagtgagaaagactgtgtcaaaccaaattaaaggagagaagatctagattcagatcttgataatgctctactatagacaggaatcaagggatagatattttaatggaaggagtcattacattctgctgccatcaatgtaaggatttcttaatctcttatgtgtttatttcattattttaagaaattcatatttaggatgttagattatagaattataattaacatgcatgttagtatatctagatcctggtaaaataagttcgaacagggtgcacatattattataaaaaaaacaaaatctttcatgtggaagaaggagaagcgtcatgcacgtgggccctacacgtgacagtccttgtccctccactcgcatgttaggcactattggctaaatattatatattgaagacaaaaacaaataactatctaatatatattgtgcttacaactagtgtgtatgtgtcaaagtaattaatctctctttcttgtctgaaatccttagctactaatctagctttgaaagtttgaataatgtcatcaatgtgatttttattgaatactcacttgtatccaatttttttaaaaccaaatatagtttcatcatgtatttttgcctatttcctagagggatttttgttgggttttatgccnnnnataaaactctttacaatctgattagt

SEQ ID NO: 87889 - DNA, 600 bp, Cannabis sativa
aaaatgacaaatatataataaagttataatactataggtaattataaagtataaataagcatttttcgaaaatgatacttgtcaatagaatagtgacaatgtgcttagaccataccaatagatagtgtaaattttgtgttaaatttagctaaaaaataaattcatgttatattttgtctaaattttataattgtgctccaatacactaagagtaaaatagattttatagtaatagaaagttgtaaaagaatcaataaaaatattaaattttgattggaagtatacaaaaactatattaattatgtgaataaaagtataaaaagctttttttttttttgaataaaaatcataagatttattaattaataaattcgttcaaaacaatagatagtacttcagaagagcagtcctccaactgaagcacacgtgacacgacctgcaaagaaacaagagtctcttgccaagtaatgaatcaacttatttgcagatcgttttacaaaacacaaatcaacaacagttaaagccaaaagtaaatttctaatatcttgaacaataagaccaaactgtgaaggtataaaaataccgctctgaatcgcttgg

SEQ ID NO: 87890 - DNA, 625 bp, Cannabis sativa
aggaaactacctttttgtccaacgccatactctctgacattcactgtaccaacatggaagcgcatgacacatgtcaccaccaaacggtccccacaagtacggatgtttgttatcttgtaaattgggtcttacctaacctgcccaaagtcaatataaattgtattttaccccatcactgtgcctagttgacaccttgaaaccctaacgggtttgggttcacccatacccgactcaagcctataaatagaacattatcccttcatgtaaagggtaggaaaataatttctcaaataaagggctaaaaattaggattcttaaactttggcaagaacactcttctgtaaaaatacttcaaagcttttttagctcaataatattgactcgtggactaaggttcattaacactccaactatgtaaaaattcttgtttctttatctttaatttattcttctttaagctttatttgtttattaatcagtttctaaaaatcccggtaaatattttagtgctttcattgagagctcaaagagatttttaccatagttgtcctctacaacaatggcggcaactcaaaacatggtaagtagactgcctgttcaagatggtggagataatgccaccatg

SEQ ID NO: 87891 - DNA, 509 bp, Cannabis sativa
attgaccatctaatcttaagcaatccaaaacatctctcaatgacatttcttgcagatgcatgtttcatattaaagtactcctcatgatttctaggcacgtttctaccccactcagataaatggtacgcaactcctctataaggtgctaagaatccttcaccgttagtatatccaccatccaccaaataataataacctaaagataaaaaaattaaccaaaactaatttagtgatctagaaaattaaaatttagtgatgattcaaaatataaaataatcttttttcactaaaaaattacctttagggatctttaagccattttgcctattaatggcatcacgaagtactctagaatctgatgctgagccctcccaacccggtaaaacaaatataaacttcatatctcgagaacaaactcctaatacatttgttgcgatcttgccttttcttgttcgataccttggtttgtcaacttcagacactcgtacctcaatgtaagtaccatctaa

SEQ ID NO: 87892 - DNA, 569 bp, Cannabis sativa
aaaaaaacttcttcatttaattttttttaaaaaaaaaattctttatttaatatttcaaaagagaaaaaaaaaagaaaaaaaaaatatctcacaaatatagaaatagagaagttatcatttttaaaaagattttgtttgataaaatttatttttaaaaagttattattagttaaatatatattttaaggatattgtttaaaactatttaaaatcatgtagtattacttgaaaaataagaaaaaaataacaaaaagaacaaagtaaaataaagttattttagagtgtcatgtcactgcctcatatctagggatgcacacggagcggggaattagcggggagtgctctccccgtccccattcccgttaaggattttaatccccatccccgcttattccccatcggggacaggacggggaatcccctattggggcggggacggtgcggggaatcccctattataaaattaaagtttattttaaaaatttaaatatataaaattatttaattacataaaagcagataaaatattacatactatttactattcaatattgtaattattatacaaa

SEQ ID NO: 87893 - DNA, 601 bp, Cannabis sativa
gacctataccctaggtatcttaggggttaggtggatataatcctttatcccttcttgactgatgtgatccctcataaagtagccgtcactaggctgattaatcgtagcgtaatagctgcagcaaaggggttatgtcatcagacctaatgcttatggcagtttcaatacgtccctcccatgcggcattaaatgcgaggtgactgttcaattggggtctggtatctctcggaggtgctcttccatagctctgtcctccgaaagtatgtggagccctcttatcttctccgggaggcattttcttgttgatactcttaattcaaaaagacttagttaatttatctcaaagtcatatttttcagatccacgtgtcgcagtcgcattggtccacgtattttgggcaaatacactagattatctcctactcctcctttaataatatgtttgacattttatttattcatttttatgtactttccatcatctcctcttttttgttctctctctcaaattaaagatgaaaaactatataaaatttagggattcaacacctcaaatacatgtaagccattagatttaattgagatagtatatttttggtatc

SEQ ID NO: 87894 - DNA, 760 bp, Cannabis sativa
agggaccctctttccccttatctcatcttgatttgctcaaaagaactttcaagatactataaaatgcaataggtaatcttcaaagtttacgtcttactagaagagaaccttcagtctcacacttactttttgatgatgatagcctgttattttgtgagatcacaaatacatttgctttggcaattaaacgagctttagacatatatcactaagcttcatgacaaatgcttaaaaatcaaaaatcgattatgcctttctctcaaaaaaactccaattacaacgtaagactttttccatcagattttaaatatgataactagtgagtgccctgatcgttatcttgaattgtcttcttattcaggccaagacaagaaggagttattcagtaacatcaaagagcatgttcagaagttgatgcttacttggagcgaaaaattgttctatattggtggaaaagaggttttacttaaagtggtagttcagtcaatcttaactttgttatgggttgtttctgtttaataaagacgttttgtcaacaattggaaagtatgatagaaaatttattgtgggcatcaaataaagatggcacaaaaatatattggaaaagataaaaattgctatgtaaattcaaatttgagggtggtatgggatttcaatctttcgtacattacaagcaagcactcttagttaaacaagcttgaagaatctttgaaatgccaaattctttgttgagccaaattattaaagtgcaagtactttt

SEQ ID NO: 87895 - DNA, 821 bp, Cannabis sativa
taaaaatgatatttttaaaatttttccttgaataaatatagtgtgggtgtagggtgaatgaaaactttccatccaaatatgaagtttgcatctaatctaagaacatgcaaaataatttatggattgtaaaattatattgcaacataaatgaaaaataattactttcgaatatttaggcaaagtttccaaaaaaaaaaagactacaattaatttttaaaataaaaatgcatccaaataaaagcttgagagatacaagaataatatataaatggaggaaaaaatcttaattgattacaaaaataatgacattgaatactttgtattattgttaagtaaagttactatttttattagattgatttttattatttctcacatttgcctattatatcacaagacatttaagaaacaaaagcttttcaataaatgaattatcattaattaattaattaattggatttaattatgggtgatgaattaaaaaaggtattaacatattactacatattgtattaaaaaaaatgctataaatagaaaataattaataatgagcttgatatcttcaatatctttttaactaataaaatgagtaaataactacttactaattactactaagcatagtattatccctttccaaacaaaaaatgcatagtattagttattattatcttatgaatatttattttattaaaatttggcaaaatttataaattaaatcttaaacaactgtcaaaatgatttatttctcagacacaaaatttggagtgttataaaaatatgagacatagtctgtaagatgttaagaaaaacacattgtc

SEQ ID NO: 87896 - DNA, 826 bp, Cannabis sativa
ttatggttcctattacgctgagctcatcatggaaaaggaagagtttgtttatacatctctggggtccaatcctcatatcctcaagttctacggccacaattatacctttttcgaagatcatgatggtggaaactatggcagagtcagttataacctgttttatgaaaacgccttaagtggatcactgagtgatttcattgagagaacaagagttgggttgcgtgagcctcaagcaagagcacatactcgctctattcttaaagggttggagttcatacaccaaaagagttttgttcactgtgacataaaaccatccaacattttactggttcattgtgatgataatccttatggtgtggatggtttggttgccaagattgctgattttggtctgtctaagagaattaatgatgatttcgagagtgggaatgaagtgacaggtagtccgttgaatctgtctcctgagaatgtgtgtgaagaaactcaagaccaggcctctgacattcgggctcttgggtgtgttgttcttgagatggtaattggaaattcgccgtgggatgagaatttggaggaagaagagttgtacaacaagatttctactaaaacgccttttataccatcttaccttactcccattgctaaagattttttacttgagtgcttcaccagataccccaatcaaagaccttctgctcaaatgttgctggatcatccatttgctttgaaaacaaaagaagaggattccgaagaagaagattcaaaagaagaggattttgaaaaaaatcctgaagaagacctagaggaagaagacttggaggaagatccc

SEQ ID NO: 87897 - DNA, 517 bp, Cannabis sativa
tagccaagagacttcagttgtttgtaggcctgaaaaagctcccaagaacatccattattatcatcagaaagattcatatacatctcctcaatagaaatactggcaccagcatcatccattaaaagaaaagcccccaattcggccataaaccttttaaacaaacattatttagtaatgattcatctcatctcaatatggaagttaaaagaaaaataagaactttcactcacaaagcttcttcaattgagcaatagattttgccacaacggactatgcctgttgtcttccaaattgaacccttatgaacttcaatctcagccattcctatctttttaatccaacgaccctttgataaaaccttcctgaaaccattaacaaataaataaaacagattcaacttcgggttttttttttcaattaattatataaaaataacacaaactataaagattaatgtttacctaggctgtaacttggacactggtacagaagcatagcaatattgttcatcatcatc

SEQ ID NO: 87898 - DNA, 1361 bp, Cannabis sativa
  modified_base (1322)..(1326): a, c, t, g, unknown or other
aaatgcaagaaacaccattagggtgaatgtcaggccaagacttgtttccaatgtggcatggtgtgtcactttatcaaatattgtcctcaagccaagaaagaggagtcgaaaaagaatactactcagaacccaggacgaattttcactacgaatcaggctgacacagatgctagtccgtcagtggtgacatgtaagttatctattaatggttgttcctatactgtattgtttgactcgggagctacccattcttatgtgtcatgaagagtgattgaaagttttcataaaccttgtgatacatatgcttcggggtttggtaccctgttacctttgggagaccttatagtatccactaggtggatccggtccttggccttttggattgataattgtgagttaaccgccaatctgatagagctacaactgtctgattttgacataatcctgggaatggattttctatttaagtatgggggaacgatcaactacaggcggacgatggtggtgttagagcctgacagtgctaacccgacagtgtttatgggtatagtttaggggacacgcataccaaggataacacttttgaaagctaaagatctgatgagcagaggttgtttgggattcatagtcactgcagtggataccagccaacctgtaacatttggacctgagaatacaagattagtcgtcgagttccttgacgtctttccaaaagatttactaggattgccacctactggggagattgaatttgtaattgagttagttccgggagcagaaccagtatcaaaggcatcgtatcgaatggctccatcagaattgaaagaattaaagttccagttgcatgagttattgaatctgggattcattagactgagctactctccttagggtggtccagtattatttatgaaaaagaaaaacgggtctctacgaatgtgtattgattaccgagagttgaaaaaacttatcatcaagaacaagtatcctttacctcgaattgatgatctttttgatcaattgaaggggaagacggtctctccaagatttcgcgcaggttatcatcaactgaaaattcgagaggaagatatgccaaaaactgcattccgtactcgatatggacattatgaatttcttgtgatgtcttttggagtcaccaatgccccagtggcatttatggatctcatgaatcgggtattcaaggactacctggatagatgcgtgatcgtgtttatcgatgacatattgatttattcaatggattacctggatagatgcgtgatatcataacaatggataattaatagcgtgtctatatggtnnnnnatatagagcgttctatatagctaagagtgcaattc

SEQ ID NO: 87899 - DNA, 2895 bp, Cannabis sativa
tattcacataataatatattatcacattttaatctatattatattattaaataatctaacaacctttacacttgagtgatacctaactcataacaataatatttttggtatgacccataatgcacactaccactactttaaaaatcacttaaagaagatttagaagaatattttgagagaagatgactagcaattttctttagcagaatgctttctcttacaatgaaaaggatggctctatatatagccatttacatgggattggatataaaatagaaaacttcctataaatatcttagaaatagaaaaacatagaaaagacaaactgacaacaaatagataaaccaacaaaatgacaaacatagaaaatgaaaatctgaaaacaaatggacaaactgacaaattgacaaacataaaaagcgacaaaccaaagaacaaatgattaaaaaaaattcttacagacatcatgactatcaagaatttttccacttattgttatcttacaaaagtaagaaatatggaatctctttgtactacacttatgagcggtcgataattgcctcgtggtcaacattatatcttagtcataatttgggtcctcttgaagtgggtgccaatctgatggttcattatcttcatcacttctagctggtggacatgcatcatatacagaataaataatctccgattctagtgcattgcactgaaagagatagggatcctgtttgatttcttggtccatgtatagatcttgtgaatcctcaaaatttcttgtcttacggagtaggacccctacagtgtttatttctttgaatagtgatgaaattttcttctttgcttcaggggcttagacctgtctgtgactattttttagaaatttggaatttttcaagagtctttgctatgcatcgttaataatctgaggaaaaccttttccatggggcatcatcttctatatttggtcaaatttttggtggaatagtctagtttttcttaaaaatagcctgttggagactcctgtactctgaatattctctgaaaggtgcttcttgggagccatatagtttaaaggtgggattgcaaactatttttttgttcttgtccaatttcgcattaatactgataaggaagacagtgtagcaatccatcattttagctacatgtggtcctaatggataaacaaagatgtgcctattgttgcgaatttttttccattcatccctaagtatttttttccactcctctagaggagcgtaccaagacaaaatttccatttagattttgtaggttggcttaagttttttcttgtttgaggaaagactgtatagcagtatgaagagccattgtttagatttcaacaacaatcatacaaatgcatgttaggtaccataaaagatgagttatagattttggagtgaaaagtgcagtctagagggggaccagataggcaaaaagatacattgggtgaattagaaaatcaagtttaaaatagggtccaagtatagagagaatttggtcgtgagtataaatagccttgtgagaggccttttcttttgttgagctttgcatctcagaaaaatgagaaattcttttatgttgatgatgatgccaatatatatatatgtatggaatggtattgaaagagttgtagctgattaaggggatggttttgagtagatgtgaaaagaccatatttatagacgtaggtctagatagaaggtcggccaaacattttcttttccaagaatttgttttatttcaaaagagtaatgatcaaaccatgctgccagtctcaaaagttaagcattggttatcttgttctttctcaatcttatcattccttttgatgcatcaaaattagtttccactaagaaatgatggcctatgaggtggaactcaaattttgtgattcccatcttaattgctattaactcttttagtgttgaatgataatagagttgagaatctttgaagtgtccactcttatatccacatatttatcttctcctctactcatcttgctcgagaaggaaaacaccccaatattggtctatggcatttgtttaaagaataccttttgcgtcagacagaatctataaagatggtagattctgcatgatttccttcagcttccttactgctatagtttggtcatgtgaccattctagactattcttcttgagcatattgatgagtggccttgtcagtacagaatgtcggggaacaaagtctcacaaataatttatgatgtctaagaattgtcggacctaaactttcgtgagattttcatgtgggaatttgagtagttcgtgggctatatgtggttgggcttcatattatcctttagataatttcatcccaaggaattctatttgcgtctgtcaaataatcattttctttttcagacaacatgataccatgggctttattgatagaagaaaattgggccaataacaattgatcgactttttcatcaggagaaaaaagtaaaatatcatcaatatagatgagagtcttttccaatatcgggccatatacccttgtcacaaccttttgaaataaagaatgggccattttgagcccaaaaggtaggacggtccattggaaatgatgatttggaatgcaaaaagttattttgggttggtcatctggtttgatgcctaattgccaaaatcctgcttttagatcgaacttttaaaaaatatgggctttggataaactggcaaacaaataattcttatttggtattgggaatttatcatctgctaagaactcatttaggggcttgtagttgatgacaaccctttgcttttctcaagcttgctttgatcgattattaacataaaatgcatgacatgcccatggaaaggaagttgactctattaaaccatactg

SEQ ID NO: 87900 - DNA, 519 bp, Cannabis sativa
tggcatcgacttgatcaatttcttctatcctgtctcttatcttctatttttgaatccatgttgggacgtcgtgaactgtgaatctactcatgacatatggagaactcttgagcttctctttggcactgcctctcgagctcgtatgattcacttgatgaatcaacttcagaacaccaagaaaggatctctggctattgatgagtacctcctcaagatgaagaaccttacagatggtcttcgtgcagctggaaatcaaatcactgaggagcaattaattctctatgttcttgctagtcttggcactgattatgaagctgttgttgtcaatctcacatctagagacaaactaacatttcaagaagttcaattcttgcttcaaaatcatgaaatgcgaattgaagccaataatgctacactcatggcagaattcttcggagcttctgccaactttgctcaatctaagaaactatccattcgtaactccaatggcactcgtggtgcttcgaatggatacagagg

SEQ ID NO: 87901 - DNA, 1199 bp, Cannabis sativa
tattatttttaatattgagtagtatatttaattttaatgttcttaaattttatatttatttttcttatattattaaaactttaaatgttttctaaaaataaataaaattaaaaattaattagtttcctttaattcataaaattttaaaaatacatataacaaaaataaaataaaaaatataattaaatatacataacaataatctagtatatttatatatctcgatcgaaattcaacatttaatttatttatctgtctaatttttataaaaaaataaagtggtgaaaggacaatttaaaattattttaaggtatcttatatatttttttaattactttttaaaagttattaaatttaaaatttgataattgggtatgtttactaatttttatatatatatataatttaggggagccttctagcatgcagttcctcctctctactaagaacttggtccctctcatggggaaattagtccaccctttgatgtttagtggtggtttcaggtgtttctttcctattagttattcctttcctcttgtttctctttccttttcgagcatttattactctggggaatattattacatcccttcccatctcattaaactccctcagagcattaattgctcaaaccctcaattctcgtcatctctccccctctttcatcatcttctcttgtcttctccccatttattacagatttttcaaatattttctctgcaaaacacccttgaagatagtaagatggaggcggacggctggacttccgaagctcctcagcttctcttcatcattgcaactccaatggatgggactagggaagtgactagggcggcgatgaggaaaatccttcggggattatggtttttcctatatatatccaaacccaggtattgtttttatcatctctttgtgcctaattttctttttttagcctttgtctttgaagtgtctttgtctgtcaatatggatgagttcttaaactccttgtctaatgctttagccctccctcctgatgagtccactgtttttacttatgaggttggttcctctagttcctcctctgctcctatcagccttatccttaagcttcataccattaggccatataatcgaccctctctgatgaaaatcctttctggtatgtggtcatcgctttgtcgattccctgttgttgtctctgaacatgctgatgg

SEQ ID NO: 87902 - DNA, 2031 bp, Cannabis sativa
  modified_base (442)..(464): a, c, t, g, unknown or other
tataattatatatgttaataaacccactagttatcgtttgttgggagaacaacattttatttttttcaatacagagtaaactataatcaaacataatgatatacacctagaaacccattaatctatttttcgtatatattggaacaacaattcatattttgtttcaaacacaacgtcttcctataaaataacaaactgattaattttttttttttttcagttgagacatcaaatctagttgtatacaaagtacataactgtaacatgtcttatatagtaaacctagataactttatatgcacttgtcaaatatttgaatatgatgaaattattccttgctcataagtttatttggcatatatgcctatactcatatatgctaaataaacttattaattagtttattttgacatattaaaatatattttcattctttatttannnnnnnnnnnnnnnnnnnnnnntattatcgtatatgctaataaatctattagtttattttagcttattgaaataaatttttatttttctttttgtatattggaataataattcagttcatttcatatagtctaccattatatatgtcaataaatttagtagattctatttgttagaacaacattttatttttttttcaatacatagtaaactataatcaaacatacgccaataaacttgttagtctatttttcatatattgtaaaaacaatttattttttatttcaaacacaatgtgtgcctatacaataacaaactaattagtctatgattgatatcatgagtaatctaatggttttttatattctagaaatagcaaaaaaaaaaaaaaaatcacattttgaaatgttcattaataatatattttttaagctaaagcgagtaatgatgtgtttataacaaaattatagttatgaaaaatatattttatgtaacattaaggtatcatattgtaactttaaaataattaatttataacttaaatgtctataaatttagttaaaatgttatgtgaatttttttttttacttgtaatttattagttttttttaaatagttttgaaatatgtaaaaaaaaaataacgtagttactaatgataccaataaagattgatatggaaaaacaaggaatttgctaccactgctactctctaggagttcttcctactcgtaggaattgcaagattgcttgagcgcaagtcttgattggagtttacagaaaattgctagacactgtcttcttcttttttcatcactttctgttgactcatggtggacaacagtttgagccatttattcgaggatgctgttcaggtttctaccactgctctaacatgcagattggaccctggcgaagtggataattaggagccccaaggaaaagttttactggggaagcttatttgcaaaggaaagcttagccgcaatgttattgcaagcactccgaagagagcttgggcatcctttaagggatggagttggcgtgaggacaacgagggaatcattcacttctcttctgcgactaaagaggatgcttggaatgtgctacaatgacgcccttggttaatctgtggtgtgcttcttgttataatgtcgtggccttcatggtttgccccttccgaaataaagtttgacaaattgcctgtatgggtaaggttgagtggaatcccccctttctattggaataaaacgaacttagaggagctcgctataaaagtctccccaaactataaactaccacggtatattgactttgagagaggctcattcggtatgggaacggtccgcttcagggctaccgtggacgtcgacaaacccctattctctggttttttcctgaaaagagaagccatcaaagatctttggctccaatacaagtatgaaaagcttccaaagctctgcctaaaatgcgggataatgtcacatgaacagaaatactgttttaagccaccaacaatcaccaaagaccccaaaggaaacttctttcccttgtttgggagttggatgaaacatgaagagtcagccagatgg

SEQ ID NO: 87903 - DNA, 504 bp, Cannabis sativa
atattctatacttgttttgtttatcctttactctctgtgtaatgaccacatagttaaatcatgtgtattagtagataattacggaatttaattaatattttatgattatgtgcttcttattagaaattaggtcttattgtcagaattaggttttatgaaaatattttcttaattatggagatatatttgaattttaagtgtattacatgtgttacatataaaaatttatgcttttcatattttatgcttgataagagtgtaatgtgacgttttggctattagagtcacttagatatagtgaagtatcttagaattagcggggcaagatagttagacatttaatttttttttttttttataattttgtatgttataattatttaggaccacatgtaaatttttttaaaaaatatgaacggtttacagtgtcaaaaataagattcaaaccaatacttatcgcatttataagaaaaaatagtcccgagtataacaaaatatttaaat

SEQ ID NO: 87904 - DNA, 743 bp, Cannabis sativa
ttatattattattattataagtttttttaaatatataaataaaaatttaatgaagggtggctttatatggttttgtaagcttataattcatgttaattaataatcctatgaaataatggactcttctcacgtgatagccttaaattgtagagaagactttgttattattattatttgaatgaagaaaaaaaaaactttaactaaatgataatagtgtcagttatataatagtgtcattgtctcttgagaaccattataattttgttagattttgtgtgtagtttctctaaataaaaagatctctaatcgagtttttaggaaagctagtagtcactgaaaaggatttctagaagactagcttgtccatctggaagaagtcttgtaaaaagctagttgtcctccaaaaaggagttccagaagactagttgttcctctagaaaaagattctggataatttgttccagtaggctttgtgcctattcaggacgtttttccaaattgcgcttcatcagtttgggacgtctatcttggaagcgcgatacatgtccagagagagctcgatgccaagagctgacttggagatctcatagtaaggaaccagttaagtgggttaagtcttaacagaattaattacttagttatttgaagatactgtctttgggattcatgtaatcgatctataaatacaaccattctcttaatttgagacaatgcgaaataccagaagtagagtacgcaagttc

SEQ ID NO: 87905 - DNA, 830 bp, Cannabis sativa
gaggaaagagatgatgaaaagaagcagaataaactgaaagaaaaaaaaaagggatggagattgttgtttattaactttttaattttttttttaaataaaagaaaaggattgaaaaatataattcatgtgacaaaaccaatcaaattaatatttattatatatttttttaaaaaaaaagattaaacaagcccttaaaatacaatataacataatcttttagtacattatacagtatatatagtataaaaagatataatatttttgtaaaaaatatcgtgctatatagtaaactcaaaaaaaattataaaaaaagtcggtgtatagtgttagaacaacttcaataattttttaagaaattacatcgtatactcacttttattttacttattttaatttttatctctatttttatattctttaaaatataaccacttttatagatgataaatcttcattagatttcttaagttaattaatgtaaattatatgctaaatttaattgcgtaactcactcttaaaaataaatatattttaataaaatataatatgaatgtacttatttttaattaatgaatatattaaaaaaaaaagtatttttcaaacctatcccatattgttgtaggatccaacttggcacgtttgtgagaattaaatatacctttaaaatgaatcttatactttcacttttcaaatattgttccccttttgaaccaacttcttatatattcatcttatttatgtttcggataatttctttctattaatatatagaccaattaatattacttaattaactattgctattaaggatcagtttaacctattacctt

SEQ ID NO: 87906 - DNA, 501 bp, Cannabis sativa
gaagtacatacacaattcaattcactattttctacatgatatctttagctttttgccttttaatgaaatgctccttcaataaaagaaattatattttctaaagtattttaatttgtatcttttatttatttaaataattaatattatattatttccatactcacaataattatattaagattgtaaaaatataaactatccgtatgaacactataaaaaaaatctatttttttgaataaaacatatgattaaaaataaaaaattaattgtaactaattataaattgtcatttttacgttgtgactaaaacgtttatggctaaaagtattagtcataaaaattacaatttgttgtggctatttgagtttttagttgtttataaaaaaaaaatgagtttttagtcacaatacttattttgactataactaaattagtgacaaattatatctactatgtttaatcacaaataatattttggttgtgactaaaagttacatttag

SEQ ID NO: 87907 - DNA, 1122 bp, Cannabis sativa
cattgtttatatttagtgggtaaactacccaatgtttacaaaatagtaatttcgtctcattccgttttaaaaatactgttagtcaatttaggtggacatgtgtaaggctaagatcacactattttattttatttctttttctctttaaaataaatataattaattatatttattcattttatataagttaaatcttaaaactaagtaaagcataacaatgaagatgaaaacccatctgtgaactaacaagagaggagacgaagaacttgtgaagaatatattttcaaagatccaatggtagtagaaggatatgaccaggggtgggtatatgatgaaaagtgaatgatcattctattcttctagctctaatccaattggaggaaggtctggtggggtatcaaggaaggggtagagggagagggaggtttgatggtataacttgtgattgtgggttagtgtcagaaaatttcttggaccgtaaaaaattctggctgaaggttcaaaatatactttagaatgagagtaagcgtttttaaatttgtattcttagttatgataattataaatgaattgtagtgctgttttttgcactatagacagatggagggtgagtgaattttttgggtgtatttgtaaacttctgaaatcggaaaggaattgattccaaattggttgagaagaatgaaggtgactagaggcatgaaaatttagtattcactgtgggtaaaaaaattgggtgatatgaaatttggacaataatttcatatgctaatccaaatatattttcttacttgatatctgttggatgaaattattttttattgtattaatgtgtggttttaatagtttggctattgaagtagtgttggtttggtgtaatttgaatgaaaaattaacttatattattgtgatttagttgctgaagttttgcaatttggctacaatatttatgtgacaattaaaaggaaatgaaactagtattttcattgttgcaattttcataatataatttgccaacccatcaatgaaacaagtttttttttatttcaacaacatatttaacaaggtgatgaaacaaagaaagaatctttcatctttattgaacaagtaatctttattaag

SEQ ID NO: 87908 - DNA, 898 bp, Cannabis sativa
  modified_base (204)..(205): a, c, t, g, unknown or other
aaatactatacttcctctccaagctcatagtaatataaatagtgatgcatgttcactggacaaagggttgaaaacattctagtcgggagatcttacttaaagagaaattatctaagaattcatgttcagagaaattgttgtaagagctataagaaaagaaatctttctccttgttcttaagttaatacaaataacgaggattannctattaccgaactgctcggggctgaatctctataaaattcctgtgtcttttatattactttatcatatactagtcgttataaactacttgtcgcttactaaatcagactcactgtcgttggctaaaagcgaggtcaacactagcaaagtaccttcttcatagaaaacttctcttccaaatgagcacattagactcgtttatatagtgtttaggtgatcacacttagaattcaaacacgccatctcatttctctcatataatgagcattaatgtaattgtaacaactatatttcataatatttgaatcttatcatcaattctgtgtaacatctcttttattacacaacaaataatcaaccaaaagaagtaacaaaataaattaattttgtaacttctctccatgttacaaagtgtaggttacaattttaagttaaagaaatcatatgttacacaatttatttaccaaacacttaatatatattattcacataataatatatattacaacattttaatctacatatattatattaaataatataataatctcccactagattaaaatgtgtgacatacttgtaacatttatttaatctgtcaaaatataacattctcccactttgattgaataaatacacactttcaaagaaatcttgcttaggtgcatttggtaaaatgtctttcgacttgaat

SEQ ID NO: 87909 - DNA, 939 bp, Cannabis sativa
aaacccttatagggagaataaggtgaatcaaaccttacgaggaagagcaaggtccaacagcaatcacgataggagtgacctacgagagcatctaaaatcgaagaagcctgatcttcatcaatgacttggtccaaaataaaaggattcactccatttgcgaatggacgagttggaaaataagtttagaaagcatcaagctaggaaacccagaagacaaccgaggtatgattctgttggagaatttgaattgaaagccttaggatcaaagagaaaggatgattcgaaaaggttacccaaggataagaaacacaacaaatatatccctctatatgctaaatatactgagcttaatgaaactcaggaaaatatctacctcgcacatgtacgagaagtcgtttttaccgagccaaagcctatgaaacatgcgaggcgtaaaagggactcaactagacggtgtgaatatcatgaggatattggtcataccacggaagagtgttgtcagctgaaagatgagatagaaggtctcatagcgcgaggacgctttcaaccatatgtaaaggggcaagacaatgtccatgatcagcttgatctacccaataactcaagcgactagggactataaccctcctctttaagaggaagggacaccccggttatctcgagagggagcgagtcacaagtatacaaggggcagttgatctggtaaaacaattttgtaaaaaaattgcgatgtgagtagatattggcccactatggttgccatatcaaactaccacgtggaaagctggtcgtcaaccagtagcagtcaaagacaaacaactaaaacttggattacgtcacttggaaccccaggatatgtaacggattgaccctggatattgaaataattgtgggagtatgttagggattgaccctgaacatcaaaacctgttttatcaa

SEQ ID NO: 87910 - DNA, 719 bp, Cannabis sativa
ggaacaactgctcggcgaattatacgctcctaaatcacatcgataacaacacacataagtgacttgctaaatcacaaccgggactaaggtttaaaaccaaaacactatctattgtaactcaatatggtaataccctaaactagcagggagtcaaccaactagaaacctgaaactcacacgaaacgacaagctgaaattcgggttttccctgctgcaaattcgggtaatcggttttacaagcattgtaaaaccggttagccggttttacccagaaaaccaacaaactttcaaaccctaaccaaatcgtttccaaactcaatcaagctttccagacctgcatattataccccaataaactattttcaagcaacaaaacaacaatcaaagcttagaattgaatttcaccattaaagctccaagtttgagttctaaaactcaaaacttgtttaaatcttcaaacaaccattaattcaagtttaaatcaacatagtaaatcatattttgactacagaaacataaatcaaacatcaacagcaactatagaactcaatctctcaaaacatgcataatttcataacttaaaattcaagaaccaaaggaaagttgtctagaagcttaccttagcttgaattcacttagagaagttataaattgacaagatttgaagaacaattccagaaccctagctggtctagggatttcgagagagagagagagag

SEQ ID NO: 87911 - DNA, 557 bp, Cannabis sativa
tatttgtatgtggactgtataaatatttaatgggtcggcccatagtatttttgtaattttttttttcttttttgtatttttctgttttttccctttaaacaatatagtgcacgtgtgattattttatcttatacacaagcgtatgaaatagactatttaaatactgctttctaagttataaattattctaaatttttcaaaattatataatataaccctcatgtttttacttttcaagatactacattttttttcctaaaatacttctatgcgcgcatgcccagaatagaaccaccaaaagaaaattaaacacctaatcacatgtcttcattagggtgtccacccaatcatccctttaagggtttttaccatagaatagatatatatttcctatattatatatattattcacccatgtatgctttttatcaagaatgtcggtttcgaacgtcgtatcgtattagatcgtattgtattgtactgtattgtattgtattatattgaatttgattatatattatatttttatatagtactatattaaactttaatttata

SEQ ID NO: 87912 - DNA, 664 bp, Cannabis sativa
ggtgttggaggtggcttggcacctcatggttttgtcggtgtcatgtggtccgtaattgtaggattgtggtccccggttgtaggagcgtaatccccaattaaagatgtatgatccttacttgcagattgcgtaagagtggttacaacaaactctttgtcgggtccataaaccttgcaggttagttattgccactactcatacctccttactcttagatgtttcagatggcaaggttgtacaattttcccttgtactacttgtcccgtgattcctagcctaacgtcatccttgtcaatatgaattcacctctcaccttatacatacaacccccgaaacatattcacgcaaaacacataacggctcgcatgcgagagcccttacaggctcgcatcttaacacctaatgtacagacacatggctcacacgtgaccccccatacactccataaacacacgaaaccccttccccacacacatacgactcgcatgcaaacccccatacactagcacacacactactcgtaacccccccacacacacacgattgccatacgagcccccatgctcacacacacacacgttacccccatacacgcacacatgactcgcatgttagccgcctatgagattgcattcgagccccccacacacctacaccatttaca

SEQ ID NO: 87913 - DNA, 2211 bp, Cannabis sativa
tttataatttagggttttctatattaaagcactttatgaatatgtttagatctgtgatttatatatttcttaagtgttttataaatccctaacatcatattcaaacattaagattaatactcttattttgttatatcgatactggtgcaattcagtgttggatttcatttactttatagtttaataatattatagaaaattactaatcatttataagaccccacatgctagactctattgtgcctaatagcaatacacaaacatactagtattatactattaggcaccttcaaaatatatcaatgtgacgcgttgtggtgcttgacacattaaagtgcatattctctgtaaatatattatatgagttgatgttttgaacaaaccttagcaacagtgtttcgagctttgttccaatttatttgatgataagggtctgtatagagttcttgccttaatgattgaaccaacccagtgattggtccaacaaatctttttccatataagaatgacataggcatgtacaccaaccgagctaacgcgcccattttccctacaaaagtagaaatactaaagctttattaatttcaaccacattattaattagttttattttgaaaacaaaaaaaaatatattatataatatagtagaatataacattaaaaaagaaaaaaataaaaacgcttcaaagattttaatatgacgtaattaattaattaagaggtaattattcttatttacaggtacacttacttaatattaaacttagaatacaagtgtttattgtgtgaaatccaggctgaattcgtggaacatacttgaattgttattacaagacttatttacaggagattaaaaagtggcttggttggagatgcatgggctcagatttgaacactattctgagatggattgatatagagcgaaaatttctaaatttcgaaggcaagtttatgcagtttttatagttgattcataaaaaatatatattaaactttgaagttatttttatttataaatattagtctaaattgaacttaatttatttctataataaattagagattattcgtgaattaataaatttttattgttggacctggatgaaggaaaaacgctctaggcaatagccagagttctgggggaagtggattgcatcctgaccattcaaacacaccaagcacctaatatataattaaaataagaaaccaaattaataaattaattaagagtttttaaatcctaattatttcttaattaaaaaggaaaatatatattttatgataatattatattgttcgtaccgatagccaaaattttccccaagatgggatgccaacagcaccgccatgatcaagaatccattttcttcctttagcaatagaattttcctcaccatcattgggaccttctcccaacaaccttaaagaaacatagttttctacagagccaaacatagtgctagggccttctatatgttgtccccaacctccatcttcattctaatacataatatataattaattaactaataacatatatatgaagaaaaaaaagaatgaacggatatatgaaccaacaatgtttaggcactactgatactttatagcaatactcgtaaaaaaataattatacctggtgattatatatgtagcgaataatttccttcttgtgttctggtccaagaacagtattaagtgatccagtaatatataatactattacctgtaattaattaattagttttagcacttaattaattaggtcttaccaatactatggaaattaaggttactttataataatgtttacatattataattataacaaatattctattaatttttgaaaatttttatacaatttatggtatcaaaaacaacttttaattaaacacagtttgttgaacacaaacaaactattttgaactctatttttaatactgtaaaactattgagacttatttaaaaatataggatgtatgtaaagtatacattatataaattgttacataaaaattgactaaaattcctccacatgctgaaaagattcgggccctaataaaaaaattggatgtagtttccaaaaatacctcaaaatcagagatgtttgaaccgaaagtataatatatatctttatatattaaaagtgcctaacagaatatacgttaaaaataaaagaatattctgttaaatttaacgatgttaataggt

SEQ ID NO: 87914 - DNA, 718 bp, Cannabis sativa
agcaggctcttacaaaattaatgttgatgctgcgtatgatgtggaaggatcaatcattggtataggagctattgttagagaatatgctagagatgtaattgcagctttctcaacacctttaaggggttgttattctactaaagagatggaagctaatgccattgtctacagtttaaaatgggctctttcaaaccagttggctatccactatgtcagaacagattcacttctcgtgactaatgcaattaacaaagtttcttcaaatgcatgtgtatctcatttccatgatttgataaatgatatttctcttttgttatccttctttcctagaataaaactactcatggcttagctagatttgctcttcgattggataatgattgtatttggttggggaaaattcgttctccaatctactctgttgttgtttttgattctattcaatgataatgacagtattctacaaaaaatatatatataataataataaaaaaaaaagtaacgtaaattacttatttatgatatatatacataatactgataataatatgaaaaaaaaaaattatgtaaatttaaggactaagttatgtatacatataatatttaagtaataataataattatattatatgatataattagtagaagaattgtactaatttgaattaaaataattttttttcttagagtttttcggtaacggcgccaaaaatttgtt

SEQ ID NO: 87915 - DNA, 852 bp, Cannabis sativa
ttacttcagtcattgtttaaaagaaataatggtagaagaggatttatggcacttaagcttgacatgataaagcatatgactgggtggatgggggttcttagccagtacgatgtgacaatttagctttattgagggttagattagggttatcatgcattgtttgatgaccacatagtataatttcttaatcaacagtcttcctaaaggtcgagtggtaccgacaagaggattacgatagggatatcctttatctccttatttgttactcttctgtgagaaatcattttctttgttgatctctcttgtagaagcaagacctgaacagatggggtttaggtattcttgatcaggccacttgtaactcacttgtttttttgcaaatgatagtcttgtgttttgtagggttaatcgaggtgatactgaaactattaagcatatccttctaatttatgaggctacctctagtcagaagattaactttgagaagtttgttatcgcctttagtctgactgtgaaccaagaagatcgagacagggttttacaagtattggtgttgatatttgtaactacccatagtaagtatttaggcttgcctacggtgactggtagaaacagaaagtggatgttcgaggggatctgtgagaaggtcaggaagcgtgttcaagggtggaagcgaagtttcatttctactattgagagagaggtacttataaaatctattcttcaagctattcaaacttatttgatgagtgtttttaagcttcctattgcaactgttggaaattattttactaggatattagatctactcacaagtatgttgattaataccctaaatatgaacttctaaaa

SEQ ID NO: 87916 - DNA, 936 bp, Cannabis sativa
  modified_base (79)..(82): a, c, t, g, unknown or other
  modified_base (452)..(464): a, c, t, g, unknown or other
agtagatggtgcatcaatacatccattttaagggggtgcattgtagaatcaccctgttgtttattattattattattannnntattattattattatatatatatctttttgaaaaattttataatgtaccccctttaaagggatacaccgatacatctctatctattttagtaactaaaataatttttagtcaaatttattttataatgtaccccctttaaagggatacaccgatacatctctatctattttagtatctaaaataattttttagtcaaattttttctcatggtcatgtaaattatagttatttaaggcatcctgcaaaattttaagaaattcagaaaagtttaacacgccgaaaattgtgttcaagcaatgtgttgcatacgtggctattttattttaatagcgtgtaaaatagattggttgaacattgttttctatattnnnnnnnnnnnnnaatttctcaaaattttgtaggacatattaaatagctataacgtacatgaatacgaaaaaaaattagactaaaaattttttttagatgccgaaacaagtaagaatgtatcagtacatcccttttaaaaaaggggtgtatgtgaaatcaccctataatttatattaatgatacttctatgatgcaccatattttgatgtacataaatactaatagatccaatgatataacactttcctatattcacttaatatatatatatagaaaagtgatttagtgattaaactaaatatataataatcatcataattacatttattttgaatagttagattattataaaatgcttacattttatttataaattaattaaaaataattaataaattacttgtaacctcattgtaacttatattattttatttccttataaatttttttgataaaaaataaaaatatttataaatattaaaat

SEQ ID NO: 87917 - DNA, 2988 bp, Cannabis sativa
aaaaagtgcggattggatcggatggacacccctaaattgctaaccactttggtcaacagaaaagtccatattacatttttggtgcaagtcactttgatgccacgagaatgctcaacaaaaaaaattccacattacatgttttataaattggaatatgatcacatattgtttccaaaattattagtgataataaagaaggatatttaacatgttgtttcttcttcttgttgtgttgcttttaactatactttttcttgttaaaaacaagatcaaagccaataatgaaaacaagccaaaacttcctcctactcctccaaaacttccaatcataggtaacttacaccaacttggttcactgacccatcaatctctatggaaactctcaaaaacttatggccatattatgggccttcagttggggaaagtaccagccatagttatctcttcagctaaagctgcagaagatgtcttgaaaatcaatgatttggcttgctgtgatagaccatctttaactggccctgcaaaacttgcttacaacaacatagacataactttctcaccttatggtgagtattggaggcagataaggaaactatgtgttctaaagcttttcagtagcaagagtgttcaatcctttgatttcattagagatgatgaaattcattctcttaatgattttctccgcgaatcatcggtttcagccactcctgttaatctcagtgtcaagatggctactcttatggcaagcaacactttcaggacagcctttgggaagagattttccgagtgtggactcgaaagcgaagtgtttgaacaaatgattcatcgagcaatggatgtggttggaacctttgcagcctctgatatgtttcctcgcatgggttggattattgataggctgactggtgttcatgccaaatttgagaggagctttcgtgaaatggatgatttctttgaaattgttattgctgagcatctaaataggacccctgaaaaagggaaggaagatcttgttgatttgttgctaagcatagagagaggtgaatatgattccacttccaccacacaaattaatttcactagagattgtactaaggcagtcatcatggtaagatacataacctttgtcattttcttaaacttcaataggtgttgagctaataagttcatgttgtttcatgttatgtgttttaggatatatttactgcaggagtggacacaggtgcaatcacagtaacttgggcaatgtcagagctagctaaaaacccaagagtaatgaagaaggtccaacatgaaatcagaagttattgtttgaagaaaaacaaattcaagatcactgaaagtgatattaaccaacttgattatctcaaaatggttgtgaaagagactctgaggttacaccctgcagcaccaattttactaagagaaagcatatctgaattcaaggttggtgagtatcaagtttctccaaaaacagtcatccaagttaatgtttgggcaataggaagggatcctaattactggaaaaactcagaagagttcatcccagaaaggtttattgatagctgtgttgatttcaaaggacaaaactttgagtacttgccatttggagcaggtcgaagaggttgtccggggatgattatgggactgactatggtggagctcacactagctaatctcttgtgctactttgactggaaattgccaattgggatgaaagagtcagatattgacatggaggagggatctggaattacagtcttcaaaaaatctcctcttaaacttgttccagttagctatgaatggccatcagaggttcaaacatagataatatagttttatatatatttgtatcagaataaatatggccacatgttttggttgtatggtcttatatttgaaaataataattatagagtttgcttgctctgcaagagctgattgtgattggtcctcagttttgtattttctttctatcaataaaaattttcttacccatgcttcggcccgtgtctagaggtcacattttttggagcctaaaataaaaaaaataaaaaaaaaattattaagtttttatttaaataaaattaaatatattgtaaataataaatattcatgacactcattatacaatgtcatgagttcaaatctcatgacactcatttttaatattttatatatctatatatttaaaagtgagagtccaaaaatttaattcgactttaggtaagaaacaagcatgtataatattgggataatttaaaaaaaaaaaacataaaaataacaaaaacaattatgtacagaattttatatatttttacggtttttaagattttatttacataaaatatgatttttttgatatatttttaagttgtatacttgtatttttgttattttattgttaatttttttgttgtttgtacattatttttaatgttgttttaatattgtttttctattacatttgtgtaattttttttgtgtttttatagaatactataaaaatgtaataataataaaaaaaaactttaaacgtgtaaatatttaataaaaaaataatttatataatttttcgttggtttggctgtgattttacttttagctaaccaaaaagtataagaagttttgaattattttaactgcaataactattatatagttttgtttactataattgtgcatttataaattgttttctaagttgcattatttctaatagcaaatagtatatgataaagatgtcagtttttgtttttgtaagggaacacgtcacatgcttagcttagctatctcacaaagttaaccaaacaaacaaatgagatttttactaaaaaaaaaaaagagaaatttacacctaccaacgaaattgttaaaagaatatcacaactaacgttgatgtttttaattgtgtaatatatctttagttttgcaatttttttgacaggtatatgcgtaggtgcgttgctccttttttttttttttttt

SEQ ID NO: 87918 - DNA, 600 bp, Cannabis sativa
  modified_base (457)..(457): a, c, t, g, unknown or other
taatataattgttatataaattccaaacaaaaatttacaaacattcaaaattggataaaagtaaatcttggttttagtaattaactttaaatattttcgtcaaaatttaaaattaaatatttaaatactataaacaataattgttgtaatattcaaccattacactttttttttccttttcttttgattaaatgatattaattgttatataaatcctaaataaaagtttacaaaaatctaaaatcaccatcttttctacttgggtaaatgtaaattttaatagtggtataatgatatttgtagatgtagtcaatcgaaattgattattgtgtgctgatttcttgaaactcttcaagtttagcatttttattataattttgcttataaggtaagtttttttttttaataagaaattttatcttatttttatacacaagaaaataataataataataanaataataataaataaataaaaactttatttgaaggactagcctttttttccaaatgattttgagaaacctagttttttttcccttttagatagtttcctttacacaatatatataatactcaatttcttcttcttctttttat

SEQ ID NO: 87919 - DNA, 611 bp, Cannabis sativa
accccaccaccattcattagtggcaagttgattggatatgaaataagttgtggcccacacaaaagtaagattggcttacaattgcatattaatgtttttccacatatgataatgatataattcgagaaaggttaattccaattgttctaaaaacaaatccaatgcttccaaaattgcataattacttatcgaccttcaagtataacctttttttttttttgtaaaaaaaaaaacgatggatcaataaatttttatctatttcatcctactgcaaaaagaaacaataataataataaaaatccatatatatatatttccgtcaaatcctttatgtataaatatacattcagttatatattacgtgatttataaattatccttatttttccaaaatattctttaacttactcttaataatatatattaatttaattaagttacctgtttgaattagtctttttttttgtcccatcaattttatttgtattaacaactgttttttctttaattttttttttttacatggggatctacctactactaccagtagttaattatgtttttgtcccagacctaaatttttaggtgtcgtttgataacacttttgtttt

SEQ ID NO: 87920 - DNA, 703 bp, Cannabis sativa
atacaagccttatgggaagcatttaaacatgagttttatggttgtaaacaatgcttcaattcagcttatgcttcaattttaaatttttttacatatgttagttgtttgttgtcataggttttatagttgtaacaaggctgtaattttttttacatagtatggttgttgttgtcctcatttggcaggtaaaaataatgcagagactaatgtgtatctggtgctaccagatccacaattagcattggaatggaaggaggatgctgaagttgtgaagatgcaaaaaccatagcaatcttcaaaactagagaagtgtaagattgaggagtttcctgaagggtgtactcttgttcctgatgttgttgtcaatgtggataataaattttacaatttctttctcaagtggggtaagtttatggctgtagttacaatagaagaggtgatgatattatttcctcatctgatttagaggttgcaacacaatttctcccagaaaagtgaggattcaaatgaggttgaagaggaccttgattatttcattcctccaaagatggaggattacatggcttgggcagagaatttgtttggatatgaagacaatgacatccattatgcatctgatctcacaaatgagcatatagagtgttcaatataattaagagtacaattctgaatctatagtggcgcaaggaggaattaataagtt

SEQ ID NO: 87921 - DNA, 581 bp, Cannabis sativa
  modified_base (553)..(554): a, c, t, g, unknown or other
gaataatagaataaaatactttttcttttttagaataattatatatttttagttttagttttttaatcattaaagtaaaaaagaagggtgagatgtatttaatttatatttaattatcaattatcagttattgtgtcactcatttcaataaaattgaataaaatataaaaaaaggatcatatattaatgtaaaatttatatttcgataggtattattaacaaatcgtatattacaggagacacaacttggtagtgtaaaacgtttaggagcaaatatactcgttatgctataattagatcataaattagttattattgatattaatgtaaatagtataaaatgtagatcttttaaacaaaatatatttatttggtgtgagttattggattttttagaccatttctaatggatgatgtaaattttgtgttaaatttagctcaaaaaataatatttatataataattatctaaacattaaaaaaaagttaaaatttatatttattttatacttttagggctcgtttagaacgacgtattaggtcgtattgtattnnattatattgaattgtattttatgcaat

SEQ ID NO: 87922 - DNA, 702 bp, Cannabis sativa
  modified_base (661)..(672): a, c, t, g, unknown or other
ccaaaactcaaattaataaaataaatatgattgtatacatacatatgaatatgtattatgtaatacaagataattctatgatacacacactgcactctgcacacctccaaaaatgttgaactataactacttcagttcagtacaataaataggaaagtggtatatgacaccccttcttactgggtgcactttagaatatttctatgcacttaaaataggtactcaaatattaggtacagtaatatgtactgcattttttttaaaaaaatatagaatgattttaaataaatataaattagctgaaaatatcactatgtgagtaggtataataatattttgagtgcatagtttgttttggcatttttcagaatagaagatgactattgagtattgacacctcaagtctacttattataatggaccccacaacctcgataacatccacgtggaactacgactgaacacaattcccatgatttggatacattattgcacatggtaattgatattgcactaaaatttccaaagatgaagtgtaggatggatagtgagtctgaaaggatgaagaatgaaggagaggatagtatctctcttttgtcttgtttgataattaggagtaaagatgaagttggttattaaaattagggtaaatactattttnnnnnnnnnnnnttgcaaaagttacagattggaccctgtgtt

SEQ ID NO: 87923 - DNA, 635 bp, Cannabis sativa
tgttgttgattccataacacctcattccttgctttccacacataatacaccaaacttgcaagtacagtcttcaccatactcttcctagctgctgagaatttttttcgtgttgtggcaagcttgaagtagctgctgaatgttgtttgttggtgtgttccattgcaggaactttttcatttcttgaaggcagctctggctataatcacactcaaaaaaaacaagtgtgtaatagtttcctcttctttgttgcatagtaagcactttgtatccatggtgtgcatgaacttgcttagtctctcttttgtattcatcctttcccaaaacaccagccaaagaataaacctatgctttggaacaataattctatcccaaactaggttactccaagatagtttttcatattcagcaaatagcagatgatatccttgctgtatgttatatttctgcataacaaaacctgttagtgaaatcatttgctaaaatttactcttgacaaccactatttttttccatgcccagctacaatccaatggagcaacatagctccaccaatcttgctccttgatatacacattgtgtatccatttgacaaaaagacaatcttttttactagctatatcccacacatacctccc

SEQ ID NO: 87924 - DNA, 1211 bp, Cannabis sativa
  modified_base (87)..(89): a, c, t, g, unknown or other
  modified_base (420)..(420): a, c, t, g, unknown or other
aaacactaaccaaacataacttgtttttaaaaacttcaaaaaactattttttgttctcatttctaaaaataattttttgaaaacaannnacagaaaacaataccaaacatgcatttttttgttttcatttataaaagattaatctcccatagactcgagttgttgctaatttgactatagattgtgtatagagtaattaattaaaggaaattgctaaaacgtcattacttgaatttttttttaatggaaaattaaatcttattaaccatcaaattcggctaccaaactaggtagcaaatctaccggaacatcctccaggggaaaaatacgatcaggatagaatagggatgcttttgcaaaagcatgagcaaccttattcgttgatcgtttaacaaagaaaacagagacatttcttaactnagataaaagtttattacaatcattgataacacaaccaaacagagacaccatgtctagtgaacttctaagggcttgaacaacccccatacagtccgtctccactagaacttgctgccaatctcttagtttgatccaactaagagcttccttgactcctatagcttcggccaggaggggctccactttcccttgaaagtccttacaaacaccttcaattagaaggcctttgtcatctcgtgctacggctccaataccaaaaccttgttcatccccaaataaagcagcatctacattgatctttacactattagtaccaggtgtagaccagcactcagcattatcaccttccttaaacaaggagaccatgatgactccaaaaaggagttctgagcgtttctccattgataaagatttctatttgcagaagccacaatattatccaccaaaacagccttcttattccacaccagctcattacgagctccccacatcgcccaacacaccataactatcatacatcttttctcctcctcagccccttaaaaatagttgtgcaccattccaagaagctccccccatccacataggatgtcccaatgcccactctgttccagcattttttaaccacttgacaagtaattaaagtatgaacaatatagtctcttggtcaccattagggttgtacatcggtcggtttagtcggtttatactacatattttctaacccaatgtaaagatcggtttgtaaaattctgcatacaacctacccaatcaaaaaaaaaaaaaaatct

SEQ ID NO: 87925 - DNA, 1210 bp, Cannabis sativa
  modified_base (929)..(936): a, c, t, g, unknown or other
tgtttcttgttgaaattgtatgtggaggttgaacaccttggatatcgttcatcaagcttcgagagaagtctggttcgtgagacacttttcaggaggaaaagtacaaattagacactcttcaggagagattgcaagtgacttactcttcgggaggaagtgtgcaagtgctacaatttgaaaggagttcaagttctgggtacctcataaatttgatcagaagaatagattataataattgcggcaaattcaaagagagagtctgtatttgtataagtcaatttggttttgtaatcacttgagattcatctaataaattttattctctggacatggccccgtggactaggagcaattcaaaaggattgttgataccacatataaaatattgtgtgtcattttattttctgcagtatatttctgttttgtcagattttatatctgataaaatagaagtaaattttgttcaaacaattttactactgttccacattatttaaattgtttgataatttcacttggtaattataaaaacggaatttcaaacccaatatttatttttagtagcataagtacccgatgtttgtaaaaatataatttttctctagtttttgttaatacactctccattttgaacctactaaaagaacatttggaagtaacatactacatgtttttatctagacccaatgatatagaatctggactttatatgttcctttttaagacaacgacagagtttaagtagtaacaaaattagtgaaaaattagagttttacaaatattaggtatttatgccgctaaaaataaacatttaacataaaaaaaaaaaaaacaaccattagtctcaatagataagataaccttctttgggtgttgaatgaagtcaatatctgtccaataattcatcaatatttatatatatatatatnnnnnnnnttttttttaaaaaaaaaaagaacatttgaattaatattgtacgaaaaatatatttaaaataataaaaacacttgtaattaaaaaatcaaactttatataataagacaaaacatagaaagccatgtatagaaaaaataattcaacaagccatggatcaactaataatttcgttaaaggaaactgaaacccacaagatcaaaccccagaaactttataatgatgaaataaataagttcatgatcaacacacatatttatttagggaaacttacaaa

SEQ ID NO: 87926 - DNA, 1361 bp, Cannabis sativa
gaaaaacaactataaaatgtgacccaaaacttaagctaaaaatagcctaacacattcatggacgcatattctagaaataaccatatcaaaatgcacgtccctgataaaggacatacaagttttgtaaccaacatgggactttattgttataaactcatgccttttggtttcaaaaatgctggcgcaacatatctgcaactactgaatggaatgtttgaaaagaaaatcgaaagaaacatggatgtctatgtcaatgatatgttggtaaagtcgataaaatatgaagaccatacaaaagacctcgcagtatgctttaatgtactcggaaagaacaatttgaagctcaacccaaaaaagtcttctttcggagtttcttcaggaaaatttctgggtttcatagttaatgcgaggggcattgaagcaaatattgaaaagatcaaggctttaatagagattccatcacccacgaagccaaaaaaagtccaagccttcacaggaagaatggcagcataaacagatttatttcaaaatcaaccgataattgtctaccattctttaatgttttacgaggcaacaaaaaatttgaatggacagaagaatgcaaagaagcttttaaaggcataaataaacatttatcaacaccaccagtttttgtcaaactaataactggagagactttatacctttacttatatgtctcagaaagtgcaataagtgcagccttggtgcgagaagacagaaaacaccagcaacctatttactatgttagtataaggttacttggggtagagtcgagatatccccctcttgaaaaacttgccttgtgcataattaatgcatctcaaaaactacagccttatttccaagaacatcccataaaattcttgatggatcaataattaagacaaattttattaaaacctaatgcttcacgaagattgataaaatggtcaattgagctgggatagttcgatataacttatcacccaagaatatcaatcaaaattcaaccttttgctaatgtcctaattgaatggatagtctctgaagaagatccactcgtaaaacacaatacagaaactttgaaattatatgtggatggagcatcaaataaaaatggctcgagtgcaggagtgataatgatctcgccaagtaactttaaatttcactacgcattaagattccaattagacacttctaacaatgaggcggaatatgaagctttgtttgttggtttaagaatggctgaaacattaatgtaatcttatgtgctatagttactcacaattgactgtgaatcaagttctaggtgagtacttgttgggttttatgccctaaataaaactccaattcaatgtaat

SEQ ID NO: 87927 - DNA, 714 bp, Cannabis sativa
acccgacccgttgttggtgttggggtagagtttattaaaaatatattgtctttacacaatctattaatacatgtcaataccaaatatagtattgtatttaaaaattactaatgcaaaattaaagtggatataaaattataagttaatattaaaattctcaaaaaaaaaaaatagtcaggtcggatcagattcgatccgaataagtcgggtcggatctgaaatgatccgagtatctgatctagcgagacggggcgaggcagatccttacatgatctggatcaggtcggatcatagccggatcaaatccgacctgacccattgacactcctattggaaatttctcgagtagtaaagggttgttttgattgattttttagttagtttttggcatttaaaaaagacttggtcaattttttttacacgatctcgtatgttgtagttatttaggtttatttgtaaattttaagaaaattttgaatagtttacagtactaaaaattaggtttaaacaattacttacaatgcgtataagaaaaaataatcgtgagtgcaacaaaatatgtaaattttatgttcggcattgtaaattattcaaatatttttgaaaatttataagtgatcctaaataactataacatacacgattatgaaaaaaaaaattactaatttttttttttgtatgccgaaatagatagaagatttaccaaaacaccct

SEQ ID NO: 87928 - DNA, 1094 bp, Cannabis sativa
ctctttaccaacctcattctcttcatccatgacagtcttaatcgcttcaaagacactttctttagtaaacaacccttcttcttcacttttctccacttcaataccagccttcaatgtattcccaaatgtcctcgcattataaatttgatcacctatcatcggtatgagcacaagctcacatttggatttggctcccaatacctctaataaagatccccaaccacaatgtgtgacaaataaaccaatagaagggtggttcaagatttgtggttgctgaatccaacctccataaaccactccccttcctccaattcgctcctgaaatccatctggtaaagcttcctcaatggaatcagctcctgaaggtgttcttaaaacagccaaaaaaggcaacccagaaagctccaaacccaacaacaactcttggaattgagatttggacaaggtgacctcacttccaaaacaacagtatatgacagagttggggttgaattgacttagatagttaacccatttcttttctagaggttcacttggtgggtctggtataagtggtcccgaaagcaaaataggcttcttaaaatctttttcaaggaagtcaacaaacatgccatcaatttctctacaacccttgatccctataacatcacactctgcaagactcatatacaagcggtcaaataaatgaacaaccccactattactactaggcttgacacttaagtacatacgaagcgctcgagcctcatgaaaatggaggtgaattgatggatctggatagcctgggagaggtttcatcaagtcagtctcagtaatttttgattctctaagattgtggagagcagcaggggacacactgtgagctgttgcagcaggattcaccacagagtaatgcatcgattttatgcccaaggggcgagccaagttgggaacccaataagcaaaatcgtaaaggatgaaatggggtttaagttttcgtagaaggaattcgatttggttttgtgttttgtccatggcagtggtgatgagaggtattaaggaagaaggaacatcattagtagtctcagcctcagaaggaagaccttccacgtggg

SEQ ID NO: 87929 - DNA, 685 bp, Cannabis sativa
  modified_base (381)..(387): a, c, t, g, unknown or other
gtattgctatatggttctttcttagggtgaccataatttaactccattatatatcttgctaattgtaattgtattgtggattttattttatatgagattaatattattggtgcaatttatataattagttgaagaacctgtagtacatataccatttttttaaaaaaatgtttcatgacatttctcaatgtataaattatatttgttagcaattattaataataataataaagtcctagcaaccacaagaagtaataaatataaatttgtccacacaaaatattagacacattaattataacgtgataataattgatttgaaaatttaccacgtttggttcatattttgtgtgttcccaattaataataataataataatnnnnnnnataataataataataataaagcactagtaatatctaataccttctgaagagtactgggactattccagcacggtactcagcaatttgtaagaaagcaggctcagccaaatcaaagtgttcgcgaggaggattacaccaaccaccgttgtcgtttggcaaagccgaattcggggggcaaaagttggtggccgtcaccgtgatcacacccgaacgacaccatttagggtcatcattgcaacgcaattgataacacgcgccacaacttaatccactattgaaaagaaccgtgcttagcgcc

SEQ ID NO: 87930 - DNA, 659 bp, Cannabis sativa
ctaattcttaaatcattttggaccaccttgagttttgcaaaggttattaattggatttttcttttgttaaataataaaatagattatgtattttctaaaattgtacaaaatatgaccctgaactaattttttattaaaataaaatttaataataatccgtctaaatatgttatgcaaaagtatttacatttttttgtatctattcatgttaggaattgtcttcaagttggttatattaaaaaagaaagttattgaaaattaagcttagggtcctatttttaccattttgaaaaaacatgattcattttgtcatttaacaaaacagagagtccaatctataacttttgcaaaacacaaggtccaaaatagtatttacccttcttaaattaatacattttgtcaacttgaatttattatttcctattccaattttttttcaattatatcaattacaacttgagtcttagattaaatacaatatccaacacaacacattcggtaataatactagtataggaaagtatagaatttcaacaataaaaaagaataggaacataaatatcactattttagtagatcgtcatcactactatagagaacaaatacctgtgtaaacagacacgcatacacattgtatgttaatcttagttctactcgaa

SEQ ID NO: 87931 - DNA, 845 bp, Cannabis sativa
cttacccaagaactgtctgaaatggggtagacaatgcctagtcacttgaagtatgcttatttagaagatggagagaccttaccggtaattatttatgctatgttgggtgcccaaaaagaactcttgttagttgatgttttgaagaaatacaaaagagccattggttggaccatggcggacatcaagggtataagtccttcgatttgcatgcataagattctgttggaagattgttgcaaccattctgtgggagcagcaacaacgaccctaaaaacttgttgtgctaaaattagatatatgcaagtgcacgcagtcacgaacaagtaatacaatgataagtaacgagtatcgtctccacaaggactgtaaaaataaaatttctattgcaaaagttaattaccaagcaaattgcctaagaaccaaaatgaaatgattaatgaaccaactaaatgaataagaaaataagtaaattaactcaaaagtggatgcaagatgaaaataaaaaatgagttgtaagcttttgaaatgtgaaaggtttgaactattgaatccccctatgtttagcagaaactgtgcgttttgctgcagcaaaatgttagcaaatctttagcaaaaatctcaagttaataagaactctaaaaaagtgcacaaaactcttccaaattttatgcaatcaatccttggacctgttcaaacatattcctatgccaatcaagttcaagaataccattcacaagcacaactctcaagtgttacacaaggatataacatattcctatgttatctctaatctaatctaataagattaagattttgtgtcattcaagctaagtccattacattta

SEQ ID NO: 87932 - DNA, 841 bp, Cannabis sativa
aggtccaagtgtttgagtctgggtgggtctgggtttgggtctagtctgggtttgggtctgggtcgaaatctaagtctgggtctgtgtccgggttcatgtccaggtctgggtctgagtctgggttcaagtctaggtccaagcttgggtttaggtccaggttttggtctaggtccaggtttgggttcgggtcccagtccaggtctgggtccatctctagatccaagtctcagtctagatctgggtctcggtctaggtctgggtcctggtctaggtctgggtccctattgggatccagttccaggttgggtctaggtctaggttagggaccaggtttgggtcctggtcgtagtccaggtttgggtttgggtcttgttctagttctacgtccgggtcctagtctcgggcccggtctggttcaagtttcgattttgggtcccaagtttaggtttgggtccgggtctgagttggagtcctgattcgggtctgtgttcgagtctaggtgatgtcgttcaatttgttacactgcgatcgcgatagtaaacggggtatatgtcgtatctatagggaggtaaaatacactcaaaaggattatcagtaatttaacgagaatagaataagaaccttgaatgtgaatattgagaaaatgattttttttgaaaattaaacaagtaattaaaatgagaagtgatctgaaaatagttatggaagacacaagcttggtacatgcaattatattttcctaataaaattgattctttaaactcaactagaattcttcaccattaattgtagttggaaatgtgtataattacactcactagaaaaatatgttctttaatta

SEQ ID NO: 87933 - DNA, 832 bp, Cannabis sativa
aaaatatcttcatataatagttatttaaacggtaaaaataagtcaaaacttatacttattttatacttctaactataagcaaaagtaaaaatttagccaaacataatcattgtcttcttctgacttttattataaaaccattaatttccttttgattttgagaattcataagcttaattaatttatttgctatagtgtaatacttacatgagaatagtaactcatacttgttataagggtgaacttatacaagttctttcacaaaagttaattctaaatattccctttattaatcttaatacaatcaatttcttacaaataattttaaactaacatttcacaagatttatttactaaattcttgtgttcaataaactataaactgtgtaatttagttaatattaatcaaattaaatattcttatatacaaccaaataataaagttataagtttgcagacaattatactactctaatcaatgccattagttaacattattcaaactaaacattctcatttacaaccaaatataaagttacaagtatccatagaatcataatctaatcaataggattaattagtttaaatcctcaaaccaagtgcccctaacaaattttatcattttaaatgatgtcttttttaagctcttttctttcgaattttgctctgtatagaagtttagagagatacactataatttatgttgttcgtttgagcagatcgtaaacttactattcgtatcgtatcttttcttttcttaattaataaaatgtaactaatctctgtttgggttgggtgccagaattcatcataattaattactttatttgct

SEQ ID NO: 87934 - DNA, 872 bp, Cannabis sativa
aagtgtaacttgccctgccttatgttctcacactcggcatccaatagggcaatcccttatcacaagttgtactcacccatgataagataacctgaaataaacccataaaagcagccaaaaacatatcatgcagtgctatgctcacaccagcagcagaaaacctatcctataagtgttattctcacacaaacagtccttatcactatcaaatactaacaatactaacataaagcaacaatccaccaaagaataaaacatgtaaatataaacccgtaatacagttgtatgtttcaacatatactatgtgcacagatgtccactcttcttacctcagttgttgagaacacctttttgctacttcaagcacctcaatgaattttcttgttgagaacaagatcctaaacattcattaacacaacaatacattcaaaatacattcaagtatgaatctctgtactcatacagaaatctacgtaaaaatacgcaacacataagctaatttcacttgcatgccacaccatacataatcatttatcattttgattcacacaaacacatatgatgtactcaaacgaacatttttaacgtaaaacatgcactcatacaaatattttttacgtgaaattttactaaaatactatttattaacaaaatatacaattatgtaattatttaccaaaatcagaagctagcatatttcttaataatttatgcaaattataaaacatatttaatctatctagaaatacgtacaatttattatccatatatatgtactaatttactcttcaaactgtatataaaataccaattaattaaataaataaaataacaaaacatctcaacctagtcttaaatttatttcatagact

SEQ ID NO: 87935 - DNA, 654 bp, Cannabis sativa
ccacaagggaggcttttaatatatttcggggaggatcctgccgaagacaaaaggtctctttttcaaaaaaaaaaaataccttcaactccccatcccagtcccctctcggatgtatataatttggagaagaaatcaactaattcagatactatttcttcctccttgtcaagtgtctagccatccattctttcaattcttgagatagcgttccttgccttccttgcatttaataaattatggaacattcttgtgtttgcatccccttcttttgcccatttacatttcgatttcagccatagacttctttcttcgtcaactatatattgctaccactcccttttaagatttctcctctcctctgcaagagattgattccacaagttactcccctcttttttatccagctccactattctcctttctacagcatttttggccaccttgttatttctataagccgatttgctccattccttgatatttttttgcacttttttcagcttgcacataagtttaattcttggccagccattaacactagcatttttccaccaaccttcaaggagcttagagaaagagttgtgttccagccaaagattatcgaatcgaaacgggccaggccctcattttggaggattcgagtcaataacaatt

SEQ ID NO: 87936 - DNA, 544 bp, Cannabis sativa
tgttaaggaatcggttatggttgttagagttattagattagctgtcacattctgttatttctgtttgatcttaactaactctcttccatgctttgtatcatgtgtatatattctgtacttgattcccagtataatcaacaagacacttctttgtcttcttcatcttttctctatcttttctctctctgttctttgttgctctgtttcttttactttctttggttatgcttctcttcattctgcaacaatgtcaaggagatacaagtctcctaacatggtatcagagctagagtttccaccattaatggcgaatatggcaacctctggtcctggatcgaatgtaaatggtggaaatccgatcaatgcctcaaaccgaaatcaaaacagagcatcagatgagaacgctcctgttcattttaatcactcgatttccattaaacttaacgatcataacttccttctttggaaacaacaggtcttggcagccatacgaggaaatcgattgacgaaattcattcaagattcagctcctcctccacagttc

SEQ ID NO: 87937 - DNA, 613 bp, Cannabis sativa
  modified_base (121)..(122): a, c, t, g, unknown or other
tggaggcttgaagcggggacgttacagtttatagtgtcaaaaataagtttgaaattttttaaacacgagtggtaaacttgaatatcaggaacgatgtgtttcggtactgtaaactattcannatttttcaaaaatttataaagatattattgtaactataacgaatactgctataaaaaaattaaaaaaaaatatttggatatataatttcgggcgtgaaagttgattaagaaattttaattaataatgttttcaacttaatatttaaacacgataataataataataataatatatttaaacaatgtcattggatacctgaatggcttaaaggtataccacaacttaaaataagtaggaccaagaccaacactcattaggtgatctcattaaatatgtggtccattcaaattaataaaacaataataacattaacctctcttgaccacaaacaaacttgatatctttattataaaataaaaacaatataatatattaactatcaagaatttgtctgaatattaatgtaatcatatgattttggggattaatatattatcattttaagttgtcaataaattattagaactaactagtctagtggcgagagtta

SEQ ID NO: 87938 - DNA, 922 bp, Cannabis sativa
gagtatgtatctgggtcttccaagttctatgggtcgaaacaaaactgcggcattgggtttcttgaaagaaaatttgtgaaaatgccttcaatcgtggggttcaaaattcctttctcgggcgggcaaggagatccttattaaaacagtggcacaagcccttccgagttatgctttgagtgttttcttgctccctcttgagattgttcgagacatggagagtatgatggccaagtattggtggaaatcgtctaatcatccatcctcgggcatacattggctgtcttggaagcgtctttctgggcacaaagataatggcggtatgggattcaaaaatcttcgagattttaatctcgctcttttgggaaagcaaggatggcgacttttgattaatcctgattctcttgtgtcaaaggtgtttaaggctagatatttccctcagggatcgttccttactgcaactattggttcgaatccgagttatgtgtggaggagtatgttggaggctcaaacattggttaaaaaggggaccagatgggttgttggggatggtgaaagcataactattcttggcaaaccgtggctttcggatgtcgagaatcctatgataatctctactcatccgagcttgactagtgctaaagtgtgcaacttgatgaaaattgatggatcgagctgtgaagaggagatccttcaggatttgttgctagcccgtgatagattgttggtgcaatctatccctgtcttgtcttagccaactcatgattctctgaattggtcatttgatctttctggtttgtactcggttaagagtgcctataagattttgtagcaacttaatggtgagttcaggctggatacctcagttgaagacgggttttggaggaagctgtggcaactcaaaacccctccgaaaatgaagaat

SEQ ID NO: 87939 - DNA, 688 bp, Cannabis sativa
  modified_base (151)..(154): a, c, t, g, unknown or other
tggaccaggtatgggactagaaccaaaacttgggacagtagcagaacccaaacctaaacccaaactcagaccaaaacccataccgggacttggaccaggtccaggacctttgacttgggacctaaaccaagaccgggacctggacccagannnngacccagacccagacccagaccctgacccaaacccaaaaactagggtcgcacctaggacctaacaaccagactcagaccaacactgacagtgggacccaaactcgcacccgaaccaaaactaggatctagactcatacctggacttgagacttgaacccgaactgaaacacgtagtttgcccctgactgggacctaagacttaaacatagataggggacccagactggggaattgggcacacaaaccgggaccaaaacttgggccttaaaacttggatcgagatctgggacctaacccaagacccaaacctcgtccttggacccacctcagggcctacgatctgggactcgatgcttggacccgaccgtagtcagtttttggatctgggacatagaccaaaacctgaacccaaactggaactcaaaccaggacccgaacacataccgtgacctagacccacacttgtgaaccaaaactaaaacttgaactggaaccagattgggatctttgaacgggaccaagacttgaaccca

SEQ ID NO: 87940 - DNA, 599 bp, Cannabis sativa
agcacaaacaaacactcgaattttagttgtacccaattattaaccctctcccactttaataaatcagccaacaaagatacaaggatcatactccttcacatgggattgtaatgctctcaatgtccaggggttcccaattccttggacattccaactgatatatttattgctctcggcggccttgcattgcaaggttcaccgctctcttagaattagccagcaatgagaaattcgataattgataaataccaaccgtttgattgaaacccactatccccaccaccccatcagtagaaatatcattcccaaatacaaaaccagagttctgatcatataatacctttgcttattcctgtcataacagtagtattctttgattggcctcgagctctgttattgatggagatgttcttccttcgccccttaccctttgcacctcccctttgtttgtgtgaaaaataccactattgaacgtggtggtttccccttccaatccttcctctaaaattgcctttcctttatcaccatcgctggtcttccctaatcgtcgatctgtttcttccaccagctccttcgtaaaacattttctcttttctggg

SEQ ID NO: 87941 - DNA, 740 bp, Cannabis sativa
ttgtcaaaatattttttaattaatgtgcatttttattgagcatttaaattatttttattatattgattttgtgctttagttactcttttcttctaaggaaagattccttctctggtctctttttagtttaggaaacttctagcaagagaaggaattctaagattaaaatatttctttaattaaaatagtaagggtttgtatatgttattaaataaaaatatagattattaatataatagtattaaatatattaatgtggtgaataatataattctcttatatttaattacactaatatcttggaaaattctcctctaaggatattatagctacgtcgtggaacaagttttgaaagacccacttatcaaaaaaaaaaaatattaaactttatttagagcagatctcatgaaattcttccaacctcgattggactacagaaaaaaatgtactttctcattcattttgcccaatttcagtttagactctaatagccatactattttttggtgtcatggattcaacaaggtttagaagttattaaatatcaatatactatctaatgacattctattgtaattaattgttctcaaggctgctgaaattttatctcaatctgaatttgagatgttttgtgttgctacttggtatatttggggcgaatgatgttagatagtctttgaaaataaatctcattctcttgatgacatggtgttgagaatacattctttatttggggagta

SEQ ID NO: 87942 - DNA, 1124 bp, Cannabis sativa
agttagttcattgggtggtgcacgaggtatctttgaaaatctttggcatttgtcacatttcttaatgttggcctttgaatcttcaatcatgattggccagaaatatcattaccttagaattttctttgacaaactttgcccggctttgtggttgccacataatccgtcgtgtactttagaaaaaagtcttgctgcaaatgattaaaatatcattgtgaggatatataatattatattacagtgaggataatatgcatatctatttatagaataaataattatattattatattatattatataaatataatataattacattattttataatattattataaaatataatattatattttatacacgaataaaatatcattctttggaaaagggaaaccttccctcttgtatttagccctataaatagtgattcattctcactgtaatgggagtcgaaagaattacttcagagagatctaagagaaaacactcatagatttcattgtgagagctttgagagaggaaacactgtattctttgttctcgagtcaatacaattcaagaggagtaggctattatcgaactaaaggggccgaacctctttaaaatcttgtgttctttactgtttattggttcttaccttatcttaattacatttcttattgcttattaattgactcattgtcgttggctaaaagcaaggtcaacattaccgaaatctataatgatattagattgtttttcattgtcatcaaagaatataagaacgtatatatatatatatatgaatatgtatattcatctcttttattatatttcagtcatttatatgacatgtttgcataatcttcaggatatatgcaagattttatcgaagacacataatttttaagatatatgcataatttatatcatttttctctatcatattataagcacaaattatgtaaaatatattataaatattgtaaataataagaatataatatatatatatatgcatcaaatacttatatataaacatataagaataagaacaaatacttgcatatataatatataaatatatagataaaaaagaaaaaaaaataatttttatattgtttcagacagatgagtatat

SEQ ID NO: 87943 - DNA, 736 bp, Cannabis sativa
aaaattcatgcaataaaaaacttcacacacaaaaaagtatataattatacatatagtcatatatataaaaatatataatttatttatttgttataaacagtccggtccggtttaaccgttaactatctattatgaaccgcaatcgaaccaatatgcgataaacggtacggattaactggaccaccaaaaacgatttccccgattacggtatacaatgatttagattgtcgcggtacggatttaaaccgcagttttctagtttcgatgaacaaccctaaatataagagcattgctattagacgctactggtgtccatcaccttctataggtagtattttataattggttagcgatatttcctaaaaactattttcttaaattatatgaaacttaatacttaattacaccaataataatatgacaccgaaaatactaaacacaaataatattttttaacatttctcataatataaatacaaaataatactcattaataataaataaatagaaaaatgctaaagggcaccaatggtgctagcaccttcctatgtgttaatatcgctattagttcaactaagtatcgggcccacataatttaatataataactttaagagagtatcgctagccaatcgtaacgccacatgtcaagaaaaagctaaacactagtggtacctagtagcaatgctcaaataaatatggttacctttattattttaacttcagtttcccttttc

SEQ ID NO: 87944 - DNA, 777 bp, Cannabis sativa
  modified_base (36)..(51): a, c, t, g, unknown or other
aggcggtgtgggattgcacagcttacccggtatttnnnnnnnnnnnnnnnnggactactgactgtcacaatcctatatattgcagagaccctgaactcgtaaaatccaagctcccaataagatagatccaaaatttaacaaataattttataatttattaattcctcatgactccattatagactcagaattgtacttctaatttcattgaacactttatataccgaatatggaaacattgtaaattatcaattgtttatatcatatcgatcaatgatcctctatagacaatctataattaatagggactaaaattattgtttttaccttttaattatattttatcattcaaacacctatttgatttaatgatgtttcagtaaattgatataatcatttaaatgagctttctatcattaatggcttcaacttagctcaaagaaaactatcgttttacttataacatataaattagatatttatatttatgattaacattcttactcaattatgttgttgagttctcaatatgttagtatgagctagtccgtgtggcaagctggtaacgaacaagtcaaataactcaaataatataattagcttaaagcttaatcatgtcagaatttagattaaattgatatacgataaactaactgatattgactaagaatagatataacagtaagatctattcttaagtcatattagcctagtctgatataaatcaatatatttgatacaagtctattttgataatgtattgcaaaagacataaca

SEQ ID NO: 87945 - DNA, 648 bp, Cannabis sativa
ggagttttctttttccttagtttaattgttattgttggttgtgtttgattgtttaattagtttaattttattgttgtcaggttagttatgttctgttttggcttgcaattgagaaaaatagtgcatgtattttcagcttggtttagggtagcgctcgatgacgaaaaatatccagtttcctccatttgtgaagtgccttagtttgtgtgttgaaaatgctaattttaagtgttattcttgtctaaatgctagtctatgaggaatgctttcaacagttgtgtgcttgtgttatcccaccgtactttgagtttctagaatagctaacaccttgagagagtttaagcatctagaattggttagtgtaatccttgaggcgaaatcctagcgagctttataacttggaaatgatttaggccaattttttggacgattgagtctttcaagccaacccgagattatttaattgtcaatagtcacccctaattgagccaaaagcttagttcttcttaacacccatcaaagtcactatatccacacatacacaaaaagttatccttcacaacccaaacctaattgcttaagttatcaaggactaatcaaacattaatggggttagggaagtgaggatacaactttacaaaatgtggt

SEQ ID NO: 87946 - DNA, 623 bp, Cannabis sativa
  modified_base (56)..(59): a, c, t, g, unknown or other
atacattgaagggtagaacggtatatttgtgcctactcaatgtaaatcatctatannnnatctttgattatttagattgaaacaatagataatttatagcatctctgttcttggtgaatagagcgttctatataatcaagagtacaattgcgaatatatagtggagtcagaagaaattaataaaatagaggatttacttaataaattctaaaattacatattgggagcttggttaaattctagagtgatttttttttcttttaaaaattattttgcactaaaaattatatctagacatattcaatagtgtcaatattgtagtgaagctaactagctgctatagatcaatgaaaaaacaaaaatagaaaaaacaaaaacaaaaacaaaagttaaagataaataaaaaaggaataagttaattaatatagggaaattttcaaaaatatttttttatgttttatttataattttccgacttaaaatttttatttataaaaatgtactttactcaataaagttgtaagaaaaatagctaaaaatataacaagaaatcaactttacgataagagtaatttgcggcataagtacctaagtttaactcccagttgcaaataaatacctaa

SEQ ID NO: 87947 - DNA, 1004 bp, Cannabis sativa
taaaaatatatataaatatgtgtgtattgtattggatcggttacttttatatgtcaatcaaaatccaatctgcacaagtacggattttgaattatctaatcgaatccaatccacacaaatgcgaatattcgcactttgcagattagaattgattggattgtgcagattgaattggaggatattttataaacactcctaactatactcatgggcaaaccgatgatttcagttgagagggtgtacttctttattgtaagtgagcgggtgtacttttttttttttctagacgatataacatattaaagattgatacaaacttgtatttttatagcattaaatataatttaagtaagaaaaagtaacaataaaaatattaacttctgattaaggtactaaatgtaagtttattggtagagattaaatgaaaattagaatattgaaaagtaaacatcatttctaattgcaaatatatatgatgtaactaattaaaatatctatacatttgttttctaattttttctttttaagaggtgaccacggccctcgcttctatatcggtctgtctctaactatattgatgtgatttataattaggtagtgattgttagaatatcttttatatgttaacaaattaaataaaatatttgatttgatttatcaaaaatatgattaattatttaataattaattgaaatatttgaagtattgtcatatttaattacttaatatttcagttatccagtttaatttttagaattaattgtcaaaatattctgacaattaattgtggcagaaactttgatgcaaggtctcacctatataaatatagggtctcggtctccgaactcactactcattatgtgaaaacacagtaaattcatatgaaaagagtagagagatctgcttggaatcccgattactcacatcaatcaatttttttttttttttgcagattaaagattgtgtgggactaaagctcgaagaatcagtggttggaggtattt

SEQ ID NO: 87948 - DNA, 684 bp, Cannabis sativa
  modified_base (46)..(64): a, c, t, g, unknown or other
  modified_base (393)..(402): a, c, t, g, unknown or other
ttttttggtagcccatcacgaaagaactccacgattaagcgtgctnnnnnnnnnnnnnnnnnnngatgggtgacctcctgggatgttttcccaggaagcgttgacgcgtgtcgtaagccacaacaaatttactattttttttccaatacttccaattattttagtataatcgtaagtaagggtcgatcccacgaggactatgtttattcaattattcacaaattagtaacagaattagaaaaagagggggttttgatgattagaataaaaattgcaataataaaaattatagaaaagatcaaatttaaagtgagactacggtatgagggactagttagaggttattcgccactctcaacaatcattcctaattcctattaaagaatgtaattnnnnnnnnnnaatcaaactattaatcccgcaaataacgctaaagcagtcaattatcccaatctccttattgtatgtaatcaaggtgcaacactcaataattaacttttttttacctaaagcagtaaatccatgaagcatgcaatgtatttaactttgataaggcattgagatttatggagattgactaatctaggacacaaatcaatgaagaatataattcatttaacctaggttctattcttaatcacaaataaaaattgcaatttgtcacaaacacatagaatcctagac

SEQ ID NO: 87949 - DNA, 679 bp, Cannabis sativa
gaggaagccaagcttgatcaagaacattcaccaaactaccgtctgcaatacatcaatgacacccagttttgattagagattgagcttcaaaaatactgtgcaacacaaagcttgggttctgcccaagagaagcagtaatatatgaaccattgagataatatcttgctttaaaaatctttccaaccaaggatttttcattagtcaagagtctccatgcttgctttcccaacatagtaaggttgtgatcatttaagttacgaaaacccatccctccagcatgtttatgagccacaatcctatccctactttccaaaataatgccactcccctgtctataagaagaactttacaaatacttcgataattttttttttccatttcatgacatcatttgataggtaaaaggaacacactcatgtcgtaatttgggagcgcttgagccacaaatttaataagaatttattttcctgctcgagagagcattttccatcccaaccttccactcttttcctcaccttttctttaaggaagcccaaaacaacaatcttattttgacccatagtctcagaagacacaagtacttgctatgctcatgagcttggaccatacctataattgacataattctctaaccaaggaagcctcaatattattactaaaaaaatatcaaagatttttc

SEQ ID NO: 87950 - DNA, 790 bp, Cannabis sativa
gatatttaaaaactaaaactaaaaataattgtgaaaataaaaaaaaaaaaaaaaatcttttttttgtttaaaactctaataagattttgctatatctcacttgtctcatgttcccttgagaaagcctaccacctcgagccggtaaaagtagccataaattgccggtattattttgccagcaaacttttgcgacaacaaaggttgtcagggttgattcgttgacataaggtgttttgttcgcaaaacaacatacctcgtcggcaaaacattttatgccagcaatttaatttattggccgacataagtctcccaccgacaattagttaacgagattttgccgacaaaatcactcgccgcgaaaatttttgcgccaaatttatttacccacgaaaaattttacggacgcagcttactttgccggtaaaactttccaaaaaaattcttttagttttgctgacgagatatacttcactggcaaaactttttttttttattttatatttatatgtaatatataaatataatttaaaatatattataaaattaaaatttataatataattacaaaactaaataaaagtatcgttagctcaaaaaaattagtactatttatagtgtaaaataaagaataaaactacaagtcaacaacattgtcattgtcattattgtcttgattgggagggagggtgttcattggatcacatccaatgaatttggacccaaccaatctaatctaattatttattggatattaaattttattatctgatccaatccaattgaattgagt

SEQ ID NO: 87951 - DNA, 892 bp, Cannabis sativa
ggcccaagctatgggcaagaagggaaactgcctaaggtccattaatgaaaaaggccattttttacctatatgcatgtttaacgggtcacatattatatataatatatatttactgacattgctattttcaaaccaaaaagaaaaagtcaaatcataataatgagactaatacacacggttgagcgactactacaagtaacttccaattataatttttttttattttgtttattataacttttattacttaaatagtacctattttgtggagaaaataaaaactaattagactaaacaatttttattcaaaattaatttattttttattaattagttgttagagatatattttttagataaataaataaatacaatgtatatatctttctcttttatttttcacaaacttcatttattcttcttctattttcttgctcattttcattctcttttagcaattgtcattatttaagagctctcattcaattccatcattattacaaacttatagactatattgatatttgattttacattgaaacagacaaaaaaaacacaaaggtatgtattctaactcttatttttatatatattattaacattattatatatttttcatcttactttaatttataataattattctttttggataggatctctttcaagaaaaaaaaattcaaagaaaatattcatattgaagtacctgttttggcttgcaattttttaggttatacctttctttcatcctttttttttctttattattattgttacttttatatgcaataattttattttgtgttcctaaattgaaaaggaagcatgtctagtaaaaaatatctattaggttatgaaaaatttaagacaaaaaagaaaaattgataaaaac

SEQ ID NO: 87952 - DNA, 586 bp, Cannabis sativa
gtttggaattattgtctctctctctcatctacgttattttagtgattggaattgaagcaactactgttacctcactgctattctatatcgatcgctagaagcttgtcatgtattaataagtggtggtagtcatgactcaattatgagtctaagaacacttgtgatgtacctatatagctacagctacaagacctatatccatttagaaaagaatctgagtttgaaaacattaaacgtaggtaaagcaccattccatcaaaaagataaagtagagcactataaccgacccaattaagggttagccgaaggaaggtgggctaagtaattgggccatggcaacgaaggctttcaagttattaagttttttaaaaatattacattttatatttttggcctatttatgaattttacccatgacaaacaccaaattgtgcccccaaagccttttaatatgttaaaaattttccttcaagtatctatgttactcaaatttgggacttggattaagtttcatctaatgtgatgtgactaatagaatgcttatatggcactttaggtgtgatatgtattggccatttcagcacca

SEQ ID NO: 87953 - DNA, 818 bp, Cannabis sativa
gaaataaagaacgattttttttttgtttggtaactaatatttactaaaaataaactatagcaaaaattttgttgattgatgataattttttttatatatatattatatatgcatatatatttttaccgatatatattttttattttgctaaatgattaaaactaaatattgctcttatatgatatatatgtatttttttaagaggcaatatccacaataaataattactgtagcaaaattttctttaatatattttgaattttgatcaagctacgctgatagagaaatgttgctcttgcttttttttttgtatatatatagtatgtacagaacataaatatttttataattttgttatgtatatttatagtatgtacacaatacatatatttttatacttttttttttataagaggcaacatgtgtgataatgaaatatagagataataaatttacaattaggctcgattctaacaaaaagtatccctctagtaattgtcatattttcaaatttaaaaaatttcaattttaccaatttagaagatcaatatatatttaaaaagtcattttctcaattctcacttctcacaaaaaaaaaaaaaaattaacttaagatttttcttaattaaatgtgttaaaaataatcaaatcatatatttggtttgtgaatttttactagaattattatttaagaaactaaatatagtctaaacttgtttaacacaatatttatttattcacataattagcatcagaatttgactcaaaattttcaaaaaggtaagaaatttatcgaacttaacgcaagaatatactca

SEQ ID NO: 87954 - DNA, 889 bp, Cannabis sativa
  modified_base (434)..(441): a, c, t, g, unknown or other
ttaaaatagtgaaatgttaaaagataccggtggtgtctagcatttttttatatgttaatattctcaattgattcaattaagtatcgggtcctatatagtttaatgtaataaattttaaagaatatcactaaccaatcacaacgccacatatcgagaaagtgttagccaccactaatacttagtaacaatcctctctaaaatattatggagtgttcgtcattaatgtatataaaatctttaaaatcctttatctttgtataaaagtcaaaaagtaatttttattgttttgaaatctgtcaaaaagtaattttgaaggaatttagtttttctttcctctttattaaaagaagatttataacgtggtcagggacgacagacctaggtgttagggtggggctgtagccctcacgaacaacaacaaaaaaaaaaaaaannnnnnnnaagaagaagaagaagaaaatctacttcaaaaattaattattttacttttaagttgataattaaacactaaaataaaaacttttgcaaatacttcttgtaacaattaagtcccgagatcatcaaataaatttaataaaattgattataaattttgttttaagtaaataaaaatattttttatcataattaatatctaaatgtggtcataatatatctgtatggtatttataattaatactgcttaactacagccatccctccccgcaaaataaataataataataaattaaaattagtagatataaaatgaaaaaatgttcaatgatgaaaattattccctttaggaaagaaaaaaacaaagaatgttgaaaatattcgtgacagtttgcaataagaacgtaaatcataaaaaaaaaagaagattgataagcgaagtattcaaattaat

SEQ ID NO: 87955 - DNA, 529 bp, Cannabis sativa
tgcgtccataaatgtccataaatgacccataaatgacattaaatgacataagctcatgtccaacagttgtccaacagttgcatccactaactggtcgatcctaagtagtagaaaacaatcttttgggcacgccttattcagatctgagaaattaatacaatttttccaagttccgtttggcttcgggatgagaataggatttgctatccacgagagataaaaaatctcgtgcacaaagtcattgaccaacaacttacccacttcctgctttagtgctccttatctctcagaatccaagggtctccttttctgcctctttgcgaggtagtttggatcaatatttaaatgatggcagataatattagggttcatccctatcatatctccattcctccagacgaattgatcctggttcacctttagaaaacttattggctgctatttgaaccgctcgtccaggttcttccaaatgtgtacacaatttgtgggatttcctagatcaaggataacctcttccaattcctcaatt

SEQ ID NO: 87956 - DNA, 1543 bp, Cannabis sativa
acctgagagcttggagaagattgtgatgccaccaaaaacaaaaaagacctcagggagacctagaaaaaaagaatcagatctagaggagaaccaaaaattgtaatgaaatgctcaagatgtagacaacttggacacaaccgaagaacatgcaacaatctacagatttacaaacaaaccaattggaagaaacagaagatggacacaaagcaacaataagtaatagaacaagcacttgaaataaagaaaattagctttcaaaacatataattacaaaagctacaaactagttactttgctattatgacatttgataaaatttctttgaaaatagaatttttattttattttatttgctttttttagagaggaaaatagatgttttgatattaaggcagttaaaaaataatttttttagatttcatcaagataaatagtatataattatcatatttactataaatattaataaaattaaataaattggctatgtatcaataataaaaattacaaaatatagataccttaaaatttgaaaaatatgtgtctactagtacccgcaaaacacaccatatcctacaaacaacattaaacaaaataaaaaatcagttataaccaaattaataaacaaaaaaaaacacccacaatacataaccagtgaaaaaactactttcacaaatttataataaagtaataaacagcagtataaaaccagttttacctacaaaaataggtttttaaaaactgaaaaatttaacgcaaaactactctataaaaacctgttttaggatataacatcaatttccactaataatcgttacatagtgtgtttaacataacacatccaaaataacaaaagtgaaacaaaaacatttaaaccgttaagtatcatggtcatgactaaaaccagttatctaaaagaaataaaaaaacaaattaacaaaaagactgctctagaacatccacatcctcttctcaaacttcttttcatttgcctttagcattttctttctcctttagtttctttgacttttcctttctaactcgaacattatattcagtctgatacccaccaatttgtttcctccaagcatgagtaaataaactaacagccatatcatctttgtaagttgcaatcttattagccatatttcgtggtatctcattcatctttccattgatgaacaaatcagcaaacttaatcataaaaactccacaatcactgcatttaataaaagttttaacaaacaaaaatatcaaaatatcaaacataaaaaatatattataaaactggttataatacaaaaattaaagaaatattaataaaaccagtttctattatagagttaaaaatttacctcttcttttgagtaggtagccccataattaaggtataattaagaggctccctaatacctatagaatatggaccagcttctatgctaagatctggcctcgatgcataaaagttgacgaattctaagaaataaggcaacattacagaatatgtcttaacatggggaaggccttgttctgattgcgtaac

SEQ ID NO: 87957 - DNA, 949 bp, Cannabis sativa
tcccccatctaggtctggatcctaggtcctagtccgggtccatgtttgggttcgggtcctactcccagttttgattttgattccgtgttaaggttcgggttcaggtccgggtctgggtcggggtctgagtcctggtccaagtctagagttgggtttgggtccaagtttggatccttgtctgagtttgggtttaggtctaggtccgagtccaagtcttgggtacgggtccaagtttgggtccgggtctcggtcctgatccatgtcccacgtgttaatcctggtctgagtatgggtccaagtctgggtttgagtccaggtttgtatctagatccatgtctaggtccgagtctgggtctgggatcgggtccctagttcacgtccgacccgataccagacccgaacctagaaccggaatcgggaccaggactgggactgtaacaggttccaaacctaaacacaaacgcagaccagaacccataccgggacttgaaccagatcaacacttgtgacctgggacctaaaccaagactgggacctggacccagactgggaataggacctagacccagacccagaccccaaaactagggccgaacccaagacccaagaaccagactcgaacttaggacccaaaacctagagctagactgggagtgggagccgaactcgtacccgaagccaaaccgggacctggactcggactggacccgaacccaaacacagactgagacctaggacccgaatatagatgggggaccctgacctaagaattgggccccaaaactaggcctagaacttgggccttagaacttggattgggatctggaacctgaccctagactcaaacctggacataggacccaactcgggacctgggatcctggactagatggttggactcgattcgttgtcgatgtctaaatctaggacttagactagaacgcgaacc

SEQ ID NO: 87958 - DNA, 686 bp, Cannabis sativa
tacctgtataccagaatgcatagtagcaatagctacacccgctgcatccttaatagtaggaaaattacacatggcaacctgcaatacattgagcttaaaatcagatgaatcttatatgagacaatataaatataaatccatagcaagaactaacgaaaagaatagaataacctcttctgccaagcgtgcacccatcacatccacaccatctagagtcagggtggagacaattcttacactacatgcaattatttttcttttttaaaaaacaaattatgaccacagaacagtaaaagatttgagtgaaatttaacccaatgttgtattatatcaaaaaccaagatgtggaaccttttaactaaaacatgcgtatcaaacctactcaaaatatatcctacccccactgaatcaaattataaggtgtgaacttgattgaatttttatatttacttggacagtatttgcataagaagatactttggctcaagccaaaccaaaaactatattctcttcaataaaccatgggatttgacatttctcagatatcaactttccagaattcccacatatggaagaagaaatttttgaattcaatgagttgccgaaaaaaatcttaataataatataagatgtatttttgaaggctattttattcatttgcaactacttccttactctaaatgcag

SEQ ID NO: 87959 - DNA, 1257 bp, Cannabis sativa
aaaggaaaaagtatagacacaaaggattttttacgtggttttgcagttaaaattccacatagtccacgagtcatattagatttctaatagtttttcaaggcctttttcctcttaagattttttcatccccttttttaatctaacttgcctctatttataattacatagtaagcagttaattactgagttgaccataatctttacaatttttatcccctgaaatcgtgggatttgattacatatcacgtagtataaatgcggttaatatttaaaaatcacacagctgtgagttatccacttttactgggtcaaaatgatcgtgtattttaacacgttttaaatcacagtgttctgggatgtctcgacaggaactcaacatcaatgaccttgatagcaagctggaatgtttcccctatcttttcaagattgataatgtacgcctcgttgtttctttgcttgaaggcataacacttcattttgactgtcacagttctttatgacaaaaagagtacttcagcaaccatcattctaatgtcagcttctgactcgtcaagactataagtcttactgaaagatgtttgaagttgattggtgaaagtaacaggagtgctccttcctatagcgagataggcgcctctcttattaggtcttgagtccacccaactgatttacttagtttgtacattatacgctaagtgtcttcacagtcgatatgcatcgctttcgtcttcccaggtgtaatgaaattgatgtctcactttatgatccaatgacgtattgtttctcattaatacacgaggcaacatttgtatatctttacctcgcataagactttatagtcagcgagttacaagtatactctgttacttacgcaattaatgagttattccattaaaagtgatttcatcgatccatattccccttaacttgacacgtgtcctctattgaaatggcaactgaatttcgggtataacgtatacattaaatcaaacataaaatataagttaagagcatttacctcttgatgactattaaggtatccttgaaacttctcatatattttatcatttattccagatgatgaggatgatgcaaattaactcatactagtgtcttccaaatcaatcaaccacacacaagaaattgcgggctactaggataaagtgtataatttgttcttgattaattctcaacacatgagtaggaactatttgagagagaaaactattttctttttctcactgttatgaaaataac

SEQ ID NO: 87960 - DNA, 597 bp, Cannabis sativa
tattacaaatttacttttcttccatttgtagttaaagtttaattttcgcgctaattttattagtaattctgtttaggagattagggtttcttaagtatattggttaacgtacctaatagttagagtgttacacatttagtgtagcgataaagttgttcattgtaaggtgttgtgattttctcataattcgtactgtgtgggaatgtataaatgttaatactatatagttacgcaagatggatatgtgtgagtcacatatatatatttataaatatatgtttgttatattgagatgtgaatatctacgtttacaatgatttaaatctattaacttttcttgctgagtcattgtgactcacgggtgcttcttggttcaggtgagaagaatggtatatgtgttcagccatgagcttgaggtctcccagcagtgtacatatcagccgtggtgtcttggctttcagaagcaagatcgacttcttctcttttatctttgggaatgtaaatttattttaataataatggttttgaaatttgtcttatagaaattttattagcttgggattcccatataacgacagtactttgaatgaaagtttc

SEQ ID NO: 87961 - DNA, 733 bp, Cannabis sativa
atatatagtgataatagtataggaaattatgtattcaccccattaaagggttgtatttgatagatctattatacattcaaaaaaatttatgtctattttctttttataactatttaggatcacctataaatttttaaaaaaatttaaatagtttataatatcaaaaataagatttaaacaatcacttattacgtgtatataaaaaacaattatatgtaataaaatatttaaaccttatttttattattgtaaattatttataatttttcaaaaatttactattacacgattataagaaaaaataactattttttatttcaaatgctgaaacaaataataccgaaacacttatttagggtgtactatatacttataggaatagtatattcataagattggttggtatgtatttgaaattgtataattggttgctgaaagaggccaactgcccaaagaatataaacatctttaattttttgtaataatgatagaaagataagtgatgacataaacatgagcttatataaatatttatatataaataaatatatacatatatatacccaataataaaaaataataataataataatgtgaagaagaagaagaagtatagggtaattaagcttcactttcatattcattcttctattccctattcctcttataattatgtatattgaagcttattattatagttgaaagtgatgtatatggatatgtgtatatatat

SEQ ID NO: 87962 - DNA, 1948 bp, Cannabis sativa
aaaaactaagaaaataaagatgatgaaggaaaactcacatagacctccacatcatcatgtttgtgctttcctttatatatagatatagattaaatcaattttttaaattttaagaaatagcttcattttaagttaattttaataatatatttttaggtgattctataatagacatcttaaaagagatgtactgatgcacattttacttgtttgagcatttagaagaattttttagtctaatttttttttaagttataatatttaagatatcatataaaattttaagaaatttaaaataatttacaatataaaaaataatattcaaacagtctattttacacacgtataaaataaaataatcatgagtggaatacattatttaaacgtaattttcagagtgctaaatttttccaaatttcttaaaattttgtagagtgtcttaaataactctaatttacatgaaaaaaaaatttgattaaaaaattatttcagataataaaacagatagagatatatctgttcatctttaatgaagatacattataaaaaaaattatatttttttattttaaataaaattttatattactttttaatatttttaataaaataataatataaattttaaaatatatttatggcataatataaaataagcttttttaaataagatttagggcaatttcccattttggagaggttaaattacggaagtagcctcaattaatggagaatgaagcgattattgccgagtcaatgttaaattcatccacttgatgactttgatccaatggctcaagttggaagttgggaggaggaaaggacggcgtaactgagggatttggaaacttcgggtgaaaattatgtcacgtgcgtacgcggagacattacatcatgaccgtccacgtggaattaggcggcggatgttgtttaaaagattctggattctaggtaaggtctaccatggtcccatcttaggtcaatggtcaatattccattcctcttctaattaacattttagtaatgtaatcatgattggtaaaaattcatttccttttcttcttattggatggataccagaattaataattataatcatatttaaatatgaaaatttaaaattggggtttgtgtgtgtctgaatcaacgatccaagttttttgggtaatggggcattatacccgtttaacatcaacatcacattcacatggatccatatcctaaagtataactagtttcacatattaattttgtgaatgtaaaaagaccacgattttctcgaaaaagcaaatttgatttttagaataatttgtaaaatgagatcaaaatatgagaatggagaatcatcacattttattactaacatttagtaataaaaaaataggaatatttatagtatagatactttatatttttaaaaaatatatattatttatgtatcatatgtatgttttatttaaaaatattttttctaatacatttatatgttgcagtaaaactataaattctgttaggtgttgatttagttaagtaaaatatcatatgccaattaaaatatattttatttatttatttttaaaattatttttaaatttttttattaaaaaaaataagataccccaaatattcttaaaaaatatatattgtgatatacaaaattcacctgattttcatataaagatattgaattggtgtcactctctctttctgtttggcatgataccaaaaaaaatagtggtagagcttaatgggatttgtttaaaataaaagaaattacatttgctttttgtttaaataatgaaaattagtggcaagtgtgatgcggaggataattacaggctggtatggttggttttgggttcacaggccatgagctctgtttccctaacttcaattcctccccatacaaatcttattattatactccttacctaataaattatattatt

SEQ ID NO: 87963 - DNA, 953 bp, Cannabis sativa
  modified_base (262)..(270): a, c, t, g, unknown or other
aactttaaaacacattaaatttatacaataataaaataaatatatataataaataaatgtatttgtactgagctcgaagagagagaagagagagagggagacggacgggaggtggtggtggtccgacgtatgagagggagatgagagggacaccaaagaggtagtggtggtccgtagtatgcgacagagaggaaaagaagaccgacaggaggaggggtgggtggagatcgatggacaagagagacgagaagaaagggagatnnnnnnnnngaggaagacggcgagagaggaggctgatggtgcggatgcgtgggtggggttttggagagttaagatttttcgttttagggtgtggtaaatggagaagaaataggtgggcatgtgggaaatagaaaagaagtaggtgggcacgtaggaaatatgacgagaagtaggtaacgattttttattgggctcttatgcccgactgtttaaaaccgtcccctctaaggtcccaataaattttacgaatttcaattaaaatcgtcgcatattcctgtaattactgttataaatcgtttggaatactaagttttctcgacgattttaaacagttacttaatttttttagcgatagtccaaaaaaaatgtttttaggactgtcgcgaattctaacttttgtagtagtattatgtcttggataaggttgagtctgagcttaatgatcttgtggaggcttcaaataaaagtcctgtattttctcaatttaccaaggatccgtcagttcctccaaagactccactgagtgcaattgatgacatgtatcaaagttataagctttcagatgttacaaagaacttatgaagggaatctccaaagagaaactcaaatttagtgttaaatcaataccaaaaaattactatttcaatactaatttttttttttcaattctaaccacaacactaaaaattaca

SEQ ID NO: 87964 - DNA, 999 bp, Cannabis sativa
agacaaactcccactgaatctagatatcctcataatctaaaacacccatacgagcagtgtgctcatgaaagaccttgggtggcaaacccttagtaaggggggtctgcaatcatgaagtttgtacctaagtgttctatacaaatctgtccactctgttttacagcaaggaacttaatgtcaatatattttgacttcgtcaagctcctgttgttgttggaatacaacacagctaatttattgtcacaatacaacttaagtggtctttcaattccatccacaatgcgcaacccggtgacaaagttcctcaaccatataccataattggatgcctcataacatgcaacaaattctgctgtcatggtggatgaagctatgagtgtttgttttgcactcctccatgatatagctccaccacctaacaaaattatgtagcccgaagtggatctcctactatcttggcatcccgccaagtcagagttagaatatccaataatctcaaagtgatctgaccttctatatgtgagcatgtaatctcttgttctcttcaaatatcacataacctttttagctgctttctagtgatcaattcctggattgcttaagtatctgcctaatactccaacaatgtacgctatatttggacgcatataaacttgagcatacattagactcccaacagctgaagcgtatggaatcttttgcatttcttgaatttcaaggcttcctttagggcattgcttaagacaaaatttgtctcgtttaacgacagaggtatcacctggtctacaatcttgcatgtcaaaccgttttgagtactttatcgatatagctcttttgtgataatccaagaataccccgagaacggtggcaatgtatttgaattcttaaaacaaaagaagtgtcaccaagatctttcattttaaaatgcttagatagaaatatcttggtttcgtgcaataagcctatatcattagtggcaagcaatatgtcatcgacata

SEQ ID NO: 87965 - DNA, 563 bp, Cannabis sativa
tctattgggacctcatatcatatatatatatatttttttttttttttttgatgaataagaaaattttattgctccaaccaaactttacatcactttacaattctaaactttacaatctgctatcaattacatttgttttatacaatcaaatcattagtatccatgctttgtcttcatctttagctttcttaggggtcatccctttaattcgacatttactcatgtgctgaactttttcgactgtgttactaatggggcatttttgttgattccagaacatctcattccttgctttccacacataatacaccaagcttgcaagtacagtcttcaccatactcttcttagctgctgagaatttcttcgtgttatggcaagcttgcaaaagctgttgtatattcctggctggtgtgttccattgcaggaacgatttcacttgttgcagacatgcctgactatacgcacactcgaagaacagatgtgcaattgtttcctcttccctgctacataacagacattttgtgtctatagtaggcataaacttgctgagtctttctcttgta

SEQ ID NO: 87966 - DNA, 550 bp, Cannabis sativa
gacctgaccactacaataatctattaatacaagtcaatactaaacatagtattgtattaaataatgttaatatacaatcaatacaatataatacaatctaaatggacccaaccctgggcccaaatccaggacttgggacctgaccactacaataatctatgaacaagtcaataccaaacatagtattgtattaaataatgctaatatattctttaaaaaaaaataatgttaatatacaatcaatacaatataatacaatctaacacattacaatacaatacagagtactaaacatgccctaatagtcaaattgattacttaaggatcttagccatgaagaatatcaaaatattagtaatatgaacttaaattttttttgatatttttgagatatttgatattattggtgagaattttttatttttttatttttttgcataatttttatttgctcatttgtaaaatcacacattaggattaattgttgaatttcaataattattttttcaaaaaaaaataaaaagaaaaatgtgtaatatttaattgattt

SEQ ID NO: 87967 - DNA, 619 bp, Cannabis sativa
caaggtctagtaattaccggtttacggtcgaaatggatgactccatgctccagcacatgatcccttgttgcatcatcattaaacttgactatagtaaatcctccattcatgcgcacaatctgagctattcccaaatttccccacatccttcggatgaacccttcaaaaattgcaaatggaggatttgcccccaaaaccatacaaataacagctgagctccaattagccgcctggaatttcacttcttcaacatcaatccgagcaatcttgaccccatccttgaccaccggctcctcaaatttcaacctaacatccagatccaatggtttcccagtggtaaaatctcgccatttactctgcgattgagcttgatgatcgttttccaccattgctgcccaggaaagctcatctcgaaccactgtatctccttcgacagcagcctcgtctgtctccaaacccacagaaattccttcctcattctcctctggcacctgctctatctcagataccacgcattccatctcaggtcgaaaatcctcatcactttttgcccctgattccacactcgtagcacgaattgctggctttcggatcgctcgacgtttcttcgccatggaag

SEQ ID NO: 87968 - DNA, 574 bp, Cannabis sativa
gataacacagtgtagaatttttttcagttgaataactttctagtatttttgaaatttcaaagttatgtatcttcactgatggagcttaaattattattgatggatttttatatcctactagaataattcctccacccccagagtaaccaccatctcaaattggttatgagttggtgtagatacagggattttaatatatatacccttatcatctatcatataggtcactttcataaatttccttgactgtctccttatgttccttgtttgattacatcttagatggctcgcactcaacagtaggagtctggttaaattcatacatagaagtatatttaacctcttactattgtttttcacggtcatcttgctgtgacatcttatcttagtctgaaactataagttcgttctagactaagtcaccaacatagcaatctagtattaacattaatgtaaaatacttgcttaagattaagtaatctttagaaataccataaaacatttcatgaggattaggaattttgcctaaatcattcgaatagactatgcaaaattctactatcttattctcaaa

SEQ ID NO: 87969 - DNA, 1400 bp, Cannabis sativa
  modified_base (1290)..(1298): a, c, t, g, unknown or other
ttaaataaatctaaatacataaactattttaatgtggaataaaacaaattgttaaatattgtatatttctagttatcaattttgataatttcaatctacaaaataaaatgaacaaaaattagtataattttgtatttaggatttgataatcaaattaaaatatgtaaattgggtaacttaaataatatgtgcattaattataatattttttgaattaaattcactttatataaaataatagaaattaaatagatgtagtaattcttataatcttaacattctaatgatgcatgctttgtttttccttccatataatgtatattcactatatatagtggaagataaagttaatatatattggttgttatattatttaataatgtaatatgaagattcaaatgtgataatatatattattatgtgaataatatatattaagtgtttgacattgtttaatgagagacattctagcaccttatcaatgtaagctgcttgtgagagaacaatgatctgttctttcaatttttaataatttgaatttcaagaacataattagcttcacccaagtctattttgaattaggtattaagtcattctttaatgtcagtcattttcttgatattgttaccaatgattaaatgtcatcaacataaaggaatatgaatattaccacttgattattcttgagttagtaaacacaaggttcatctttattttggtgaaagccataggctttgattgtttcatcaaaccttttgttctaagagcgagaagcttacttatttccataactagacccatttaacttgcagactttctcttcttgtcttgaaagtttataaccttctagttgctccgtatatattgtctcgtcaagagtttcttgacatccatttgccaaatttcataatcgaaagagtctgctatggagagaagtattttgatagatttgagcatggcaactggactaaaagtatcctcatagtccacaccttctctttgggtataactctttgtaacaagtctagctttaaaagtttcgacttcatcgccaatacctcttttcttcttgtagacccattatttgaaactatcttaatgggtttgtcaaaccaacatattatattttttatcataaagtctgagactttctttgatgtgattgaaattaagggttcgactttgatccatttagtgaagaagtaaactaatgatccaatcaaatctatcctccaaataatattgtgataaatccagcatgcaagtatactgttaattccatttttggcnnnnnnnnntgacaaaaatattttattatttaatgtatatttcggctggcatatattgatttggtttccatatttgtgtaaatcaaacttgaaaggaaagttgtctagctt

SEQ ID NO: 87970 - DNA, 723 bp, Cannabis sativa
  modified_base (302)..(311): a, c, t, g, unknown or other
aaattttaaaaacaaaaaaatcactttcaatatttttttaaacaactttaattttctcttaatcaatattttggactatgacaagaacgggacccaaatctcccctcggtcctggcgctaaacctggtctcagacccgaacccgaattcgaccccggacctagacccgacttaaataaaatctaaaactgaaaatgatttttacgtaacacatttttgttttctatttttaaaattgaaaaacaaaagtggttagaaaacacatttttgtttttcaaaaataaaatttttaaaaacaaaaannnnnnnnnnattttgtgattaaaaaattagaaagcaaaaatgttaccaaacggcacctataatttttgcattgtacgtgacttttacttttaaccatgaatcttttagtcacaatataagaatggtgtgatttataattaatcacaaattttttacttttagtcaaaaaatttattgtgactaaaagtaagattttatgtagtgagtttaatcttaattataatattgattttatgtttgactgaattttcgtttagcatctcacatatatgtttgatcaataccaaaggaaaacaccataaataatgtagaggagaaaattaatgaaaaaatttatttatatatatagaacacttcttaatatatagaacacttatacttatactaacgcataaatgtgttggtaaaagttagattttag

SEQ ID NO: 87971 - DNA, 913 bp, Cannabis sativa
agtcctagcggaggtgttgggaattaaggaggctcttagttggatcaaagaagcgaagtggcaaaatgtcactcttgaatcagattgtctttgtgcgattcaggccatccgaagttccttagacatgttttctacttttggtttgattgtaacagattgtaaaagcttgcttgcttctcctacaaatgtttctattttttttttgttaaacgatctgctaatttagtggtccataactttgctaaggctgctattttatttcctgatcgtcgtttcagtttggagcatgttccaactgatttgttgccttgtttggtagcagaagttcatggttaataaagattttcgactattaaaaaaaaaaaagaattaagaattagcattaaattaaacaaagcatatttagaagaattagcttatatttcacatcattacgaggaaagattaaatttcccttacatattcaaaccaagaaccaaaaacacctaattaataatttcgatttacttttattaagtcttagctttcttaggagatttggttgcagcaggtttagccttagatttcttaggtagcaaaaccggattaatgttgggaagaacactaccactagcaatggtaacaccatgaaacaattttctatactattattcttatttttcatactattattagaataataatttttgaacatatatacaatgtacataaataatgaatttgttagctctcgtttttgttcttgggaagtgtttcttgaggatatttttcaaaaaaatataataatattatttatatattattaaaataaatttagagaatgcactattcattctctatatgtagagcaagtttcataggttcgagtacatctctattgataagagcattttttttatcatatttagctaaa

SEQ ID NO: 87972 - DNA, 1163 bp, Cannabis sativa
tgaagctggaggttctatggagatattaagatgatttcggctccagaatctttctcatttgatgttccttctacatatattttcaaaacttctctttcttcgattgacgtctcatgatcgttatttatccatgtgcattctaaaatgaagtcagctaacacctgacatttaattgagattctaggctcatattgtatgtgaaactaactcaattccatttcccactttaggagtcttcttgacgagtctagtttccacaacacttgacggagagggtggtttgttagtacccttatttcaagagcctgaaaggagagcttctctatcataggatatttggactctgcgctcagtagtcttttcctcacgtaatatactagaaattgtacctttctttcttcttgcactaatgtagcgcttacgacatgatctgatattgccaagtacaaaagcaatggttctccatcaattggttttggcagtattagagccttcactagatgttcttttagttgctagaaggttgtttcacatttggctgtccattcaaatttatgatttcctcgaagtacattaaagaatggtatacacttatttgtggatttggagatgaatctactaagtactactattcttccagtcaacttttggacatctttgtgcttcctataaaatctaggaatttctctaaagacactccaaaagtgcatttctttgggtttagcttcattttgtactcctggataatggcaaaggcctgttttagatcttggtaatactttcaaatgtctttgactttaccagcatgttgtcgatgtaaacctccacatttttccccagaacattcttgaacatcttgttcaccatttgctagtaagtggctcgatcattcttcaacccaaatggcatgaccttgtagtagtagattttattgttagtctagaaactaatatgctcctaataagccacgtgcatttttatttggttataaccagagtatgcatccataaaggtcaataattgaaatcccaacgtagcatcaaccatatgatcaatgcgcagaagtgggaaactgtctttcggacaagccttgtttagctctgtgaagtctacacacatcctccatgtcctaacatggttttgggaccaaaaccaggttggaa

SEQ ID NO: 87973 - DNA, 1411 bp, Cannabis sativa
actaaactagctcttgtaacttgaaattttctcccgaaaactgtgttgcaaagcaatagcaatttgctatatatagccttgaggttgaaaacgatcctaacagtcataactgtcagttagataaaaccgttggtagttataagaggttgagccaaacatgtctatttcctctattagtgaccaatcataataatacactatacctatatatatgtgtatacatatatattatttaaagaatttatattcatagggttgagaatttgaaaaaattggtcatgtatgttttatgtagtttttggctattgattttctcttgtactttatgttaacgcatattttcgttaactaaatttgagcctcacgataataattcaacacataaaatataaaagctatagcaatataatatatgaacacagggttttttacgtggttttgtagttaaaattctgcatagttcacgagtcaatcttattcagatttctgagtattttttttcgggcctcttgtataatattttttcgtcccttttttgagattgtttgccactatttataattgcatagtggcaattaattacaaagctgactgaaatatgattacagtcatcattcctaaaatcgtggaatttgattacatattacaaaatgtaaatgcggtgtatgattttgaaaatcatatagctgtgatttttccgcttttagtggatcaaaaatatcatgtattaaacatgtctttgatttttgaatctggagatgtctcagcaaaaacttgattgtactgctcccaatggcgagctagaaccattcttctttccgaggttgacaagatttgtcttatgtcgatcgcgggtatacaagaatcttctaacttgccagggttataagcctcgctcctgttagttggatggaactataggaagcatccttgtagagagatggtcatctcgcattcttgttctctgagccgatctgacttttacaattagtttgcttattgcaagctaaggtatgtgttacttttctccggtgcctcgctattctcctttagcgacatatggtttctcgttaatacactaagtgccagtttgtatattgattccttgcctaagacattacagttagcaggttgcaaatatactctgatacttacgcaattaatgagttattccataaaaagatatggcgccgactcacattccctttaccttgacacgtgtcctccagccgaatttcgggtataacaatcgccccttaaaaagttcttttttagtaaaaagagctttttaataattacggagggcattttcatcaaaatcctttcttggaaaggatgcctcctttgattctggcagttgtatggttttgaagattgttatgaattgcctactcatattctgcacaattcc

SEQ ID NO: 87974 - DNA, 969 bp, Cannabis sativa
atgtagggtctgatatgggttcaatttatttcaattgtgttaggcgcgatgtacggtccgatagtagtccgattcctttgcataaaatttctaacttccattttttttgtatttttttggcagtcttcaaaaccaccataccttatacttccagtgtcagactattacaccaggcgtgtcacttagtagggtggtagttgatattactagaagataaaatcaaaatttgaggaattcgaatttttggaaagggtgaaggaatcccctttcaagtaattctttgagagagcgccattatagtttttaagtgcacttatccatcagttgttcatgcacatgatcaagttggataaggcaaacaaagtgcacttttatatcgcaaagaaaagatgcagattcatcggagctgagttcgctctggtgattgggctgaacttgttacccattcctactaagttcgaaattcaagaaaaggcaagtttgaactgatagatagttgagtacttcaatagggatccatccatctccttgggtcaattgcatagagtctttgagagttgcacggaaaaggacaatgtgtacaagttggagatgaccttatttgtgatgggtgttctcattgggaaagaggagaagaccatcattccaccatttattattagaatggctgacgaccttgagttcttcagtacccctgggggaagatttctttcaacatgctaaacgaaacgtagagtagagacttcgtagaaaagaagaagcatatggataagaagattcaaaagggaacgacttataaggagttgaagtactcgacctatggatatactgtagcattgcagcattgggcttacgagtctatattggcgcttggtaacaaatttgcgatcagaaaattgcattgctttcccagaatggtcaactaggagagtaagggtgtgacactcgacaaggagaaaattattcttc

SEQ ID NO: 87975 - DNA, 502 bp, Cannabis sativa
agtatatataataattttcatagtgtaactaattctattatgtgtaagatattatttggtaactttaaaaaattttatattaacatatcaaaattgttttattaaataaattttttattagtgtaccatattgtaactttcaaatataacataacgaaagactttatagtaatttataatgtacttgatatgttgaattttatgatttttgttataaaagttattaaaaaagaaacgaaaaagttacttttaatgttggtcgtcctttttgggagacggtaaaaaaatatatacttcctacatatattaattttattttttttaaaaaaaaaaaaactttatttcaagataattttgtcttaaatatatttggctacttatttcatggttaactttaaaattatagttttaatttaaatttttttaagttatatcatgttattttattgtttaagatatcttggtgttacttttttcaaacatcgtttacattaattttaaa

SEQ ID NO: 87976 - DNA, 572 bp, Cannabis sativa
tctattcataagaaaccaaggagccgagtgaaattgaatcatccaaaagatcttattcttggacatcatgaagaaagcatggtaaccaggaagaggtatgtaaatatgattagtttcctttattttgtctcacaatttgaactgaaaagtgttaaggaagccatgacttatgaagaatggctcaatgttatgcaagaagaactaaattagtttgtttgtaataaattttggattttggtttgaagaccaaaaggtatcaatgtgattgggacaaaatggatttacaaaacaaaagtgattaatttggtacaattgtgagaaacaaggctcagttggtggcactagcacaagactatacatagatagaaagtattgactttgatgaaacttttgctccaatagcaagattagagtctattcgtttacttttgtgtattgcttgtgttcttgatgtcaaattgtatcaaatggatgtgaaatctgcctttttgaatgagtaagtgtatgttgaacaacccaaggattttgaagatccgcattttccagaccatgtgtacaaattagaaaaagct

SEQ ID NO: 87977 - DNA, 648 bp, Cannabis sativa
aggttaataatcaacctggtgccctagttttgatcactcaaatgtaaattctccttcgagtattgtctccaaaatggtcaaaaatagggtaggagacctcatcgtgaagttcaagaaccttttaagtgtcaaaacaacataccaaaagctccaaaaagaacacccaacacccaggttgacatatggcctcgtgcgctgggtttagctttgttcgattttgattctgtatcgatggttcgtcaagtttttcataataattgaaagctatgaagttagaagagtcaaattcacaacttcatattttcacttttctggcaaagtgactgtactcgaaaactgggtagttctgaggctctcatttgcgtaaaacatatatctctgagaactggtgactagcttcaccaaaacacagaattgggctaagtattatttattatttagataaccttataatattatttatttatgcaataaaaaataaactcttacaattttcccttatattgtataatttagaggaaattgcacgctataccctttttatattgtcctcttttatttttaccctctttttttaaagtctattattttttacctctttttttaaacattgtactaatttttcccttgtcactttaagatactctc

SEQ ID NO: 87978 - DNA, 1068 bp, Cannabis sativa
  modified_base (62)..(62): a, c, t, g, unknown or other
atcatttaataaaaaagttatcttcaaatattatagtaaataaaagattaaaaattgaaatngaaagagatatcatcatatgattacaaaactgctctaatctttgtataagttgtcactacattcaaagtgacaatttgatagataacataaaaattaataaaattaagttaaaaatgacaaaaagaataagtgataccgaaaattatatatgtgtaagacaattttataatttactttaataaattatttgataaattcttacaatgaaaatttgacaatttagaacacaaacactattcatgattaaaagagttttatttatttatttaataaaaagagtttatgatcatataatatacaaatttaaaatatctcatagttatattgttctacctcaacattcagaatttgagataaataatatattaactataaaaatattctaaagagcaactttattaaagatacactgatgtataagaatgtatactttgacacataagaaaagaaataagagaaacatatagcacattacttcaactctattatcactacatcatctcatttataatagatcacacataaaatattctgatgaaaaccattcaactctattatcactacatcatctcatttataatagatcacataaaatattctgatgaaaaccattattagtaatgaaagaagaagactcgttgtttccaaaaaaattctaatcacatatttattcattgataaaaaatgatgaccgtacaaaatataattattttacaaattttaagagtgttatatatttttggaatataaataagaggctttggcaaaattttagagtgatagatatttttagaatatctcacaaatattttttaaaaataatttttttaaacgcaatatatgaggcaagtaattaggtggattttttttttaaaaaaaaaaaaattattattaattaattaataatattaaaaatctacctatctattctatataaagtgtgcctatataaccgaattcttggtttatgagaaaaccgaattcttggtttatgagaaattcgtg

SEQ ID NO: 87979 - DNA, 758 bp, Cannabis sativa
cagaaaagaataaaacaaacaacaaaatcaaaacgaaatacagaaaaatacaaggaattacaatgcagaagcaaggttacaacaagactctccattctctgctcaggtctagaaaggataggtcttcgaaatgctttgctctaaaaacccatgttgctgtcatgttacttaatgtacaacctaatttttaaaagtactagatatgagaaattataatatatatataggtatatataattatattgctccaatttgttttgacaagcttttgatgagaatggaatgactagtgaaatagctcataagtcccctgtttttggtctcttactttttgaaaatagatatgattacacagatatgtgtgttttagtatctcagtatgtttgcatagtattcgctacttttaactctttcaatggtaaatttttcattgttggttgaaaccttatgcaaagagatggcttccacaacatgaaacaagcaatgttcgtgttagaatgtaattttgttgtttttgtatttgtgggtttagactcgtttcgtttttcctacatattttagcttgtaaccacgattttcctcggcagtgagggctatgaataaacttgggaaataggtcactcggtggacatgtcatgtgaccttcttatgttgaaatggtacttgtttagtgtcatgttgctatactttaatttactattctcttcaccaagacaggtaaattcatttttgtcatgcatgatcttatggttgatttg

SEQ ID NO: 87980 - DNA, 530 bp, Cannabis sativa
gttagttgcaaaacaggttatgccgcaaattactcaagaataaattaaaatggtactgtcaattttctatgtcagatcctttttaatctctatttctaagatacatgcaagaatatttttcctttgactgtattgtttttataatgatgatcgttataattataataataatatataacatgtaaatttttaaaaaatatctaaatggtttacactattagaaacaaagtttttaatatttcagttatagttataaaaaaaattaaacaaaaatattttaatatatatttttagaggcaaaaattaaaaattatatggtaataaaaatataataattaacactactccgagagaaaacaaagtgaatgttttgaatctttatctttcacaacttaaaacttgatgtgcagcagggacggagccacatacacccctataaggactgtggccccccctcaatttttaaaaaatttgcactactaaacatataaatatatatatatataatcatatataaaaagatattaata

SEQ ID NO: 87981 - DNA, 1257 bp, Cannabis sativa
accatacagattatgtgcccaactttcagtgcaaaacaattattgccaattcaatatcataactgaaataccattgatcatactccttcaattggtctaggtagttaggcaacaactctcctaaactgtgtaagaatataatctaatccttgtttaaaagtgtcacgtcataccacattatctccttacagactgacaatgttaacattgatacaatagttaacatttgtttcaattctttcgatataattccactaagagtgtaaacatccctcaacaaatattccgtagcattctgttaattctagaaaacttctaacctcagttgtaaacttgggttgaagtcaactctaaactgctttaatgcttgtcgaacctatcaagatactatctatatccatttcatgctctaagaaacctacttagagttggcaaatttgcatttcctacaattagcataaagtttaagctcctaaaatattacaataccatccaaaatacctcccaaattccttctttgaattggaagaaatcaaaatatcattgatgataacattcgcaaagttatcgggtatgaaaaactactttggaaatacccttctcttgaatcttcagctagtaataaccagatcgaagaccgatctcagagaagatggtactttcctaaaattaatcatcacaacttctatccttgacaaaggaatacttactcttcatcatgaatttatttaatttccaacgatcaatacacttttgtaaagtttcattctttttcttcacaaataaagttggcatactctagaatagggtactcaaactagcaatttcaagctcaaccttttcctacaacgaaactttcacccctttcaattctacaatttccatccaattcagaactttagatacaggtttttcccattgtcacttcaattcataatcaatttcctgctttatcaataattctggtggctcttttgaaaaggcatctataaacccttgaaccacaagattgtgtcttagtctcactgatgttcactttgcaatatttaccacactaactgaatggttaatacatccaccccataataaaacttctgtcttaaacgctgtggttaatggaattcagaatccttgaaccttgcctacaaacacgaatgggtccttaccttctggttcaagagttaccatctttctttcacaatcgataattgcattaaactttacaaatcaattcattcttaattcatcctcaggatc

SEQ ID NO: 87982 - DNA, 782 bp, Cannabis sativa
  modified_base (389)..(392): a, c, t, g, unknown or other
aaattaagtagaaacttttaagttttctgtatgaaataatgttcaaaaggagtgggagtgaggtataagacttctatcctattttcttttcatttgttcattattatattatgttgtttgaataatggacggtacaatatgtattcgcattatttaaactagttatgtcgtttgaataatagacgggacaatgaattcacattatttaaactagttatgttgtttgaataatggatgggacaatggattcacattatttaaactagttatgttgtttgaataattgacgggacatggattcacattatttaaacaaagttatgattatgattgttatgttatttaaataatgtatagtagtttggcattatttaaattagatagattannnnttatgtgacatggtttgaccgagaagataatggtcaaatacttgactgttgggtctatttggtagatagggggccatttagtagtgcgtacgattttttagaacccagccctccgccatttagtctaatagttcgggtttatttgccaaagtcaaactcgggcgtaatcattattatgtgacttagcttagaaactagtttttagctactagtgatcaaattaggtttatgtattgctatttgtctaattatgtgcattttagttgtgtgttttttttttatttatgcgactacctgacacacatttccttactgagtttagtagctcacccttatcaaattaccatgtgcagaccaaggtaactgaaagtctagaatgccggtggcgag

SEQ ID NO: 87983 - DNA, 1491 bp, Cannabis sativa
tccattaatgggctttaattttctttcactgttttattggaaagagattacaagttctttttgctttataatcattggtaactctcgtgagttataaataagcttctttgtaaattgtaaccaataattgtgttctcttttaaaataaaaataaacccaaatgagtatggcatggtattaaaataacaataacaataataataaaagttttgagtgttgctgcatgattaaatttaagtggttgaagagtctcttatcaaattaaaagatataaaactaggagtgcaagttacaaaatatgtgatgtgagtattttattttttatggagagataataattcttataaattttttaaaaattcaaatagtttacaatattaatttattttaatataaggcccgatctttattggctgactaggctcgtgcttagggcgcacacttcctaggacccattaaaattttttaagatctcattatttaatagctatattacaataaaattaacaattaaagtgtccaaacttggcctagcacaatgacagcttagtgaaagataagattttattagttgaggacgtgaatattatttgatttgattgtaatttatttcttttttatatatcttattgtatcattgaaattttagcaacataaattttttatcatgaatgatccagttaattaaataatacaaatttattaatttttgtaatactttataacttattttagatttatctatatttattttattttctttatgttatgatatgtagcatgtaactttttttagatcaatttttttaatttaattaatatatttatatatttattaaggggcttaaaattttatttagtcttgagcctctatttcttcagggtcgaccttgtatacgtggttaactgaaataccatgccaccgatccaacggtaagacaaatagaacactcacccaaggtcttctaccgtgacataaaattaaaagagataagttgaaaactacatcttttatgaattcattaattaaaaatactttcatattatatttcattaaaatatagccatttttgtgagtgagttgtctaatatacgctcacccttcacttaactctatcacataatttatattaacttaagaggtatagtagggacattatttataaaagtgagtatatatatattaaagaatataaaaataaataaaataaagtgggtatacagagtaatttcctcatattaaaagatctcttatttaattttcaaaaatatcatattgttaatttttactactatttgttaaaagaaggattgtttttcgtaagcaaagacccaatttattttttaaaatactatatttgaatattttatttagaaaaaggagactctttttttttcttttcaaaataccaaattttagatatttaccactatgtattaaaaaacaaaggaaaaagttgaagaatacaatttttttatacattaaccaaa

SEQ ID NO: 87984 - DNA, 800 bp, Cannabis sativa
tttttgtttttttttttttttttttattgtgtttagtttatatattttaatattaataggttcttgaaaaaaaaaaaaataacttcgaggacatttctttttttatttttttttttttttgaaaaaggaaaaagataccacttgtcttagactggcctcctcccgatataaattgcaagcctcacttaaggcggaggaaaaccatagtaaacaaaacatgaagcaaaaaaaaaaaacttaaaaaactgtagaaaaaattgtgacagcagtcacaaaatcccaggattattacaacaacacaccccaatccttgcttatgtctaaaaaggagagatcctcgaaatgtttagttctgaagatcaaagtggtagtccagaatttgattctttcccaaacatcctccacagacctttccagtccaccaaaaattctgctatttctctctgtccacaccgcccataatagtgccataatggcagtcctcctcaatttaactttccttttgttctccatcggtttgcttattaggacagcagaaaccaagccatgtaaggcccaatccaagcaaaattctttgaacaataacgaccatattttccgcgtatatatgcattctaggaataaatgctcaattgattcataactagtcttgcaacaaacacatcattatggcacttttatgggcggtgtggactttgcttgacttgaagaaactttgacatgtaattgatgagactttatcggatggtaattaatttgcatactgtaatttgcttgacttgaagaaactttgacatgta

SEQ ID NO: 87985 - DNA, 1288 bp, Cannabis sativa
  modified_base (1111)..(1123): a, c, t, g, unknown or other
atataccttgcctttcattaaccctctcattatttttagactctaatttatatactattattaagtctttgcgtgtaagtggatatgctggtgattatgagaaaccatatttacaatatgttagttcattgcttgtgtgtaagtgaagatgttgcaaaaaatatattgtcatgtactacagttcaattaaagtcgtatttgaatgtgataaattttaacggttaaatatatataaatttatatatataatatattttcgcaaataaatgaataatgaatcttatcttattctcataaaaataatattaaacattatttttgtagaaacatagattgtttgtctaaaaaattacggaaaattatcagccaaaaatagagaatcaagttgtatgtagatacaaaacaaacgatcaatccaaaatacaatcaattcaccatttagagagccgactcgatggaagattagaataaagtttcactatgctttgattaatttttcataaggtattctatattaagactttattttttaatttttttcctctattaaggtgccactttttctttatttttcgctacataatgtttcttttaaattttgtaaaatatgtatactgttcctttgaatttttcagaaacaaataataactgttaaagtcagatattggtatgacttatcataaattatttcttcacatgaagaataactacaatattagtatgtaaatattaaaattaacttattttttattattaataacaatgtacatatcataaatttgttagacacaactatgttttattaatgaaaatacacgaacacaaatttaacttttataaaaacaaatcgctcaagatattcataccactttaagtacctaaatctaaaaaaaaacaccaaaccttaaataaaactaatatttacgtaactcggcacgtaacttccatctaatatatatatatatatatatataacaaaatatatactaacaacatgataaaaatgtgtataatatactaatcaaattatatccaacaattaaaatatatatatataccatgacaataaaattatatatcacttttatacataataaaataaaaactaaannnnnnnnnnnnnaaataaaataatatactatacaataaaacttatataccatataacaaaaaagaatattggtggttaaaccacctgaactttatagtttgtaacaattaaccacaaaaccaaaattttggcggcataactacctaaaccctggttctgttttgctctacacacctc

SEQ ID NO: 87986 - DNA, 826 bp, Cannabis sativa
tagtccccgcttcaagcctctattggaccattactcccacggaatgatggctcttatacacgagtgcatcactctagctgcttcctggactaatgactggccccacgaaccaatccaagtgtttctaatgtgctttactctgactcgcatgcttcatagagaaatttcctaaatgaaaccaccccaagtcaaggacactcaaccatggagttccttcatggtgagctaccaaaataagatacttcttgctaacacaagtagtcccacacctacataatctcaaaattactacacaatcattgccttcaattcacctaggattccagacaatactcgtaaattgtcccacctttgctaatgctagatcacacctaaacaaaatattatgttatttaaatcaattagatcgatgcgcccattaactaatcatgtcctatattccacttaggaataccagcaatttaactcatattgtcatttttctaatctgtctaccctgtcaaatgaactaccactaaataacatacaaacacaatctatttagatgctttaatgttcccccattgagagtacggtgtttaataccaatagcaattataatattacccataaattctaacttgagtcggccaaaggactgatacccgagtcccccttgagtcataactagcacttgggcaggacccatacactttccttttttaacattagtctttcttaactacgggcaggttctttttagatgacccactacccacaataaaataagatctgactctacattagttcaaatggcgcctttttgcatcttgaacactcaggataa

SEQ ID NO: 87987 - DNA, 2675 bp, Cannabis sativa
  modified_base (799)..(805): a, c, t, g, unknown or other
ggcataaaacccaacagaaagatctctattttcgtgggttagttgggaaacttaacatccttcttcctccatgtgtcaaccttaacattacacttaggggtcaaactttgttatgggctggattgggcgtggcccatttgagccattaggcttatgggttcttgtttttgacttatgagtaggctttgtaaatacttcggtcgttaggccttcgtgttgggattatagcaatttttagccactacagtttgtcccttgctctttaagttgagttatactcaagttaaagagcattactcgtaggtgtgcatgattgacttagagtgcctgtagtgtgattttagattgaaaattattaggcccgcataagtttaagtagttcgacttaatatatctatgagtaattttttcttgatgagggcttgttgcatcagtgatttttaagacaagtttattgtttatcttcaatttgttgtccgctttaacttattcgatgcgattggacaataccggttgagtatgaacttagtatatgggtggacaagtaataaaaggctatatgtatatacataatatgaataagtgtttctactctatgactcataatagattcaacaaaatttgttttgtaaagaagctgatcattgacatgggctctatcttatagtagagcaggtgctatgtttagcttaattaactttaggttggcctccatatatatatatatatatatatatatttataagtgaagtaataacttttatattaacaatataaacagggccggccctaggcatannnnnnntaggcccgtgcctagggcccacacttttcgggagcccaaaataaaaaaataaaaaaaattattaagcttttatttaaataaaatttaagtatattataagcaacaaatatttatagtttagttggttgaggtggattgcataatgtccaaggtcatgggttcaaattccatagaacttttcttttaatttttttttatatattttttagggcctcaaaatttaattcgtcttgggcccatatattttcagggccggccctaaatataaatatatatatatatatatatgaatatataaatttggttaaccgtagattatataagattgagcttcaagtacatgtatatatattatgtaagagaactgacctattgtttagtgcaatcattcttaggtatcattttataataaatcctgcatataattgagattaaaagtggaggtagtttggatgagcaactcaaatttttggggtttttgtccctgtcacttttgtgacttgttgatagttgtagtgtcaacttaaatcaacctatatacattgtttttttttttcttgagctgacttgactttacgcatggagtaccaactctatctattagaaccctcatcaagatagatgtgaggtgacaataatgaatataataaattggtccatgtagctaagtaagaatcaaccttgtatggataatatgatgtgttgtgtacaaaaactcattccaatatataaatagcatggatttgtcttatctaaggaaagatggtcttggatagttaatattttatatatacagggctgacaatagatagttttcattgtatatatatattttttgcataaactaacttgaaatcatatttttgtgagcaaggtctgagaagacatgtacctataatcactatgcatgatataatgcatcatatcttgttgtcaatgtggaagattgattgtatttgtgcatcttctcttgagcttaatgcttggcatatacgtgtttaaggatttcttctacacctagatttgtcctcaatattattgattctctttatggactgaccgtggggtctagagattgacccacctatgtgggatttttttattcatataagtcaaggtatatctattattttgatatactatttactcacttctttccattcaagtgttgtagtgggaagacttgggtagtagaaagcttttagtgttgaagagctagaaagtcttctttgttggtaagtatttttaatcttttcttcaccattcaaaatgttattgtgttattggtgttcttggtattttcggtgttcgtggaacaatgtattattcataatcttagatgtgtagtgtttgtatgttttgattcaaatttgtaacaaatagtagaatttttgtatttttaacttatttatgatgcatagtatgaccataaatttttgtatagaagttacaagaatttattgataagcatagtgggtgtggtatgaccgtatgatttcatatgagcttgatgcatagtacgtccattagaattttaatacaagcatgatgtgtaacatggatgtaatatttttgtatgatgcataatatgatcgttggatatcatagcatgtatatacatttttttgagttttcatagctcattaatatttgtctagtgtttgtgaccatactcttgttgagtggtgagatgggatcttgggaaagtgtgacttcacaattaatgattgtggtcccttcttctacagaaggaggtgttcaatcaatgttaggtagtgatgaagatatccctaatgctcaaccattgtctcaagtcactttggttgacagtgatgatgagggggagatttttgatgagagtgtatgtaag

SEQ ID NO: 87988 - DNA, 1362 bp, Cannabis sativa
  modified_base (237)..(257): a, c, t, g, unknown or other
aaaagaccataatgcccttgcctacaccaaaagtaaccttaccacctaggggtattttggtcaactctaaaatctcgactaatcctgacatcatgatgtctaactatattgcctcgctatactaaaaatactaaaatgtgattctaatggccaaacgtcgcgttccaatgttatcgggcacaaaacatgcaaaaatataaaatttcatatatggcatataaaatgcattctgaattnnnnnnnnnnnnnnnnnnnnnacaattcataactaatatgcaagtttcataattaaaccctatttatctgttaatttccaaattaattttaagtggtttttacacgaagacccagaaactccagtcactggaacaagtggcgcaggttgggtgatcggagaagcagaggcagaaccacgagaatgcctcttggaaggttgagcatttttgttcttgggcatttttctttgaaactctagaaagcaaacacactctcaaatttgaagaaggttagactttttaaaaaaaaaaaattgagagatgagtgaatagtggtgatcgtgggaatggtatgtaattgagcatatataacacttgaaaataaaccaaaaattagaaaacaaaaaaaaaaaagggaaagtaacttttaacttggtcaccatgtgaggagagaaaaaaaggaaaccataaaagatatctcaaaaaaatagtcaaaggttaccaaaaatggaaaaaaaaaaaggaaacaacaaatcctcacaaaatctaaaaaataaattctccaatcaaatctgaaaatgccaccttaaaggaaaccgacaaaataattaattaaatgaaaacaagtttcctaaaacaccacaaaaaataaaagtaaatccccaataaaaattaagaaaacacgatacataaaatacaataaaatcatgtttccataaatgaaaaaataaaagaaaaaaacaacccaaaaaatgaaaaaattacgccctcctttttcttgaattttttcaaaataagccccccatttttatttgcaaagaatgaacaagacaacacataaagcaccaatcaacactttaaagcaaaaatagtgtctaaaaaaataatgaaacataatacgaaaaataacaaaaattttaagaaagctcaattgacaatgtcagtcacacatatttttcattattttttttaaaaaaaattccttcatatttttcccaacaaaaagtacagaatgtccgcttgtctttgttcctgattaaaaattaaactcataagaatagtcagaaattattttatcaagctaatgaactagtggaatgaggtcatactggttacacaggaaaaaagtgttggatattattttacc

SEQ ID NO: 87989 - DNA, 614 bp, Cannabis sativa
agttttgagggtatatattcaccacagttagtaacaaacttttaaaagacatggaaattacacacatgataaggtaaaaaatatatgaataataattaaaacttatctcataaaattttttggatctttgaataaccaattgagtaaagtaaatacgcacctataagataaataaatgaaattcaactaacacactactcaatgataatattaaattaaaatatgagtttctatttcaaaatataaaattaatgaatttttttttaaggatatcacactatatactatatttttaactttttttttatttgtacaattttgcttgtcccggtagttgttatatgggttgatatgtggatttggattgcgttttaagtttccctattagttgttatgtgactttctatgttaatttacgtaaaaatacaaaaataaaaaatactttgaaatgtaaaaataaaaagacccaaaaatttatctttgatatcatatccctcaagttgaggctgtgacagagttacctcacaccacttttaagatgaacataaaaaaggacttaaaccaatatatatcgtaccaaaaaaaaaaaaaacaccagacacataaacaaacta

SEQ ID NO: 87990 - DNA, 929 bp, Cannabis sativa
  modified_base (697)..(715): a, c, t, g, unknown or other
gctgggcctagcaccaggtgtcaatatgggcactaggtccaatttcaagttgccagacggttctgtttgattaccgagtacacttgtatcttaatctttgatgaaaacgaagaatatacccagaagacttctctaagaaaactccttggaattggcccatgttgacaaaatgtcaacctgggcactaggctagcatcaagtgtcaacctgggtgctaggctctctttttggctcccaagtcggtctgtttcttccctaaaagtacttgtttcctcatttttgataaagacaaagaaaaggcacaagatagttcttcagtttgacgcttggaagtgccccaggttgatagaatgtcaacctgagcgttgggtgcctgaggcagctagtgctccaggtgatcaaaaacaaaagtgctctaaatctaattttgatgcctcaaatatgtccgcgacatgtctaattcatgtcccaatacaaaattcgacctatttgcactaagacagtcctagaaactgaaaccctagttggattgtcaacctaggcgctcggtgaaacccaaggcatcctagttaaatttttgtgctgttgtttcatgtatttttagctttgagtcttggacttggatgcttcatgttttcatggtaaagaatactgaaagatagtgagttaaaaataacttggcagaatccaaacaccnnnnnnnnnnnnnnnnnnntcaacctaggcgcaaggctagggacccttcctaggtggactactataactgagaagtactcaactctgggatgttttctttcttaccacatatcaaacattaacgtatgcgtcatcaagacaagtttatggatcaacaagtacaaacctccaagaccacacaatgtaacgtgcgtgccaatatggcacgttacaagctaggtgatgcctacaag

SEQ ID NO: 87991 - DNA, 813 bp, Cannabis sativa
atatatatataagagaatttcaaaatgatgatgtggtactctcaaattagtttagagctatttaactatcttcttaaaaaatgatatcatcttcttttaatattttattatctctattaaaatatcaaggatgataacaactaattaataataacttttaataagtaagttacaacacataataaattacctaacaatttaataacaattaatatgaatatgaacaatctcttaggcctaaattatttttctatcaattaataataataataacaataataataataatatattaatacaattataaattgtaattatcatcatcttttactctttctatcaataataataatcaatatcaatatattaatataaagtagagttttgaagtgttgatgcggcactcttaaatctcctaaattagtttacaactatttctcaatttttttttaaaaaagtagtaacatcaccttataattttctattttctatattaaaaaataataagaggataacaactattcataagtaacttacgtaataacttatcaaataataattacaccatttatttcatataaatataaatttacatgtaatacttacataacatatataatagtaattacttttaatatgtgcaaccactatttgaggctttcatagctttcatagtttgtatttcttgcatatttattagattaattttgtaacaatcaaactaattgtattctttcatacattaaaaataaggaaaactatttgtattctttgaattcctttcctttataagactttttattatgaccaaag

SEQ ID NO: 87992 - DNA, 669 bp, Cannabis sativa
gacaccccattcatttcattcacctgaaacaaaccgaacccaaaatctcacctaaacccgaacctccatttcctccattgaacccgtcgccacagaaatcgcaccagctcccacactcgaaccagtgcaccacttccatagcctcaatccgaaccaccattgttactcaacccatacctcacagcactcatctcaacaacattcaattcacaacccgtaatcacctccgaagcaccccagtcgcagctccaccgtaaccaatatccagcagtcatccacgccaccatcaaactcgccctcaccagatcgcacttcaaccgccagctccgtccaataacagccgcacctatgaactcacctctgtacaaacccaacacgacaacctgacagcgacacagccagcaactcaatcccctctcgactcaatctgtaccatggaccaaacatctacctcaggtccatccatattcgacagcgagcaatcaagagtgagcttttaatttttcattttatattcggacaatatcttggctgccgcatagtgagtgaatgtttgtgtgtgaaacaaatttttttgaatttggattggttaaagtggttcaagaggtagttgtagtctttgatttgagtattgttgatattgtggagttgttgggaggacattgaaat

SEQ ID NO: 87993 - DNA, 652 bp, Cannabis sativa
acatggtgctcccaagggttcccagaatacttgttgtagtgcctggtcgagattccacatgaatgcgggtgtttacttgcccttgcattcatggtttatattcatagctaacttcttcggtgtatgtccttaccataaacccaaatggctataggattctagccaccttcttcatattttaccgccttaggaactagcctatcccaactcctcatgagataaactttctctgtgacttgaaatggagtccaacccatagagatcaaggtttttaccacttccatcaatttagtccattcatagaacacataaccaagagtaattgtagcctttactatcaagagtatttttatactcctgttcctccgtcaagacacattactttccaaaaagttgaccctttcaaaagacttgctcctcttattaacatgaagaggagagccgatcccatgttgtttgagattaaggcatgggagagagattgtcgaaccctctttagcgctaaaaatcttcagaaggttgggttgatcatgtcatgccagagagtgtatgctgattttggcttccttgataaatcttggaccatgccactcaagcaaagtgatgaagatgctcagagtgctactgctattctgtctcaaactgtgacaga

SEQ ID NO: 87994 - DNA, 771 bp, Cannabis sativa
tcaataatagtattatatttaactaataattttataaaataaaactaaataggtaaattcatcttaattattcaattcataatttacataaataataatttatacaaaattactatttttccatcaagaattatctctcgtaaaaattaatcatttctcaatcattctttaagtcaaaccttctcttgtacagtattgtaaagaggtgatttgaggactatggacatatattttgaaggtccaataaatacttgattattattgaactcatcaatagaataatttagtttattaattctattattactttactataaatataaattgcactctttgataatatagaattatatttacataattcttatgtgtagtctattgatataactaatacaattagttcgccctccaattattagttaataattataattggtcaaaattaccattttacccttctaattatctgttgattccttatgtaccattaactcaatgtgaacagttaatctataatctaattatagatttagatcaaattgttagcactcacagaattaacactataagagaatgaatatctgatccttttggaaagcttagattctatttctatataacatgttctcaaccacacatgttattaagctcctaaaatagaagttttaagactcatcttctctgagaaactttaatgagtgaattaaagaacttaatgaatacaaacatgaattcacatgaatactcaagattaagattgatctattaatg

SEQ ID NO: 87995 - DNA, 905 bp, Cannabis sativa
aacgccccaaccacgtaaaaaagtcttcatctcactttcttacagctcattattatattcatattttattagttgccgaaaacctcggtcaacacttagaatcttcttattctaaataaattcatttcgattctgccaagtagtcatctcaattattaatttatttgtacttaaccctaaacttaaattttagcggtaaaatctttaaagttactgaactattagtaaatcttccaacagtctttatctagtacatgttttttctttctttcttttttaaccaaaaaaaaaatcctttaaaaaatgtgaaattacttttaaaatatttcccaaaactaaataataataattataatatttgataataactaagtgctttgaagggagtaaatattgtatttgatgtaaataaatttatgggaggagaaactaaagatttgttcttgagagtttttattacaacctcttagttaattttcgtaccagataacaaatttttctcatttttttataaatgtgttcattataattacaacatcatctttgtaaatttttgaaaaattttaaataatttataatgtcaaaaataagtttgaaattatttgaacacgtgtggtaaactaaatattaaaaactttattttcgataatataaattattcaaatttttttaaaaaaatcaaggattatattataactataaaaaataccattataaaaagaaaaatatttccgtatgtgattttaaaagtaaaaattaaataaaagattgtaatttcgagaaatatttgttcctaatcacaacaataaatacatatgacaaactccaaattgttgatatgaaaattatcacaagttacaaccataagaacacatctcttattagtcttttcttttcttttcttt

SEQ ID NO: 87996 - DNA, 567 bp, Cannabis sativa
  modified_base (258)..(258): a, c, t, g, unknown or other
ggtcaaatagatataaacattacatcattaatttttttttttggcatctttctaaaaagtagtctaatttataaatagactattcaacagtctaattgttttgacttgtcactttcatcacttgataaaaactatacatctaggtacatacaaatatatttaactacttcaagtaacaattgtatgtaaggaaattttttaaataatcattttatgattctttatcactttgattatattggatcactaacaaatatnagtaaattatatattcacttttaggaatatgcaaactgaattaaatagtaaatgtatacatacatatcttgtaccaacaatagtttgaaactattgatttcaagaaataataaaatatgtatatattaatttgcttctgacaatactaacatatgtaaaaatctatattctgaaatttaatttcatgtctattcattctcattagggaatgatatttaaatattcttaatctactataaatttatgatatactaaagtatatgtacaattcacatcctattcataattaaatataattttatcttgatt

SEQ ID NO: 87997 - DNA, 815 bp, Cannabis sativa
  modified_base (549)..(557): a, c, t, g, unknown or other
aactttacaacaactataaaacaacaaaaaatgttactacaaaatattagttttcgattgcatgtaaagcatgaggcttctgtcatacttgatttttaatactgagtagaactttttaatttgataatgtagttgtatgtgtgttgttgcatattaataatatagttgtatctgtcgtttgaaatatatagttattttgttggtgtactacaattttgcgagaaaaattaattaaatatacaacaaaaatacaactagaaaacaacactaattaaatatgtaaattaagtagacatcaaaatatattggtgacaaccttaaaaaaatataaatacaacacaaaaccaatcataatacatgtactcatgaaagaaaaaaaaaaaaaaactaaacattttaatttttttactgtttgcacaactaataacaacacacaaataactgtataacgatccgacttaatacacatcaccatgctgtgacaacaaaaataaaaattgtaaaacaacacactaatatctcacaaatataataacaataataataatnnnnnnnnnaataataataataatataacaaaaactttaaaacaactacaaaatacttatatactaacttaaaagtatatatgcatcctgaaaaattaagcttacatatttttttttttgttgaacaactaaataacaactaacaaaaaattagataatgttgtccctgactttgaccaatatacgtggaccaaccagacaaggacacgtggatcaaacagcttagcattcaaattatttgctaagtctttatgtaataaggcagca

SEQ ID NO: 87998 - DNA, 611 bp, Cannabis sativa
cagttctcagtaatcaatacacatgcgaaacaatccatttttctttttcatgaacaatattggagcttcccagggcgatacactgggtcaggtaaaccctaaatcttgcatcccttacagtttcaactctttaagttttgttgaagtcatcttataaggtgccttagaaactggctttgctcctgaagctaaattaataacgaaatctatttcttgttgtgtgtgtaaaccaggttattctttgagaaatacatctaggaattctttcactaccctgatcattttaggcttgactatatctggtcttctagtatctattactactgctagaatcctatgcatccaccatgcaataggtatttagctttcaaagctaaaatgatcaggatttgagaaccctaaatcgatcccacaataataaatggttcccttccctcaagcaaaaatgtcaccaccttcctcttataatcaatagtggttgcatacttggataagaaattcattcctaaaatgatgtcaaaatcctctatggctagctcaactagattagtgctaaatttcctaccctccactctaacctacatagccctaatccaccttctagagataac

SEQ ID NO: 87999 - DNA, 764 bp, Cannabis sativa
  modified_base (120)..(127): a, c, t, g, unknown or other
  modified_base (301)..(316): a, c, t, g, unknown or other
ttttgttaactaaatttgagcctcacagtagtaatttcacacagaaaaaataaaagctatagaaataaagatatgaacacaaggttttgttacgcagttttgcagttaaaattctgcatnnnnnnnnagtcaatcttattcagatgtctgattgtttattagggcctctcttgtatgagttgtttcgtcccttttttgatcttctttgtcactatttataattacatagtggacagttaattacaaagttgactgggatatgtttacaataatcatccctaaaatcgtgggatttgattannnnnnnnnnnnnnnnaatgcggtttatgatttgaaaatcatatagctgtgattttcacgcttttactgggttaaaacaatcgtgtattaaacacgtctttagctgttgtatctggagatgtctcgatagaaacttagttcctgtgatctcaatagcgagttggggccattcttccttctgaggttgacaatgtatgttttgtgtcgatcacagttgttatcctcaaagaattcttcgaggctcacttgaatgctatcttctagctcaccaggattctaagcctcgctgatgctaacgggatgaagttatatgaagtcttcccataatgagatgatcacctcgcttacttgttcttgagccgatctgacttttacaatttgtttgttcattgtatgcaaaggactttcacgattgatacgtgtcgctttctttggtgcctcgctattcgcatttagcgacatat

SEQ ID NO: 88000 - DNA, 722 bp, Cannabis sativa
gtcctttgattacacagagattgatttcattatcaatctgtttgtacattgaatataatatttaaatcaataaaaaacataaatacaataaatgaagagtagtttcgacccaattcactaaatacagcaacgtatgcgactttcatagtacgagttatctattcatattctcgcataagctcacaggcttaagatgcgtacaagactaatcgagtctgagatgtttgcgtcctgctcgagtcgcatatacggacatcctgcaataagtcgataacttaagacatgcgagtccttatcgggttatcgaggttgttgggtcatccagaccagctcacagagtaaagatttgatctttaccacctcgtagggagatctttatagtcctcgcatatatctcggtatatgcgatcttaaactgatcctcggtcctactttgtgcgaactatgtgaatgcgactagactctgtcaaggtcacatcattccgctgagtctgtttcaggtgaggcttacactaagagatttcctattgacatctcagccctccttgaggagagtgagtccacgtgtcatttttatgggagcctggtctcgagtttttaagtgaaaaattctcagtataatactaacaaacaaactccctatgtaatacccagaattaagaaaaaggattagcaaagccctaactagataattatgagtaattgaggaattatattattat

SEQ ID NO: 88001 - DNA, 748 bp, Cannabis sativa
aaaactttatcatttttgtgacgattttctaaaagccaattctttcaaaacagatatgtgtaacaacaacaaaattcacacacaaacacacacttacaaataaaattaattaataaataaataaatcagctaggcctaatcaaaattttccgtggtgatgagatccaatccttaattataatattttcaataactagttacaaaacattactagtatgaaaatcaatcctaaactaattattttagaaagaaaaaaagttggttatatatatttgttgttttaacaaactagtttagttttttttttcttttaagaaaaaggtagtttaatttttgttactgttaccaaattttgtgaatcctcttattatagtcaaactttgtgtaaagtaacatgatatttcgtagttatatataaaaagaatcgtagttaaaattaagatgcaactaaggagacattacaactaaatttgctggaaacagatttatgagaaaacaagttcctttcctttttattcagattttaaagaaaacattgtcaatttatatcaatgctgtgtaacagtaaaaatttaacttaaaattgtaaacttcagttaaaaaagaaaaagatctgtacagtgtacggttacaaatttaaaaaaattcgtcaacagaaatataaatatcatatttagaattatccctgaatttatgttcaaaaaaaaaaaaaattatccctctctacacttttgtaatttattctttc

SEQ ID NO: 88002 - DNA, 527 bp, Cannabis sativa
ttaattagagttttgtaaattataagttattttttgagtagttattctactagtatgggccgggccttattatttttgtttttgtttgttgagtaatgtctaacattatttgcagtatattatttggtattcttttactgttatcaacaaaataataatttaatagtggatggttgataatgtgcatgaaaatttatactcatataaatatttgtgtatatgaaattaacaaaaaataagagaaaatgtaaaaactttcgtcttaattaagtgaatttaagagataacatagagacatgaaatcaaactttagaacataaaaacatgtaaaaaaaaaagagtgaacagaggtcccaacattgagaagttacatactaattttcaaataaaacatgaacacataagaaaagttttggctggtttactcagatcccatcattatctcctgcaaggtgtaaatagttttgaccaacatgaactcatcagcctttctctcaatctcaacttgcatattcctgcaaaattca

SEQ ID NO: 88003 - DNA, 719 bp, Cannabis sativa
cttttgatgttttcttgacaaaacagaactttatatgctagaaagcccagttacagtccgtggttgctctttcaaccgcagaagcagaatttatggcgactacgaaagctttcaaggaagcattgtggctttgcagaattctttatgagttaaaacaaatcaaaagggaagtgactgtgctctcagacagccagacgtccatttacctttgtaagaatccaatttatcatgaaaagagtaaacatatagatataagactctactggattagagagaagatagaagaagggttggttgatttagagaagatcaatactgaagatagtcctgctgatgttgggactaaggtcttaaccttaaacaagttcaagcattgcttgaacttgatcaatctcagaagttagcatactaagattcctggaacaccaaccaatgatggttgcattctttctttatcttcgtcattcgtttaatttgaagtaactcggtggaatttttggtatagttcctccaaatgaaaaggtctcaacaaacatcatttctagaaagttgttctcggagaagccaatcccgaaaggagtcttgtggaatgatagtcgagtctggaaaggtattcccagattaccatcatgtccactttgttggaatatattttactagatttactaacaagtatgtttttaacatcctaatatgaatttctaaaacgatgaaaataa

SEQ ID NO: 88004 - DNA, 569 bp, Cannabis sativa
taggtcttatttttcttcaaggcattattttcatcagacattgcagcaaaccattttgcatccttgagagcacttttgacaaaagcaggggtaagagaggccacgagaactataggttttcgaatgcttgattttcctagagttgtcatagaagcttattgaccacactaacaacaggtgtactagtagagacagtgccaacagatgtaataattggagcaacaatatatggtgtttagcagagacagcagtagtggaattcacttcatttattcttggaaaagagagagtctcagttggagcagtgtgaacaccatcttgagtggaagatgtgttactagatgctacatgagctgtgtaatctgtaggaagcacattagtaggagcaatagcaacaagttcagcattattcaaaatgtcaatttgggtgggagcaaattgtggagatgcagcagtagcagtctaaagcgtgtaaaaccagggggagggaaaggaagagtggttctctgaggtaaaccagatgggggaacattgtggaagataggaaaggatgatgaggaatgagatga

SEQ ID NO: 88005 - DNA, 501 bp, Cannabis sativa
agaaatttgagtttgttgttattcacaacattttctttgtgtgattggtttaccactgtagattgtcttttacgttttcttggttctaaaataaggtttttacaacatagtaatcataatgaccaacactcaagtactcaacaatgtgttttgaaataaaaagtaaggtaacaaggagtaaatctaggatcattaaccaacaacgtcaatcatgatatgcttagaattcactaaaagtcaagaagcagaaaccccaagctaggtcaataatagctaaaatacacataacaaactagtggaatacaaagcttgactacccagaaaaggcaatccaaaagctgaaatcatcacagcccaaatgccactaaatctcaaattcccataacttgacttaaataataagcatcagcatcaactaactcgaagtaataacatttgggcaaaaatgggtttcacataataataacaataatagggcaaatattgaactcaaaaaaagaa

SEQ ID NO: 88006 - DNA, 647 bp, Cannabis sativa
cccgagcccgcgacagttccaagctagtagcttcatggggacgttggagacttttctgggcaagtctccatagccccgaactgaaaatcctgtccttcagcatttgcttcaatgattccagagcacttttccgtaggttggtgcagtttgtcactctcttccaattcttctattacgcagcttgggtgctctgattttttcttttcaatcaccacaaaatggttgtctaggtctatagcaaggtcaaaacacttagcattccataaattacgatagtgtttagttttacctctagaggaagaattcactcctcttttcttcaggctcttgggggttacacccgtccacgctttgtcccttgggggtcttccacgttttttgtcagttgctaccgaagtggaggttgggtcatcacatttacggggtctgcctcttttccgtttggccggcttgtcgtcactggagcctggggagaatatagaagtcgtagtctcctttatgtccggttgaagttcagtatttgccaaagtattttgactagcatcaagtgtgggaatagtttctgggcttggtataactccaggtatcatataaaatccatccatggcctttcttttcctaggcccatgttccgattcatagcagtt

SEQ ID NO: 88007 - DNA, 794 bp, Cannabis sativa
ctaatgcaggaaaaaaataggagaaaatacagatttttctgccattaatggcagaaaaatttgtgttttttctttttattatttttacattccccagggtataggtgacggttttaaaccgttgggaaatccacattagcgacagtttttaaccgtcacctatttttcccattttacgacggtcatataggcgacggttatataaactgacaggaatactttaagcgactttttaaaaacgtcgagtaaaactatttttgtagtagtgtgtatttctgaaaagggaaaatcttaattttctatcattaatttctacaggtttcttgatctgtttacgcgaaatcttttcttttgcgtgttcttaggctcatagctgggttctcacgccgaccacttcgtttagttcttcaatttttctcagtaatttcctctgtcttgggcttttgttgattttatatttttatggggacaagactttgatttgctgagcttctcgcttctgaagttttgtgtgtttgttattgtatggaatagtatgttttgttctctaacaaattacataatgggtagaattatgcaactacaagagtcttcgtctgggctccgtagccgaaccatcaccaagctcagaattaaatattgtctttaaaaatttgtttatttgaaatttaaactagaaatcgtgattagtctttaattgataaagttattgttgtcatataatttttaaggttgatatacccatcaagtaccttggttttgttcctatcggatgatgcagaacttgaacacat

SEQ ID NO: 88008 - DNA, 1258 bp, Cannabis sativa
ctgaaaaatgttctctttattcctaaatttagattcaatttattttcagtgaatgattttttggaagataacactaacttgttgttgttttctgaatctcgctgtgtcattcaagacccctctcgaaattaacgattgggacagctaagaaagttgggaagctgttcttctttgatgatttgatttcagcaaataatacttgtactaatgatgatccttggcattttcgtcttggacatccttctatgtacatttctcattcaataaataaaacattgcaattttctttgaaaccgaatgactctcattgttctatttgtcactttgctaagcaaaaacgtcttccttttcattctcaaaacaatatgaccgctgccccttttgatttaatacatattgatacttggggtcctttccatattgatagcattgaaggatatcattattttttaccattgtggatgatttttctcgttttacttgggtttatatgctcactaacaaatctgatgtttcttttcgaattcctcaattttttcaccttgttgcaactcaatattctatgaatattaaggccattcgctcaaataatgccaaggaatttaatcttactgccttctatgcttcggatggcgtcaaccattttcattcttgtgttgatcggccccaacaaaattcggtggttgaacggaaacatcaacatatattaaatgtggcccaggctcttctttttcaatcacatttatctttgccttattggagttatattgttaacactgctgtttatcttattaatcgcactccttctaggttacttaagatgaaatctccttttgaactcttacataagaggcaacccccttatgaccatctaaaggtttttgggtgtcttgcctatgcatctactcttgatgctaagtgccataagttttctcctagggctaaagcttgtaatttttattggctaccctcatggtatgaaagcttatactttattagatattgagtctcaagaaatttttcattcttgtgatgttatcttttatgagaatacatttcctttacataataagactttggatcctaacattcaattttttttttaatgcatctcttttgccctctacaggatcaacacagttccaaggacaaaatgactctttgggtttcagcttgccttaaaaagaaccaccagcagccactaccacatcaaaagacactgccacatcttcttcgcgtgtccaaaccaccaaatctg

SEQ ID NO: 88009 - DNA, 876 bp, Cannabis sativa
catctgtttaccgctttccattttaggcagtatgcaagcatctagaatatatatgtgctatgtgatgtcatgctttaaatgctatttatttaagtgaatattatatgaggtaaataggtgaggtaaccagtgaagtacgttagaatctaattggttaactatattttcacatgatcaattcaccttaacaaaatgtgtatgaatataaagtttgttcactagtacattgccacattaagtatattgttatattatgaatatatcgtaatatatggaaaataatactcgatatataatgaggacatatcactatgattcatatatttattatgtaatgaggaacattgagttttaagtggtaaattaatttaaatactgaccaagtgggagaatgttagaatattttttatatggtaacaaatcaaatatttgatttgatttgatttataaaatataattaattatttactaattaattaaaatattctaattatggttagatttaattaccaaatattttagttacccattttaatttcaagaattaattgtcaaaatattttacattaattgtggcagagatcttgatgaaaggtctcatatagagtctcggtcaccgagctcagtactcattctgtgaaacacattaaatccatctaaagagagttgagagagcttggaaacccgataagccacatcaattggtttttttgcagatcaaaacttgtgtgggacaaaagctcaaaaaatcaataaataaaagtatttcgatccttaattataatgcatatatattttattaattccgtacctcatacattctatacatataaatttctaacaaagagaacccacaaattatatatagtactatag

SEQ ID NO: 88010 - DNA, 789 bp, Cannabis sativa
ataataacaaatatatgataaaacaataaaaagacacaggaattttgtagaggttcaaccccaagcagtttggtaatagcctaatcctcgttatttgtatatacttaagatcaagaagaaagattatttttcttatagctcttacaatgatatctctgaatatataattcttagatatatttaaggtataatcttagctcaactacttttcgatcgatcctttgcccagtgaatacacatcactatttataggctagtcagcttggggaggaagagtttcccctctcgttacaatgtgtataaactgaaagatcatgggatcaatgctgaatgcaaagatcgtgggattgaggctgaatacactgataacgggatcgtgtgtatgctatatccacgtaaattcattcctgagttattggaattgtgctgatgactcatgatgcgaaagttgaattcgctaagtgttggttgctttgcgctgatttttgaatatcttgccctaggcatgccagtggggcgtcctgctcggactatgcttcccgagcagatgttccaagtggactcaacgtgtcaccattcatgcgatgccacgtcggagtgtaaaaattaggataacaaagatattttaaatgccatgtgtttagttaaaatatgcaagcaacaatcacaaaatatgaggaagaatgggtgggattcacttcttgatcaagtctcttctctttccaaagatggaagatgtttggatacatcgaggtagttcgcgacgcaaaacttaagaaattacaaatt

SEQ ID NO: 88011 - DNA, 686 bp, Cannabis sativa
aactatattaactcgtaaaagagtgttaggcatcacaagtgcttccatcgtagtggacacaatttgggcaatccgtaataataaggtacacaactccttaccgagtgatattatgtctgccattgactctatctcccattgttatacagattatgcctcctgtttgttccctccgacggttcctgcgtcggatgactggatcaaaatcaactgcgatgtcaaagttggtggagattccatgtgcttggcgaccctggcaagagatcacacagggacggttgtttgggccgctacttccagactcaacttcactgacccgctgattggtgaggtggcgacgtgtcatcttgccttgcattctgctagagtcagaaatcatcactatgtcttggtggagagtgattcagaaaatgttatcaaggcgctgaaacgacttcactatatttggaatattgataattatgtctctgtttgtaatcaactctctaagtactttttatcttgtaattttgcctttatttttagagtttgtaactttgctgcacataatgtggctaaatggaccttgacccagaatattacaggtttcgtggagctatccttgattcctaaatctaccctgtgtaatgaccgagaggtctaattgctttaatctataaaacgcttcattttcaaaaaaaaaaaaa

SEQ ID NO: 88012 - DNA, 1261 bp, Cannabis sativa
atagattctttctaagttttttttgtaattgtacgaattacaagttgccaaatttaataatatctcgatttaatttttgaatttaaggtcgaagtgaaagattcattgtttgtcactctaaaatctcttctagtcatttaggagagcattgctataggttcctaaaagcatgtcaagtcaaccatactcactaagggcatctccaaggagaaactcaaatttagtgttaaatcaacacccaaaaactactatttcaacactaattttttttttttttcaattccaaccacaacactaaaaattacactaaattttatattctttattattttattatttttttaatataataagaatattttcatactaaatatatataattatttactttttcttctttaaagtattatttaattattaaaaactttttctaaaaaaaatagtgtggtctacagtgtcccactaaatttgatgggacactgtagacaaagctatatataaggataggtttagtgtcccattggagtaaatatggtgtgaaactacactatatttagtattttagtgtcccattggagatggcctaaatacattaattagttaaaacagagagaaagtgaaattgaaaaaataactttttataataaaaaatgaatagaaaactctttaaatatagagaggttcctacttttttgctaaattttttaaatagtattttaatcaaaagtactattacatttttattattttataaaattaatttatagatactcaatctatatatactatgactactcattcttcttctttttctcccatcttccatatctatctctaaacactaaatatacatcctattgtgaaaacatactccattcttcatcatcaactgatatttattactatggacgcacaaattttaaaagttttgattcccataggtttaattcctaatgaaagtaaatctaataattcatgtagtagtgtcttgaaaattacaatatatgagattcgaaagttaattaaaaatgagtgaagtaaccaaaacattttatacatggtattaagttttgacacataatcaattgtcaatatgggactataacaatagtgatctccaatccatgttttacactaactttagagaaatggtgcatgatatcttagtttagttacatgctttttattgttctagctcttcaagcatatatcatttataaagaagaaataatacaagatctttttttacttataatcaatg

SEQ ID NO: 88013 - DNA, 599 bp, Cannabis sativa
cagcaaaacttgggtaaggaatgcattttattatttgaaaaaaatttacaccgtaccagtatcaccaatgctgctgagatctttacaaattctagcaaactccgatgaaggcatcctaacaatagcatggtattcagcttctggaatcccaagatgttcactatcaatatccattaacttcatctcaaagtcagcaattttgtcctgagctgcaatccagtatacacacaataagaaacaagataataaaaacaagcaaaatttataaaattgcagaacatttacaaaatttctttttatcttaacaaaaatttacagtaaagaaagcccaaaatccagatcatcaagattctctttccaaaactcaatacaacaaagtaaatgaacatatatcctccacattgttccttctaagttcagtcctagtgttttcagcagaacagagtacattttatccaataacaagtaacactcaggcaaatcaaagtttcagtgatttaataataaactacaaggaatcatcttagactaaaaatagctaacaaaaataattcaataaaaatgataacgagaaataaaaactgtaaaccgaccaaaaa

SEQ ID NO: 88014 - DNA, 648 bp, Cannabis sativa
taacaaaatacagggtccaatctggaacttttgcaaaacacagggtccaaaatggtatttaccctttatgaaatacattatacaatccaatcatcatactttacacagagataaacttttctgttctgtctccacccccatgaatacatagtgaaactgtcctgatagggaaaattcacatgattgcttgtctatgtgaattgatattatttatttcaaatattttttagagtaatttgtggcataaatatttaagttaaattttcagttgcagataaatacttaagtttaattttttacagcaacaatacttaagttacaattttagaatatttgtaagtatttgactgttaagtgtcaagtaaattaccacatgacaatcgttgattgattcaggtcattttatttttcatttaaaaattgatttaaatatactaattagaaaatgacattaatgacttgacacttaattgccagatacatatggaagttctaaaaatataatttagttattatcattgtcagaagttaaatttagtaattatttgcaatcaaaagttaaacttaagtatttacgctgtaaattatttaattttttatgcctccaatatgactcttgtagtcatgggactttgatggcctcatgtc

SEQ ID NO: 88015 - DNA, 821 bp, Cannabis sativa
gtccattttgcggcgcttttgtcggacacctcgcacttctgggtcaatgttcaatcgatgacacatgacctgcggtgatattgcgaccatgtcaaaatgtttccatgcaaaaaacatccaaattttttttgagaaaagtgacaagcttttctcgctgttgaaaggttagtttagagccaatctttaaaactttactatgatcaaaaggatcgattggtacctcaatggtttcttcgacagcttgtgcagtattggtgtaatcaaggatccacgaatcctaatcaggtttttctacatgcaatatctccgcaattctgaaaatttctcgtcgaggaggtggtgcttcaagtaaatatatcacatttaccgatttcttcttttctgcgagcttcagtgttgtgttatagcactcccatgaatccgattggactcctcgcacggatcccacacccgtgagggtaaggaatttcatcataagatggtagatggaggttattatcttcatatctttcaaaatggggcgacctatcactgcgttgtatgtggaatactggtcgattattgtaaaatcggccattgacttggccgtgacagggttggtttccaaggtaatttgtagcttgatcattcctttcagtgcaattgtatctctagtgaacccatagatactcgaggttacatgttgcaaaaccttctcgtgcaaccccattcgcttaaaagcttagaaattgagaagattaactgaacttccattgtccactaaaattcagtggacattatctcctccaatatttgtgacgatcacgagtgcgtcagcgtgt

SEQ ID NO: 88016 - DNA, 619 bp, Cannabis sativa
tagcaacacaatctcacaagctatattgttagcaattcttacagctacccaatctcatacagcaaccatattagtaactcttacaatagctatgttagtaatttagtgttatacatcaaccatgttagcaacctaatatcatacaacaactatgtccaatccaatcttatacaacatgtagcacaactcaacttcatacaacaaccacattaccaaacctaaaagcaacttagtctcatacaacaaatatttcttatttgaaattataatcattatatatacatcatttgattttttaagctataaatttttatttttttctcattttcgaaaatagaataacattgtgaaataatctaaaacatgtttatcattctctgtatataaataaattattatcttgactgaaagacaaagaatcaaataagagcaaaatgaccaaatgaaaacattaaaagtagccaaacaaatcatgaataataattatatgttatatcactcttcatataaatgcactattgtatacatgtatatatatacataaatcttatatataaaaagatttgctaaagtacatgtatatatatataacaatcatataacactaaagtaattttat

SEQ ID NO: 88017 - DNA, 1448 bp, Cannabis sativa
cattgtcaagccaatatcgcacaaggccaacttgttgggggaagaactttctagctagatacacatttaagtatagtaaccttgagcctgacaagaatatatatactttagaaatactttacaaacacatgcaatgcacttcaatgtatattaaaaagggttttttaacagttaatgaaaccaaaaaaataattaaaaaaaaatgtaggagttcataaggtatatagaaatcttgagtagatgagatgattagtcatcaaaaaattcttaagaagtgttacttaatgttgatgggtccaatgtagaatataagatacaacttttgacacgtctatttgtatttgattcagctactggaatttaaatatttgaacttctaacttttaactacttctatagtcttatgtactgtaaccattaaattgagtaagatggggccacgctaaaatatgcatgtgaattctaacatactccaaaaggttgctctatctagaaaatattagaacacacaagtggacgacgtacgttaggtagcttttatgggcttattaatcaccataatatttcttctgtctttacatttttagaagcatttacttgtccaaaaataaatgttgatttgagtaggaaaaatataattttgcagaattataattgtttgaagccaatatatatatatgtattgttatgtttgagaagacagaaaatgaatgtgtaatatttattgattggaaattgaagctgataaaattgtttatatgcaaagggattacaccagctaagagctaacagaaaacaattagtagtagaattaacaaactaactgtaaagaacaaactaatcctaaccaacatcacgagctgtattagacagctcaacaagtttttttccttaatatataggccaccttaaaacttagtgtagtggagcaaaccatctcaagtttgtctcttaagaaaggaaactttgaattcgagattggctttgtaagtgaatctgccacttgatgttctataggaacacggtgatcaagaatttccttccgaagcaccttatctctgacaaagtagagatcaatttttatgtgcttggtactagcatgaagaacctgatttgctgcaaggagaatggtgctgagatcttcacaccagatgagaggagcagaggacaaaggcacattaagttcagagagaagagattgaacccaactgattttaaaaaccacagaggctaaacttctgaattcagtttcagttgatgatctcgaaatagttttttgtttctttgattgccattgagattttatccccaaaagatgcgatatcctgtgatagacctcctgtcatcaggattagttggccaatccacatcacaataagctttaaatgcaactgtgaagagtttctgatgtgtagaccataatctcctctctttctctctctctctct

SEQ ID NO: 88018 - DNA, 1638 bp, Cannabis sativa
cagtgatcaaaacaggtctcccaagagaaatgagcagaagtattcggaaaatcatcaacccactccttgttgtgaaacacatgatctattcgagaaaaaaaatcatattatcctacttattggaccaagtgaaagtcgaacccgtgcgcttcataggccccacaatgagcaatccagttatttgagtcaacaagctcttagttactaatatcattctccctgcctgtcatcatgatgaaaaactgcattaaagtaaccaaggatgatccaagctttagaaacatttatcattgatagggcggtccaaagttcactcctaccttctatggtgttggctgcatagataaaggtagcaaagtaatcttttttctgtcctatgattttgatatgacaatgcacatgttgcttagactcctcaatgatttcaatattaacaaaattcttcctctagagcaagagaatccgaccttccaccttagccatctttttttgaatttggtctcctttaatcttggtctcaactagggctccaatgccaattttattaactctccaaacttaagcagcttcatcttgcttctcctttttattcaaacccctaagattccaacaactaatattgtaaaaatccattaacaacacaagctcaagtcattctctccctctacttcttcatgctgtccccttgttaatatcgcaaaggaattcctaagcaatttctcacccttgtcactagctctccttgtcgaaccagagcctttagacacacggttctttagagcaatccaatccccactagctgtttagacagcagttttttcccttggccattgactgttttttcttttattacagctatagtagccgcctctatcactgaggcagtagcctcagcctcatccttgcttgcagtagcaacagaaggctactcaattatagcaggaccaccagcatcattcccctccttttctgtcttattttcttgctttttttccacctctttaggcttctcaaccttcctacattcagccattatatggccaaacccaccacaatgtttacacttaaccgggagccattcatattttattccttgttctaaaagctacccatattcattaacaaaccagaatgagcgttccgggttctccgttatgtccatttcaacaaggactcgagcaaattgaactcttgttctttccttggtgtgcttatctaccattatcggcttccccacagtgctaatgagaacactcaaagtttttttcccccaatattgaagaccaagactaggcaaccttatccaaagaagaaccgatttcacaatcctaacaacattcaagtccgctgtccatggtctaacaataattggtttcctgtcaaattgaatcattccattctagcaatttgaactattcctaaatgcccctaaattctacgaataaatccttcaaagaccactgcaggaacattagtacccaaaaccatacaaattacagctgatttcaaactctcttctttcaatttcaccccttccatatctataggagctatctttctaccctctttagtcactagttcagtataagtcaatttagcatcagagtttaacatcttacctcctgagaaatattgcca

SEQ ID NO: 88019 - DNA, 1094 bp, Cannabis sativa
ttaattcaaatcaatcccaaatcttttcaaaacttccagaacacctatatgcatcataataaaccaactccaagcaacagaattcaacaaatcaaacaaaaccccaatccaccattagagctccaacttaagctctaaaactcaaactccaaccaaacactaaaataacaaatcaattcagcttagagtagcttagataatcaccaaacaacttccagattataacctcaaacaataaatatcatcacagaaccaaatttcacaaattcaaacctaaaaactctataataacaaaatagaaagcaaagaggaaaagcaagagatgctaccttaaattgaagcactcaaattcctctgaattcacagaattaagctgaaaagaaatccacacttcagctggacccttggtggttcgaaagaaaggaagaaggagagaaaaaattaagaaaaagatgaagttctagctttaacctaggtaatttcagcaaaagaaaaaaaagaagaattgtctaaccttgctagaacttagagaatcacagcaatgaattctctcttccttgctatacttgaagattaatagagaaggaaaggatgacctaggaaaaaaatctaggtttctctcaaattttccattaatgacaaaaagggttcaacttttctctctttttttttaaacaatactaaactaaataatcagcatataattgcataaaagacaaaatacaactcaagtccaaaagaccactatacccctccaactatttgccaaataactaataacccacaagggtaattcggtcaatattaaacccgaaaattcaatacttagtaaaatatcccgaacaaataacatacaacaaaatataacatatgactctctaaaggccccaacgccgcgttccacagcttccgaacaccacacagaaattagataaatgacataaaatagcataataacctaaatatattaaatatattcccaaaattcacatttcataattattaactaatctcatacataaaccttaaataattcaagatattaaccattaactataagcgctctttacaattatccccccgttaaaaagatt

SEQ ID NO: 88020 - DNA, 2770 bp, Cannabis sativa
attatagaattataatatttagtattatatttaaattttattattatttaatttaacttatttataattaataaatttatattttattattagtaataataaattataaggttttgtaatatgagccgtgcttttcggacttgtcgtgtactatgtattttgggctaatctattcgtgcttctcgtgctgtatcgtgcttaaagatatattttccgtatcgtcccaaatctcatattttttcgtgcctaatcatgctcgtaccttccgagctcgtattaattttgtatcgtgtcaaaaaaacccaatccatatttacaacacttagctcacacccacacacaaaacacatatttatataggttggtatttaaatttggaattgtgttgtgttgtgggacaagtacatgtggagaggtttcttggtgtagggacttataacgacaaaatggttctcaattagttcacattataattaagtaccattttgtctattaacaactcaactcaactcaaattaatactcaattaatatataataaacttcttatattatatttttgtcgatcacataataaagttgattaatttttctcatttgtggggtacatatatttatggtactttttttttcttctatccgccatgtccgcaatctatctcttttgaccatggaaaaatattatattaccttaattaattttgtcctaataatcatatttacatttgaccaagttggatcgatacactacattattatttattataaagtattatatattctatggtgatgagatatgtttcgggttgaagattgagcatgtagataagatatggatcatttaattcacaatatttactaacttaggagacaaatatattttttaataaaagatcatgtttgtgaaaaatataaattttatagaaataaaaataacaaaacataaggataaaattaaaataatataaattttatgagtacaaaaattgaaatgtataagagcataaataaaatatatgaattttgtggggtataaaatataatatttaaaagtttatatacaaaaaattaatttgtaaaaagttgaggggagacaaatgatcattcaccctgttccttctgcttataatgtatgcacatataataatatttatagaaaaaaaaaagtacatcgaaatattaataatagaagaatatttttgaaaaggaaaaaaaatctaaaatttgttaatattactaataaattaattaattaattaggttataattatgagaaggcagcatgatgaggtgttaggagccccacaagcaaaatgtttggggaaaccctaaccatggaaacggaatccaaccatttttgataattaatttaactaattaataaaatataaaaataacacttctattttagagccaccctaattttttaataatacaataattatctcatatatatatttatatatatttcgaatttctcatccatgcatatatatcataaattaatctttattttaattacctagctctatggactatgcatgcaccaaattaattatataatatttatatatgaaattatgaatatgcctttttcatattaagtctaataatttcttatagattcattccttgcatttgtcttttccaatgttggaacttggaactatataatgggaataattaattaattaattaattaaagtattattatatataattatatattgttatttgaatgattatcttaaaaattgttaatatacacatataacattaacaacaatatttatatacgtgtacaagctctagctaactattaaataattttagttaacgacaaaaataaataattgataatattatatattctaattaattaattaattagcgtgtagttttcatcatgtgtagtatatatgcttttttttttttttaataataagtggttgatgtgattacatgtatttaaatgtttttattaatttatggtatcacctaatcatcaacaacagaaaaaaattgatatcacctaacaaaaataattattaactatgcctataattttattaaaatatttaatgatgatcacttaatttctttttataaattaaaagccttttaccatttattaacttgccaaccaagctagaactaaccaatattattatgtattataattacataatatattattttttttatataaattttttatatagatttttttttcgtgttttataaaataacataaaagtaacaacgaaattatataaaaataatagaaaaataatatctaaacaataataaaaaataacatacaaataataaaaaatcaataacacattaacaatagtagaatataaaaatacattaaaataccatattttttaataaataaaattataaaaatcgtaaaaatatttaaaatttcgtataaccgtatttttattatttttatgtatttatgaaataatctttttttttaaacaccaatgggaatatgggatgaaagaatatacaacattttcttaaaaaaaaaattgcatgttagggttttattttagtaactctgcatgctgtggttaaaatgcgaataaacactttgaaaaagacggtttattaaaacttggttgttcgtttatttgaaatgatttttttttttttttttcaaaatgtacatgtgtcattgttattcatcaatttaattagtactgattttaatttaaaattaaagtttttatttttatgaaattatcgaagtgtatcaa

SEQ ID NO: 88021 - DNA, 1255 bp, Cannabis sativa
atcattaaattttaacacatacttccaatcatccttccactctcgctactgtaaccggggacagtttcttttccaatggtctactacccaacactggatgcaggctctcgttagctttcactttactggtgtctcttacatctcaaccctctggatgggtttgcaaatctttattcccaccatgtcagaaactttggttacctcaaattctcctactagaacccataactgatgagttggtaatcttttcctgtgcgatcattagggttaataatctttgcccgatctaacattggacctttactttcatgaatctcccttcatattatttcttttgtgatccaattctggcaccctcagcagtaagggtcagctcaaccacctaagcataaaaccagacaactcctagttgtttagccaatatctacattctgaaggatatactcattccatcataaagccttcctagtggccctatcagttgcttcattaaaacaaaatttgccaatcggtctagcttagtgtcattctccatcattgcgctgcccgaaatcaaccatacaggttctactaccttatcactcaggtaatctcttacttcatagcattcatttgctctcaaacctgtggtagtggaagatttatacccacaccagctaccctgagcctaacaggctcataattttacttactagatcacctcaggtacacctcctactacacttgtgatcattcctttctcatagttaaaatctttctaactagaattaatgctaataagcattaccgcacacgtatagacatacttagcaactttacatcaaaaacttatgacgcttctctaacaactttacacatatcaaataagaagacaattcaaacaattagtagaaaaaccactaatcaactaacaatcagcacttactaagccatgagtcaaatgagtcattccagccaatgtacatatcgagcaagtcttcaggatctttaaaccttggtcgctctgataacatgttgtaacgtgctgaacctcaggaacaccacgtgtgtgtgcttttacaatcttattatcaccaatctactagcttaggaaaagtgtggtttaaataaaatttgataattaaaaatatacatataaattttctatctttaaaaataccactaaagtatggggatcccctctttataaaatttctttataacatataacaaaacaatcattaccaaaataaagttatgttggaatttattttac

SEQ ID NO: 88022 - DNA, 818 bp, Cannabis sativa
  modified_base (747)..(780): a, c, t, g, unknown or other
attttctccactaatttccatggtgttctgctgctgctgttttggagtaactgagattgtaagttactcaaaatttacttgtggaatttagacaagagggtggtgtggtgtggatgaaaatagagaaaagcaataaatattaagaataggtgatgggttctgctggagatgtaaaatgctaaagatattgttctcctatctggtctgaccacatttgggtcctcttttgtttttgtgtagatttttagggtgctcaacattgtaccactatcctaagtttgagcaactcttaatagatagtacagttcaccttttctatgttcttcctaatatttttagtttaaattaaaatcatttacatatgccaaagagacaaaatcaccttatattactacaacactgagaaaaaaagtttcaattacttgtgttttcctttttctttttttaaaattatgtgttagaagtgggaagagaagtcttcatgttaagttactatcagtcatacctggcctcttttcttgtttatttgtttgttgatattatcttttctttttcaaattaaaaatatacataattattttatgtgaatatctgatatttgaaagggtggttagtaggagaagatgagagggttaagtacttcttggtatgctgggtcatctggtgtttttaccatctaacaaatgtattaatgtgacttatctgttctgttaagtacttatcttttatgtgatatgatgaagaatnnnnnnnnnnnnnnnnnnnnnnnnnnnnnnnnnnttttgctcaattattgtcattgtaggataatggctcgc

SEQ ID NO: 88023 - DNA, 613 bp, Cannabis sativa
  modified_base (565)..(567): a, c, t, g, unknown or other
tagaattccctaaactgccccaaccggcagaccggttgcccagccagaattccagttcagaggggtttctcgaggaccaaccgaaattccgattcctacaggtcccactgaaccggtcgaccggtttagtgcaagaaacacaaaactccatctaaacaattcaatttgatcccaaattgcacaagaacttccagaacacctaataataccataataaatagaaatcaagaaactaaactggccaacaacatgtgaagcaaaaaccaccattagagagcaaagcttgagttcataaactcaaaccttgctcaaacaccacaacactcaccaattcaactctacaacagctcaaataacatccaaataacctcagaatactcaaacaataataaacgatatctacagtaaccctaattctaaaatcaagctgattaattatgggcaaaagaaaaccattttttggagatactttattcaggtcatagaagtctatacaagttctccacgtgccattcatttttgggaccaaaactagatttgaaacctgttgaccgaggttttcggnnnccaataaaatattataagattatagagctgtaagaaaattagagaa

SEQ ID NO: 88024 - DNA, 702 bp, Cannabis sativa
agtatgttagaagtttaatctctagtataaagaggagctcgatgctctgttggggttagggctgttgttaatattcttcatgatccttggctatatatggacattgagaatccgtatgtgacttcctaattgattgatttggatagttttaccgtctaatcttatggttgttagtagtaaggaatggaatctggatctaattaataatatttttgagtttagggatcgggagttgatcttgagtatttaattggattcttctgctcaagatgatggttggttttggcatcatgatattactggcttgtatagggtcaaacaagcctcagtctttcaacaatctcctgtgttagtggtggctaatgtagattttgatgcggcgaagattacacggaacttacatattctccctaaagtgggtcattttatttggagggctcttattggttgtttagctatagtatagccgacgtttgaaaatcgttggtgattctatttcaaaagtgcgaagtttcaatttagtaagtgttttaaaccattgcctatactcaagggctatttaaaaccgatgggaattctcaactgtaggcatcgattttaaatattcacttattttattagcgacggtctttaaaaaaaaaatgattttctaactaacgagggtagtgttttaggtagtagtattgtgacagtcagtagtcc

SEQ ID NO: 88025 - DNA, 1522 bp, Cannabis sativa
tcccgagtgcaggtcaggtccgggtttgggtttgagtccgagatctagatttgggtctaggttcatgggcgtaggtgctttgtctaggttccccattcaagtttggttcctaggtcctgatctaggtccaggttcaggttcgggtctcgagtcttggttttagtctaggtccctgtccgggtacgggtcaaggtctcggtcctagtcttggtcggggttcaggtttgggtccttgtcaaggtttggatcatggtctgggtcgcgggtctcagggatcaggtcgtagcaagggtttaggactaggttaggtccaggtctcggtccaggtcctggtccaggttcgggtcccaggtctcaggtcccagtcctagtcaagttctcggtcgaagttctggtctgagtttgggttatggtttgggttcagttctgatctcagatctgggtccggctttggttccgggtccaagttagagtcagggtccgagtttaggtacgggttttttggatcctgatctaggtcaaggtctgagtgtgagtccaagttcagcaacctcggtctgggtcctaggttcggatctaggtctacgtcttggtctacctctagctcccgtgtttcgatcccaatctacgtctgcgtcgctattcgagtctgtgtttgggtttgtgtccatgtgctggttcaaatccctttttaggtcaggggcatggtttaggtccgggattgagtcccgagttcgggctcaggttcgagtctcagtcctagtctgggttcgggactggatccgagcttgagttctggggctaggtttttgtctagttttgggtcccagcccaagtccaagtcttggtcacggtctcggtcctgttccagggtcttggtcacgttggttcaagtttcagtttctggtcccatgtctcggtctcggtccaagtcgtggtcaagcattggttccttattcgagtcccagatcaagacatcgactatgggtcttgtcgaaaacccagttctcggatccttggacaagatcttggatccccagttcggttcatgtctcaggtcccggtttggatttgggtctaggtccgagaccgagactggggtccagttcttggtcttgatcccagttttgggtcccgagtcctgttcaatgtttgggtctgagttcaagtctgggttcgtgtttggagtcccggatcgggattggattcatgtttttgatacaatcttagggtgggtctgtgtccgagtttgggtcttggtctggttatagttttgggtcctggtctaggtccttgacctggtcctgttcttggaacctgattcgcttctagtttcgattctagtttcaagtcacgaggtacgggttcaggtcgagtttgggtccaagtctgggttcgagtcttgatttgggtctcgggcaaggtttaggtctgcgtttggtctcggatagggtccgaggctgggtctgaatacgggttcacgtccaggttcacgtcttgagtcccgttccaagatcttgga

SEQ ID NO: 88026 - DNA, 707 bp, Cannabis sativa
gaggtagcaacgggcagagcatcatgtatagcacgccaagcaaagatcttcaccttctgagggacttgaagagaccaaatagcttccaccaagcaactgctggactagaaggggaactaaggtcttcatcctctaatgaagtggcaaggtggtaagcactttggaccgtgaagtttcccgaagagtgatggtgccatatgagtttatctgtagtgggaaagtaactcagcggtaatgtgagaatcttttctacatcaataggactaaagtattgttgtagcaagggagtgttccattgtctttcatcagtaataagattctctaccacaccattggaaggaccagagtatgtcataggcaaaaaagttgtatgtccaggaatccacggatcaaaaccacttctaattgatctaccttcgccaattttccaccttaaaccatgaaccaacacctcacgaccccagcgaatcccttgccatgtgagggaaggagaatggcccatactcgcctctaagaaggagttgttaggaaaatacttgcttttgagaagtgtagcaaggagtgaggttggattgtcaacgagccgccaagcttgtttggctagaagagcttgattaaattgtatgaaggatcgaaagcccattccaccttctcctttagttttgcatagtaaattccaagatcgccagtgaattttggagccattt

SEQ ID NO: 88027 - DNA, 645 bp, Cannabis sativa
tttacaagagaccagcatgtacaattacatgttgccaaaataacttacaaaagctgctacgaagcacgaaaacgttgataacaaacttgtattgaattcaagaccaataactgcttagattcctgcttttattggctttaaacttgcactacccttttgttgcttaataatgaaaatgggaatttaaatatatttttgaaacataatattttcttatacttacaggtttataaacttcctactgaacggatttacgctacctattttggtggtgatgagaaagctggtctagcgcctgacaacgaagccagagatatatggctccaatttttaccatctgaacgtgttctaccatttggctgtaaagtatgctattatatatatatatatatatataatgtttcttgcatttaagaagagaagagccttttcacatgcattgcaatagattcttgatagcattttgcaacttcagaatatatgtttatttcattgctttctgaatcaaaacattaaagagccaaaagaaagagaaatattaaatcataaaggattaggctaagttcaagcttgttccaactcatggatctataaatagaaaggaaaaggacagcttccttctttagttatatcatcaataatgtg

SEQ ID NO: 88028 - DNA, 849 bp, Cannabis sativa
tcacaaataactttttgttgtgactaaaagtcacatttagtcataataatttatattgtgactaaaaaattatcactaaataagtagttattttttgtagtgatgggacaacaaaaatgagtttcttttttggataaatttaatcacatcaaacacaccaattattactatttatcaaaatcctattatgaattatttgaatttaggattaaggtgcagtcggtttcatcttaaactaattaacaatgagaggagtattctattcttcttatgtatgataaatttttccacacattagcattgtagaactctttttaatacattattcttacgtttgggtctgaaaagtgtaagtctcataaacaaccttaatagtccacagggtcgaaagtaacatttggaagaatgccacaaagccaaattagaaaatttgtggattttttgaaatatgtcaaaacattagaaaatgacacattattcgaaaggtcccaaacagaggtcaaagacagagacaagctttttagtttgctctaacactacaaaaaatcacaacaaaatttgtgagcttgtgagcaaagataaaaaaattgtggctaattataaattttcattattgtgttgtgactaaaatgttcatggctaaaagtattagtcataacaattataatttgtggtgaataaatgtgtttttagtcacaatatatatattttagataaatcaacaagtttattattaatccacaacactttgtacaattaattacaatgaagagcatctttatgttaaagatctcatgaacaacatctgcccctttttttttacaaagaatgcatggaaccaatctctat

SEQ ID NO: 88029 - DNA, 588 bp, Cannabis sativa
  modified_base (26)..(36): a, c, t, g, unknown or other
ataaaatgatttctgatctttattannnnnnnnnnntgattatattgaaatgagtttttatttaaagcacaaaacccaacaagaggaaggccactcggccatggcttgaggaatgtcactcgacatgctcaagcatgcaagtcacttggcatggataagcatgaaaatcaatcggcatgctcaagcatgcatgctactcggccaaggtttgcatgcacgtcaatcaccatttacttattgataacagagccatgccaagtgagattttctgaagtgttaaagacgaaggaaactaaggtacattacaaggactaggcgtgcatgcaaggtgggcacaagcacagatcctcaaagttttgatggcaaggaggtacaaatagtggaggcatcgtacctgtaaggtctgaaatcataaccaatggtgcacaacacctactacccctgtaatctggaatcacttgacactagacaaaggtacaaggtgtaagaccaccacttgtaacttgtagcctgtaaaccatggatgtcaccttatcctttaagacttaaatgtgagaaggggttggaaaatcattgtaatactttacc

SEQ ID NO: 88030 - DNA, 1045 bp, Cannabis sativa
  modified_base (967)..(973): a, c, t, g, unknown or other
catcacataggctttcaatcattaaacagagagtctaaaacaccatttcatgcattaaacatcaacaaaaactctcaaaattcagattgtacaaaatcaaaatcatgctcaaacacataactcttcaagctcaaagacttgagctttaaatcctttaatccctaacatttttctagcagcataattaaaaaatagagaccaaattcaagcattaaaaacatcctaggattataccatagtccaaccaaatccaaaacatcatacagtcaaagattcatgctaaaatcaacaaaatgtcactaacatgcaatacaacttcatcatctttaacaaactcaaccttttcagctacaaattcagcaacaaaaatcaaaataaaaaactataaaaactacctcaacttccaattccaagctatgcacaatgaacccccaagattcaagctccaaccaagcaatttcttcgaaaaatcaaagagaaaataagagaggggttgagagagagagggggtcggctaagaggggatccaaaaccagaatttcctttttcatttccttaaaatttaacttttatcaaagtaaatcaataaaggtcaaaagaccattttacccctaaggctaaaaatcaagctcacatacacgcaagggcaatttagtcattccatgcataattaaatccaattgaattttagattatcaccattaaataaaaatgccaattatttcaatccaaataacatttcaggcccgatcccagttcggcccgaaatacccagatgtgactatactgcgccaacctgtcagaacacacctgaaaaagacaacacatgtatactatacaataaaatatttccataagcacgttaaataattaatttcactgttttaccctctcgggtcaaaattactaaaataccactagctcaccaacagggtctcaacatagcataaatcatataaattctcannnnnnnaattatataataatataatttcttcaattatacataattatctagttagggtgtaaaaccctaactacctta

SEQ ID NO: 88031 - DNA, 949 bp, Cannabis sativa
gggcataaaacccaacatccctatccttgacatttttcctacgagattcctccgactttatcttctcaaagtgatccttactacattcaaagatgtgcagatggagtaaccagtcatggtcccaagacctaacttcaaatagcaagttactttccttctttacatgtttgttacattgtgtttatttgctgcttaatttgtttgtattgttgccatctcatttggtcctggtagtttttagggttaaactatgtttaggtccatactagggttcagacaatacgtaggttttctcagaatctctaacttaccaccttcgggtttgataaaattctttccagggattgggactactttcttcttgcagcaatgtcccactctggttcaaattatttatcgtccagaagatttagaatttgagtttcctacaaaattagccatcccatataaacccaacccttcgaaacccacctccaaattagagataaacgatgctagggttatggaacacgtagtgagaacccaccaggaagataatgccaattcttataggcgtttcttgtaagaaatctctgaaggtaaacaccgattcttgcaagatgcggcctggccagaacctcgtagcatgtcctttattcctttagaaaagcctttgtttttacccaatgtcatgattgcttttgaaccagatgatttgtattttgaaataatgcctcccaagccacgtacatcaaggtctccctaggaccccaaagtcacctttgaaactgagttgatagaatcgaaggtgcgatctatctcaggctacacaggcgatatactgaaagcatgtgggattgaacttaggaaatcatgctttgttagatcagtacgagagggtgagttcagttgtttccctcctgcgcatttttcaaacagtaccccaaagtggtgagactagtactagtgg

SEQ ID NO: 88032 - DNA, 520 bp, Cannabis sativa
  modified_base (229)..(231): a, c, t, g, unknown or other
  modified_base (278)..(282): a, c, t, g, unknown or other
aagctaaaaaaatatgtcgtcacgaagaattagatttactcatattatatagaacatatcattgataatagatttaataataataaatagataagtgtataaaatagtgaatacttaaagtacattaaattatatcttatttattctttaataatattttaaacataaattataatttactaaggacttgtttggtacgccgtatagtattgtattgtattagtattannnaatacaatactatgtttggtatttacttgtattaatagattgtgtannnnnataatatattttcaatacactcgatcccaacactaactacaggtctgagtcctgggttcgggtcccgcgtctgagtcccaaatcccaagtcctgggtccggatcctgggtccaagtcccagtccaggtttgggttcggatctgaatctggggtccaggtctggggtccatgtccaggtctgggtatgggtctgggtctcaagtccaagtctgggtttgggtcccgggtctgggtttgg

SEQ ID NO: 88033 - DNA, 883 bp, Cannabis sativa
  modified_base (56)..(68): a, c, t, g, unknown or other
attgaagtaattgctatggatcaatcaggtacgcatacctaattattatatattannnnnnnnnnnnntgttatatacaaattgatcttgcggtttattattaatttatctaacagtgcgaggatactcgaccagcctccagcatatgtgagcaatttgcatgtactgaccagaggtcacgagttggatatcttcagaggtatatcctatatatcctcaaacttgcaagatacgacactatccctaaattcatgggacaggttcgtagtaataaagaagaaagcaaacatacataatctttcattttgcttattgtaattatagaaagtaaacagatttcccatttaatttcttattgattttgggaaactaatttgatgtaattaatccctataaatagtggactcatctcacattcagggacacgaatttcattcaaagtaaacacacaagaaaaatctagattaagggtaaaatactcagagatcattgtaagagctttcgagaaagatcaagatcttcttgttcatctactaacaagtcaatacaactaaaggggagtaggctattaccatcatcaaggggttggacctctataattcttgtattttctttattttaccttattcatatttgttatttcagttattcttaaatttctttaatttgactcattatcgctggctaaaaacgagatcaatattttggtactttcattgagagcaaagaaacacaagtttttattttaagtcttttttacgacataagatggttacaaacacagaggagaaatcagaatgaaactacggatctaatgactacagatccaaacctccaaacacctacaaaccctagagatctagttaggacggaccccgctcca

SEQ ID NO: 88034 - DNA, 531 bp, Cannabis sativa
ctggtggatggagtaagcataggcaatttcatgaccgagtgggccggactcacacgaggcttgccgttacaaaaggcaccatttttcgacaaaaaggcctttggagttggaaatcgctgtgttggaaacccgcagctgtttgatcactcaaacgacttttgtaataagatgccgtttttgttgaaacagcctgacaccgccgctgccgctgccgctaccgtgttcacgttaaaacttacgaaagaacaagtccagaaacttaagcacaaggcgaataacaacgatctcgatcgtcgatctcgaccttacacgtgtttcgaggccttaacggctcatatttggaggtgttcgattaaggcaaggaagaacttaagcgaacaagtcactgcttgtctcatgtcaatcgacccgcgtcaacgtcttgagcctccgttaccgttttcttacttcggtagagcgtctttcgaggcaatggcgagttgtgaagctggggagttgttgagtaagccgttaagttacggagttagtaaa

SEQ ID NO: 88035 - DNA, 732 bp, Cannabis sativa
atagctattcaaatttgtcggttgttgcggcggcggttgtggtggaagaacccctccagctggttcgttactcatcgtcgctggagttacgaactgggtattctcagacgacaacttctgagctgccgtatcggctaaattaacatcctcgtcaccaactcctccgccgccgccatcgctgttcataaaccgagcgaaaattcgctctgtttcagggctggagggccgattaaagaactgttgacagaattctctgtcgactatattcgtgaaatatgagctcggtgcggaccgataacgcatcaagccagatgaagaccccatttgttgttgagggtgttgaagatcagactccattgtttcctttttcaacttttcttcttttttctctcgaattttctcactcttttctttctgggttttatcttctcctccctcttctacctataccaaccagaacagaacaaaacgaaaagtggaaaacaaattcagaagtggacgtgaattgtgttcaggtgatatttgtagatcttgtacaaccaaaccaaaaccccaataggtattcttatttttatttttatttttatttttacttggctgaaaatagctctagactcgtggaaatggaaacagaggcttaaacagactcaactttaacagggaaatttttccgggaaaatcacagagattgtaaaaaaggaaaatttaacaacaacccttttgtctaatgca

SEQ ID NO: 88036 - DNA, 540 bp, Cannabis sativa
tagtttctccaaatgaaaagatctacaaaagttgtcctggttatgaaaagttagatgtcttctggaagggcgttcttggaagtctaacttgaccatctagaagaagtctcgtgatatgataaatgtcatccaaaaggccattcacaaatgtatatcgtgcccacctggaaggagtcttcagggaagttagccttcctccgaaaagaaattattcagatggctagttgttccttctggaaagaaattctggatagttgactccatatgctgcctttcctattcgagaagtctcttcaatgtactatttggtatttcttctaggaagcgtaataattagaagaaaattatataaaaagtttggaaactatgtatatgggtcgaatatggggtgggtagtatcaccctcaatcccaccccgaacccacttcaggcatataaaatggcatcccactcttgccccgttacccattaaggcgagtaattcttgcctcattcgaggcaagtatacccatccctatgagtcaaatttctatcactact

SEQ ID NO: 88037 - DNA, 804 bp, Cannabis sativa
ttgatcagaaggattttggtgtttcaagggagtgacatattgggcttttttttgttcctttagatataaaactatgtcaactagtggagaccttctccggttgctgtttttccacctttgttggccccatattaatgaaattctaggagggtgattactatatttgtaaaaaaaaagaagttttttaagagaagaatttttccttttttatattctttctggatattgtgattaagcttttgatgttattagttgagaatttaaacttcgttcattttgggatgtggacgtaaagctttgactacctatgtttaatgagtcattggaaaaggaatgctctgagttgacctgtggtttggtaaagatgtttgtggtggactggagcctggaggttacagcttcctttcttcttaatgctgtactcatttaggctaagacaggcattaaaatgtttaaacttctttataggcagaactggtgaatatattattttgaaaagaaaacaatagaactggtgattatataaatagatctaaagaaggtttgatgtccatttcgaaaagagaacgttggatgtcttgctaagaaacatgacttttggatattacttgtctttaaattctttttattttttgtgtagtataaccgttggattttttgatagaatgataaaaaattgttattgttattcttttttaattaatcttcattaaactcaatccaatgtctctctttgttatttctggatttggctgaccatatgtatatattttatataaatgccatgtatatatatatatatat

SEQ ID NO: 88038 - DNA, 550 bp, Cannabis sativa
tggtacaacacttagtggtattcgatgtgcagttcagccctaccaacactagtacaggatgagtacttagtgcatgtggtacaagggtcgtacttctgttaagaacgttcttgatgcatctgaagccttgtaaataggtgtatgggcgcctagatagaagtcgacattatgttatatgttttgtacttttcttactgagtttgttgactcacagttactgtttacatgtgtaggtaaaggaaagatgaaagctgagcaccagtgagtctagggcctaaggatgattgtgcatataaagatagttagacctagagagttcggtctcgggacgacttgggcctttattttgtagtcgtagagcgacatgtttatcaaatgaattttgaatatgattgtaaactgttaagatgggatcctaccttttatgtatgcttatatatttataaaaatttaaaatatttgacataattttcaagaagtcctttaattagaaatggtgtgcatagtaattaagaaattaatgagcgtgcctaagcaagtagggcattac

SEQ ID NO: 88039 - DNA, 904 bp, Cannabis sativa
cattagactacaaaaaagaattttgcaaatataaatttatattatcaaagagtgatattatactaatacggtgctgacatgtgtaatatagctggaatatgaaccaactccaattatgcatcaataaatgcatccagacaactcgctccgagaaatacagttgatagaaatactcgaacttaatatttgtagacaatagtgagacacgagtaataactaccgattgatgagaccagatgagataaatatagaaaatccatctggggataaacatattatattatagaattatttggaaagggtagataatgagtttgcagttcattgacccatatccacgtgagtatgttagtgagtttgcagctcgccgacctacatacacatgattatgttaaaagattaaagacaacaacctcagcatgattcatctcgcttttgtaacgttataataagcttctcgtgtaaacctcactcaatattaatagaaaaacgcaatgaatactacaacatatacttatacgttggctcacgatgaagtatacagaaaagtactattgaattgcgagaagtatgaagcgtagtcagcataaccgtctctagataaagacaaagagtggttatggtggttatcaataattatcccatgtgatgtaaatatgaaatgtgggaaatgtccatgtttcatgaacggttacaagtgataagatcccaatagaataactgtcattctagactactataaatagggacagacctagggaacaagggacgaccatttttggagaaaagaaagagatatatatctattattcattctacaaaataatgtattgtattatgtatatataatttatcaaactttaaataagacacatgtaccatgaaaaattaacttcaaaactac

SEQ ID NO: 88040 - DNA, 544 bp, Cannabis sativa
gtaaaatatgatccttaacttgcagcaaaacaatcctaattcaataagaaaacaaagacagcaaagcaatcctaatttatttttaacaaaataccctattcaattctaaaccaataataatcaaaacaaccaacatcagttaatgaagcatcaaaataatcctagaaacaaaacccagagaatgtagagacatagttcaaatggaaaattgagcttaagttgactaacaaattaagctaaagttcaaaatatatatatacccttctctatgcatttttctcaggaaccagacaataagcgtaaaacccattaaagggtttcatacaaaaaacacagattcagcaacaagcaggaaaaagtaccaattttgagaggagcttggattcaaaccacgacacaattagaagaagaataaattacagagccccttcttcagtctgaagccgtaccgcagacattgagctccggaagaagaagaacgagaaggtgagctatggactgaaaatgaatgaacgacatcacccgcgtgaaatagctgagacag

SEQ ID NO: 88041 - DNA, 567 bp, Cannabis sativa
tatatacaactgacatttgcaaaaacacggtcatttaaacctttcccatggtggacctattctgtcccatatattttttgcgaatgacttaatcttggtggaaagggcctctctggcaaaagttaaaggctactggaattgcctggagaagttttgttcttggtcaaggaaacaggttaataaacttaaatcttccatttttagtaggaataccccaaataacctgaaacaagggatttctgatacattgggtattggaggaccagaagaaaatgtcaattatttggggctacccttattttgatctagacaaaaggatgctaatttcaattttgttgtagagaacctcacctcgaaattgcaaggatggaaggcgaaaaccctttcgaaagtggggcatgctactttgatcaaatatatgggtctgtccttgcctatgtatgtgatgcaaaccgctaagctctcaaatagacttgtctctaggattgatggtttagtgcgtgacatttggtggggttttgagaaagggaacggaggactctggttgaatgtctgggataaaatttg

SEQ ID NO: 88042 - DNA, 720 bp, Cannabis sativa
tcagcccaaaaacgagaaaagacgaagttctccttgacccgtacggagtcggcgccgcgacagctgtagaaagttgaatttgaggctttctgtagccatctcgccgctgccacgaatattaatcacgaccaaaatattcctacttcaacctctttcaataaaatatgcataacattcagatacaaactccaaatgagttgatttaagatgaattaaaaaggtaaaaaaaagatctaaaagttttatgttttgattttttctaaaatcgaatcagaaaatagtagaatttagacctgacgttttagctttattttcttgtaaaattttctctattttataaattatcgtttttcgaaatttgataaagttatacattctaagtggcaaaacttgaaactaaagaaaacaagcataattttatttgaaaaataataacaaagaagaaaaataactataaaaagtgacccaaaacttaggataaaaatagcctaacataagcctaatgtcgtgggtttccttcgtcaaaagtcgtggatctcggaggtctccacaatggctctctatttggatgagatttgggtctaggttgggtgtttcgttggtcgacagtggtgcaatttcggtggaactcctcgatcaggaaagaaagtaaagagcgagaggggaagagagactaggccagaatggggttttttgaaaaataagagaggtaactttggg

SEQ ID NO: 88043 - DNA, 554 bp, Cannabis sativa
aaagaaataagaaaacatcaagtaagaccatgggatgaaatatatatatataaaattcaaataaaattattaaaataaattaattgaagagatctccaaatcaaatgttaatgaatgtatcaaaaaaataataaaataccctagattaaaagtaaaagaagggtttcaatctccggaagaagcaaaaggtcctcttccacttcatctcgtctaagttgtagtcgcaacgtgagattagaacaatatatattgaaagaaaaagtagaactctaatttcatttttccttccgcaaactatagagctccaatttcataaacgcaaattaaaatgaaagtggatagattaattaatcgatataggttagggaaaagtgaataaacgtttgaagtttcacgttaaccttctgtctataataattcatcaaaaaagaaaatcgtgtaaatttaaaaaaaaaataacaaaaaaatatcaaaatttggggatatgcggtttgttagattgtttaattttaataaaaatatcaaaatttgggatatgcggtttgttagattgt

SEQ ID NO: 88044 - DNA, 868 bp, Cannabis sativa
  modified_base (571)..(571): a, c, t, g, unknown or other
  modified_base (828)..(830): a, c, t, g, unknown or other
gaggacgtacgtctcttccccaactcttcctctgacgacgacgatgacccttcgacagctggtactctctttcattctttgcaaagttggccgagagaacttttgagtctttgaaggttggtgtttttcctatggtttctggtttgattttctattatgaatctgtaaatggaaatagagaaaatttgtatttgcattttcacagtattgctataaactcaatgtgatttcttaacaaccgaagagtgtaaaacatgttaagacttcagacaaataaatgcccgatattgctattgtcagtgttattagaggtcgtttggcaaaaatttttaaaaactgtttttaaaaaattgagttttaaaaaactagaaaacagaaaacatcaaaatgatgttttcaattttcaaaaacaattttttttgtctaacatactcggatcctagacccgaaaccatacccgaacctagactcggatgggttaatgtcatggtatggtgctaaaatattgattttttttcgtaagaaaaaaatctaaaaacagtttttaaaattttgtgccaaacaccattanatttttaaaatgacaaaaactgttttctattctcacttttaaaaactgaaaacacagccaaacaagctcctagactgttaatttttttaaggatttggagaaccaagtactatttaacaagagattttatatgaaaaaaaaaaaaacaaagataaaaaatgctttgaagatgttatttgcaaaagggataattgcggccaaagtccccaaaaacttgaggttgatgccgattagtcctcaacctcaaaaattggcgnnnaaaatacctaaggtcccaatttttgtttgtccgttggt

SEQ ID NO: 88045 - DNA, 1357 bp, Cannabis sativa
agtcgacagactcaaagaaaagcataatcataacataagtgtaaataggataaagattaggcgcccacacccctaaccgtaacccttcaccgtgtccaacacggtactgagttatgaacgttcaaacgacagtactagtgaccataatattagcctatactcggtacgctagtcgtactctagtcgtaccgacgtgatatagtcaagtagcacagtactatcgattatactatcagcctatactcggtatgctagtcgtactctagtcgtaccgatgtgatactgtcgagtagtacaaatgccaacatacatttatcaatatccaatataatattaaatatactgataccactattgtaatgtaatctaacaagcataactaacatgtatactaaacatgtaaacacatatgcatatcattatactaatcttaccttagtttcgaatgaaagtatgtcggtaaccctgagtggacgttgttgcacgacggtcacaacatacgtagagctgataagtgtgtactctagaacacttttctaatgtctgaaaagaacctaagttttttctactaaactatgtagtggagacaccctaaaataaaatagataattttgctctaatttatataccatatcgtagagctcttcataagctttaaaatggtatatagaatagaacgtaacgtctaaaagtctaaaacggacacccgagtgaaaagttatggccaaaatactaaaatctgcctacccgatacagtccaaccagaattccgattggtacagccctgaaccaaccggaattccggttgtctgggtagaaaaacacaaaaaattccaatcttccaacccccataacttggtccaatcaatcccaaatgctaccaaactttccaaaatacctaaacacaccataataaacatattctaggcaataaactcaataaataacctctgaaatgaaaatcaccatggaagagccaagtttgagctcttaagctcaaaccttgaccaaacctcacaacaagcctctaattcaacttaatctaacacatatatccttaaaatcatctcaaaaaacagaaacaacagcaacataaacctacaacaacctaaacctaaaaatcatgcttgaaacctaacttgaaacttcaagaaatcaacaagagaagagcttgggagcttacctaggattagagtaacaaagattatgctaaaatattctgtattgaggctgaagaaaccctactagctgtaagttcttggataaatcgagagagagagagagagagtgtgtgtgtgttttggtgagagaaatagtgttttctttgatttttaaataaatgaatgaataataataa

SEQ ID NO: 88046 - DNA, 686 bp, Cannabis sativa
tattttcgctccactagggcagatggctgaacaggcatatcaggttcccttatcctgatagcgtgctccactagtgtttggtcatttgggagagttttcttcttcttcttgctcgacttaacctgctctgaatattcttgagcatactgctttgcgttgttgtctcccttcaacttcacctcatgcttgagttgaatgagccccttttcatgctccgtcacaccagccccgctcaacttttcctttttcttcttctccttcacaagcctcgacacaaagtcctttaggaagagtttgtagttgacaaagttggcctcagtggccagcatggtagagtctgatatgtactcggcctccatggtaagtttgatattacggtttgcttagagcttctccaaacaactgctccacccccaaaagtaaacaccatcccagatgtagactttttgtcatcaagacaatcctagaaatctgagtcggtatagcctacagaatttaaagaaccacccttgtagaccaacacataattactagtacttttcaaatattttagaatattatttactacagcccaatgttccattcctgggtttgtctgatacctgcgcacaatttctactgcatggcatatgttaggtctagtacataacatttcatacattgactcccaactgctaaagcataag

SEQ ID NO: 88047 - DNA, 512 bp, Cannabis sativa
ttgtgagaagatctaagatcctggtaaaataatttccaacacaaggtatccactttcagcatccttgtccaacaacaagcgaacaaaatggccgcgctgagcgcaaacacatgcacatacataatttggtctcactttattggctcactctggtttaagcatggattactggtggtatgccatgtcatgtgttgtttttactataaacagacttcccacaccagttcttggcaatattagtccctatgaatgtatgtttggcaagaaatcagattacaacattttgaaaccattggttgcaactgttttcttcatctaagaccctataatgaacacaaacttgaactaaggtctcaacaatgcttgttcttagggtattcctcccatcacaaaggttatttgtgtgaacatcaagatggcatgatctatatatcgagacatgtaacattcaatgagagacactttcctgcactctccaacaatagcagctcctcacaacaacaggtacctta

SEQ ID NO: 88048 - DNA, 553 bp, Cannabis sativa
  modified_base (368)..(371): a, c, t, g, unknown or other
tatggaccatgtctcagtcttaatgtggctgattatcctctcggactaactactaatcatcaccttggtaagttattgtcttaccaactagctaatcagatgcgagccccttctcgggcggattcttccttttgctcctcagcttacggggtattagcagttatttccagctgttgttcccctcccaagggcaggttcttacacgttactcaccgaattatataatcattggagctataataatgaagaaaatagaaaaaacctaagcaataaatttataaatagatagagtcgaggctctagagaaaactttaaatagtaaatcccttattctcccaagatctttggaattcatttatttctctcannnntggcttgttttggttttggcgcatgtcatgtaataggattgtatggtcttggaatatgggtatccgatccttatggactaacgggaagggtacaagctataaatccagcaaggggcgtggaaggttttgatccttttgttccggaaggaataacttctcatcatattgcagcaggaaccttg

SEQ ID NO: 88049 - DNA, 671 bp, Cannabis sativa
actagaaagatgcccaaagctactaggggagctttgaagattggatgattagtgttacaattactatctttagtttggactatattgtttgtatttttctaatgtttgtaattagcacatgtagtattttgcaaactttaacatgtagcttttggttttatgtaactgttgtgtgtgcaaggtttcttttggtttggaacacttaattaggtggtgacatgtttttttggatggtatatgaaccttgtatgttatggaacattattttgtgtaaatgaaatttttgtgtacttaagcaactaattagtttacgttttcgatcgatgatcaatctaattaaaattgatttttttttttcaggaaacaaatcactatcatcagataattttcttgtgtacatatcgatatgagagggtaacaggtacataattttttttaattggtgtgaggatacgaataggtaatagatatattaattttttttttaaaaaaaaatgtacattaattttcatttgaagatcattataacaaaatataaaacctaaaatagatggatatgggtaacatgtttgtttatttttttgacaagtttttgtttttgtaaaatcagaggaaccattatgttcataatagtctaagacatagtactaatgtactacttattactgtaa

SEQ ID NO: 88050 - DNA, 691 bp, Cannabis sativa
ataaaagggtcccttcctgaagagccttctctttcagagttgctaagaacaaaattggtatctcctacaattagccaagggcccccaaacctatctccaaggttcatgagatccgtccaaaaaattttcttagcgtggaggtaagggggaccatacacacacaaaagaagccacggattggaggggggatccgaataaacaaagccataaatatgatttcgagaacaagcaatacattcaaaattaaaacccactttccaagccaaaataatacctccagcaagaccaatagatggtacagatatattaaaataaaagtggagggatttaagaatacgtaccagaggagtagcatccactttgagctcggtcagaaaaacaaaatcaggagagcgtgctctgaccagggacttcagttcacgaactgtagaggtctgccctaaccctctacagttccaggcaattcctctcatggctcctttggaggagatatgacattctcctccacagggtttagcgggcccacagataagctagaaccagagtcttcaatgacaaaggatccaatcaacgggttcttcattattccttcattgcagctcatagaatcagactcttcttcagatggatcatcataaatcacctttgattcccggtccttctcttcagtatcccaaggaaaatctcgaac

SEQ ID NO: 88051 - DNA, 822 bp, Cannabis sativa
ggaagatgttagcaaagtggaatagagattactttggtatgtgtgagagtaaattaaagcttcttgatagcttacttcttgaagtgcaagctagatgtccctccccagaaaattctcttttggaagctgatattttgttggaaattgatgaagtttccaaacggcagtgctccatttggcgtcaaaaatcgagggaaatttggctaaaggagggtgatcgtaatactagatttttttcatgcctcgactgtaattcgaagaaagaggaatttcattggagccgtcacggataatgggatcgattggatctcgggtagaagacagattggagattactttattaatcactttggtgatgtctttcgctcttccaatccttcctttggtaatgctctatctaaccttattgttccttgtatttctggtgatatgaattctgatttgtctagggtcccctccccggaggaggttcgccttgtggtttggtcgatgggtccgctgaaatccccgggtccggatggtatgccgggatgcttttatcggtttcattgggatactgtgggagagtctgttgttgatacggttagagaatttttcatgacgggggattttgtgcaaagtctgaatagaacgttcatagttttgattcccaagaaggtgaacgcggtgggctttcatgattttaggcctatttctctgtgtaatttcgtctataaggtcatctccaagattcttgctaatcggtttaaaatcattctccccgacttgatttctcctttccaatcggctttcgttctgggccggtggatcgctgaaaatggc

SEQ ID NO: 88052 - DNA, 539 bp, Cannabis sativa
aacccgaaaaatccgaccacccgccccgacccgatgccgaaaaagtcaaaaaaaccaaaacccgtattgtcgggtcgagtctgacccgaagaagtataatttcggtatcgggttcgggtttcaaaaagccattgaattttattcgggtgtgcacccgagacccaaccagcatatatcatatataaatatatatttaatacttattattttatttttaatattcttaactgaataaaaaaaagcaaaagtaaaaaaaaaaataaaaactaaaaacctaattaatggtatacacatcccccaatgtcactatcccatcccattataccattattacctgtataatcatattcaatattaataacctttggtttctcctcccaagtcccaaacccaattgtgatttgttcttctcccaagaaatatcagcatgttaaattagttatttcacattttaggcagcccaaaaaatatattaaaaatagaaaaaattgatatttttaaaaaataaaatatcattgggcccaaaaaatctttcaatc

SEQ ID NO: 88053 - DNA, 519 bp, Cannabis sativa
acaacatattacaataattaaatcacaattaattacactaattctattgttctttagctctattattcaaattaattataataatacataattattctattttttttggctaataatattgatgctcttaataattaactataagtctatatgcaattgttgtaatatatacaaaacccatcctattctccctctaattttctatttttttaatttgtagttttttttcctaattttttatttaatataataatattaataataaaaaataatataataacccttattcataggtacttcaagaaaaaaaaatatatcttataatgaaaataaataatttgtagcagttttataaaattatttatagcaattttgtaaaatattattatatctcaagtcttattatatagacatctaattgtatttttaattttattttatttactctctcattatgacttattggtagtaatctaataataagtaaaaccaaccgtcatctaatactaatcattaata

SEQ ID NO: 88054 - DNA, 953 bp, Cannabis sativa
acatctaaggatggggcatacctaacctttggtaccaacatctaaggatggggcatacctatttggttcctacattttgacatccccaattgggcctgttgttggttttatggtactaaattaggtacgcagtggaagagtttcatattatctgattatcattgtaccatagctcaatagatatttagatgtgtgtacattaaataaaaatatgaaataataagtttagaacatatacctcttgtagactatcagggtatcctcgaaacttctcgcatattgtatccttaactccagatgatatggttgatgtaattgaacaaacaccagtgtcttctaaatcgatccaccacacacaaggaatagtgtgggctattaggataaagtgtataatgatgttcttgttgagttctcaatacatgagcaagaacaatttaagagaaaaactattttccttttctcctctatatttcaaaaataatgttgtgtaaaagcatcttcggatttctcaaattaagcttctatttgcaatagttaaattccattaatcaaatcatattatttgaataaataaatatctataactaaacccttgctatgtacaacatcccatacataagagggcttacttgattgaaatagattcgcgaatggaatgatatttcctaaaatgaatctatttatttattgagtttgtcatttataattgtaaagtttatataaatgtgtatataattatttgttttatcatctaatttcttacaactagctagtaattaattagttatttgtgttgtgtacttttccttcaatatttatgctttttttagtaaaatttatcctaattttattgaaatttcgatagcataacgactataattggacgttccaaatttttttaaaaatacctaaaataacaaacaaaaaagaaaataaaacaatacagaacaaac

SEQ ID NO: 88055 - DNA, 659 bp, Cannabis sativa
aagtttgggtcttggtcaggtactagtcccggtcctagttctgtttcgtaggtccctatcgtgattctggatccattaatcgttgattgtatgggcttgggtcccggtctaggttcgtgtttgagtcctagtctcggttcgggtttaggtctctgtttggttttggatctgggttcatgtttggctttaggtccttgtcctggtcctagtcctagttctgttctagttccattgagttcgagtttgggtttgagttcgggttggagttcgagtcctggtctgagtttgggttcgagtccggatttcagtctaggtccagatcaggctccgagtgtgggtttgcgtcttgggtcttggtctaggttgggtccgagtcccaatttccaaacccgatccgagtctggattcagttctgggttcgcgccctggtctgggttcgcgccctggtctgggttcgagtttgggtccgggtctgagtctagcttttgatctgattctaggtagtgcgggtgtttgagttcgggtccgagtctgtgtcaagctttgtgtataggtctagacaccgatctggttctaggttcggctcaaggtccaagttcaggtcccgcgtgcgggtccaagttttggtcagggtcaggatctcgatccagatctaggtc

SEQ ID NO: 88056 - DNA, 679 bp, Cannabis sativa
  modified_base (201)..(201): a, c, t, g, unknown or other
aaaaaaaaaaaaaaaacactcttattttcccctaaaagtgtgacttaaaattagaaaaactaagaaaatgagaagaagataaagaagaataactgaacaagaaataaaataaaaaatttatatgttaatggagagagtaagagaacttaaggaagaagatactgagaaaaaatatgataagtgtatggattttgaaaaaanaaaaaaaaaagaaagaaaaaatacccatgaagaagaagaacatggagagaaaaagaataggaaatacaatcaaaaagtaaaatgaaacaccttttgactctcatttttatcatctttaattttaagttaaaaaaaaataaaaataaataaataaaaaacttgtcaatgtgacaacatcaatcaaatcaaaattttatatatattttcatctttatcattattaattttaagtaaaaaatattaaaaaaaatataaatcatattaaaaaatatttaaaaaaaattgaaacttcattaaaagtgacacctcatgtcactatcaaaaatatatataaaaaggtttaaaaaaaggttgttatataaaacttaatcaatatacacagtaaaaataaaaaaaaaataaaaaaaaaaaataccacctgacagtatttatgtaaaaaaaaacagcaaaaatcaatatattatgtaaattttcctta

SEQ ID NO: 88057 - DNA, 798 bp, Cannabis sativa
ggttccaatgaccttgatagtgagctggagatttttcccctatcttttcgaggtcgacaatgtacgcctcgttacttatttatttgaaggcttaatgcttcgttttgacaatcgtagttcttaattacaaagagtagcttagcagtcatttgaatgtcagcttctgactcatcaagactataagtctcactgaaagacgtctgaagttaattggtcaaagtcacatgagtgtgccttcctatagcgagataggcacatcacttattaggtcttgagtccacccgactgttatacttagtttgtatatcatacgctaagtgttttcacagtcaatatgcatcaccttttgtcttcccaggggtaacggagtcgatgtctcaccttatgcatccaatgcagtatgctttctcgttaatacatgaggtaacagtttgtatatctttatctcgcataagaccttatagtcagcgagttgcaagtatactctgttacttccgcatttaatgagttattccattaaaaatgattaccgtttcacacatcgatccatgttcccctttgttatacccaaaattcggctaaaggacacgtgttaagataaagggaatgtgaatcggtgcaatagctttttatggaataactcattaattacgtaagagtcagagtatatttataacccgctgattataaagtcttaggggaggaatcaatgtacaaactggcacttagtgttttagcgagaaacaattcattgctgaatgccaatagcaaggcaccagagaaagtgacacataccaa

SEQ ID NO: 88058 - DNA, 720 bp, Cannabis sativa
gttttgatattgttttgttgttaattttatgtgatttttttgttattttcttataattttataaagtactgtaaaaatataaaaagaaaatttaaatgtaaaaaaatatattttttataaaaattagtgttttatgtaattataaaaaaaaaattattattttgtagtggatataaggttgcattgttagagagtttcacattgctaatgtgtgaaaagataatagaatatataagatgaatgagctactcttcccattgccaattagttttgagatgaaacctcattcacctaaaagtccacttgtgattagggatagtaatagtgagccaaaagagctctacttatgatcgagttgtgctaatgtgtggaaagataatagattatataagaaaaatggactacttttcctattgccaattaattttaagatgaaagcttatttatcttatctccaaattttaatatgcataaagtataatcatgtgtttattcatagcaaagatttaactatatctaaacgaatggaggaacaaacaacatgctatttgtttataacttttcttatattttcttaaagacaatttggcttaatttaaataggtaaataaacaaaccagaggtttcgtggtccccctgttttgtaggtacacgcacaatgacgcaatggtagtattttaacttattatgaaagagagtcattgtcaataatatatggac

SEQ ID NO: 88059 - DNA, 1400 bp, Cannabis sativa
  modified_base (62)..(66): a, c, t, g, unknown or other
cataccaataatttgaaaataaaatataagtaagttttgaacctagaaataaaataataaannnnnaacttaaaataaaaaatttgtaataacactacaaaatagagcaaccccattacattactctcaaaatatgtaaaccagcttcgaacaataatttaaaaaaaaaaacacttacaaaaataatagaaagcaacacataataataatttaagaacataatataaatgtgaaaacccgtttcgaacttgttaaccctatgaaactagttttgacctatgaaaaatcataacaaaatctgtgaaaccataaaaataaatttgcgaactcatacaatatgacaaacttaaaataaataaaatatgaccaaatacaacaaaatatatatttttttcctcatataaaaaataaataaaatatgacaaacttaaaataaatatatatgttataaaaaaaaaacactaagacatatcataaaaaaaaatttaagaagtaacttataaaattaaacgattgaaacaagtaaccagttatatcaaacaatcaattaaaataataacaaaaactagtttcaaccctataaaaatcataacaaaacataaataataaacggtaaaaatagctgaaaccaatttcattagtgaaacaaacaagaaaaacacacacacacacacacacaagaaaatactcacaaatatataataaaacagtatacaatgtacaacaaaaatctaaaagtgtgatacttaaagtgaaactgatttttatctgtataaaaaccagtttcgatttttgtctatataaatgaaaacaaaatatacagataaaaaataacttcacttaagtataaaataaatataaaaaaccagtttcattaagcactagatcggagtcaagagttttaactccgacacgccctaaatggaaaacgaaggtgagggaagcttcaaaaatcttagggctcggggtttcaaacttatttgcgaccggcgttcgggggaagctcgtcgggcttggcgtggtcatcgtgaagatttatatatatacataaatatatatatatattatcagagagagaaagaaactttgggaaagcacggggttgggtttcggggttctttgagtttagccatggtatctgttctcgccaacagtggtagtggatggtgattggggccccgtcgtggctttgccaagaaatgggagaccaaagagaggaagaaaggaggagcaagagaggttagcactccatgtttaggtgtttccagggactgcaagcatggtggtgtgatctgttaggaccatcgccgaccaaaaatggctcatcggagcctggacaggggtgccgcacaaaagcaagagtgagagggaggtagggtacgggaaagaaagaaagagat

SEQ ID NO: 88060 - DNA, 573 bp, Cannabis sativa
tgggtgtagaggatgaactaggttagtcttcattcttcgggaagtttgacatccaaggtgttgtatttggattgtgtcaacttggccttggctttgagctcgaactacccttattgagtttcctttcaactttgattgtcatatgcaccaaatcttccaattccacaaaatggtgtagttcaactgcattagcaatctcttaattcaatccattcaaaaaccttgccattattgcctcctgatattcttccacattggctccaatcatagccatctccatctccttgaaatactcatgaacattcttgtaaccttgacgaagaccttgcaacttgaggtacaagtctcaataatagtgagatggtacaaaacgccgcctcatcaccctcttcatagcctcccaagagtcaatatctcattctccattccgcctcttgttgatgcacaactaatcactcttccatctttttcatctttttatttcccatataattatctacttggttcccagcttctctatccttaccatatctcctatggttacccgatgacatcccatcaaactcttcatca

SEQ ID NO: 88061 - DNA, 1565 bp, Cannabis sativa
  modified_base (1346)..(1356): a, c, t, g, unknown or other
ttttttttttttttgcatattatacaaatttaattttttaaaaatacaattttaatatttcaaaattataaaaatatatttttttcaaaaaaaaaaacaaaaaatttaagaaaacaacgagaagttaatctcacgacaattataaatcaattataataaactataaaacaacaaaaaattaacaaaaaaaaccaatctcataccaactaatatataaattataaaacaattaaaaaaaatctcgagtagtttattatttttattaaagaacatatttttctaaataaaaaaaaaatccaaactgtaaaaataaaaattctttcgtgttatcaattttttataattttttttttcaaaattttcctttactatgtaaaaaaattgaaattatatatataaatttaagttgttgcaatacacatatgagtgaataatgaaaatgttagaagtgactactttaatagaacttttactagaatttctaattttgcacttgattagaataaaaaaaaaaaaagacaaactagaaatctataaaaaaatctaaaaattcaaaaaaaaatcaaaaatttataaaagaataaatttatattcttttatattttatgttttgttttgaattgcgtccaataggatttgaatctatactaaaagtttagaagacctctgtcctatccattagataagtggacgctttttattttattttttattttttatttttcttgttcgtaaaaaatgaatataggagagggttgcacgttgctttctaccacatcgttttaaacgaagttttatcataacattcttttagtttaaaagttataaattataatattttactaatttcgtcctttttaaagaagatactaattgtaggaaaaatagatttttcacaataaaagcaaatccctttgacatcatttgagaaaaaaaaattaaccatcgatagtcctttgttttaaattataccggttttcaagaccagagctatcaaccactcgaccatctctccgaaaatgctctaatagtgacaccttttatcaatttcaattttgttaatattatctgccaagtaatataattatgaaacaagaatgtcactgataatgatccctaaacttaattagttaaacaactaattgtttgtgttttattgtattgaaatttctatatttataaagtgatctttatacaacaaatgacaataattttaaaaaatatctcattgtattatttgtaccacaaaacatttaaccacgtcttatgaattgataacttttttcactaaatttaccacgaaacagaaccttccctttacttttgtgtgtgtgtgtgtttttttnnnnnnnnnnnaattaaactcttattaacaacaactaagagtttaatacatatcaataagaaaagaagaataatcatcaatctaagctaattcaccatccattctcagtgcatgcacaactaattcatgagaaacgaacatgaactagggatgccttaggaaaactggaaagcaaactagcaaaaaaaatctataaaatcctagctcatttcaaaagaaa

SEQ ID NO: 88062 - DNA, 669 bp, Cannabis sativa
aaaaaaaaaaaaaaaaaaagacccttgttgaaaaagcagaaaaaaataaaataaaattgacttgtttaatatgcaaaattaatatctatttcattatcaccgtaccgaatcactgacacaacaaaatatttttgtttccaatccaattaatattatttaatatcatttcattttgtaacttacaattgcaaaacatgtgattttatgaggttcataatgtcgaagtttgcatttctctaacttttgccaccagcaactgtcatttttggcgtatagctaaccatgtataataatatcattaccttacaaaagaaatgtataatatcattagatattatttgatgaaataacaaatctttctagattgattcagaaccacagcaacacattgaaagagagaaaaaaaaaaaagagattttgagtgatagcaaaaaaattatatatttataaaaatgacaatttaattcgacatatcaataataaatagtgataatttttgtatctagcatctaaaataaacaaaaataaccactatcttatacagggccgaccctaaaatttattgggtcataaaaaaaaagggttaatttcacaaatgcacaaaactaacaaaaatataacaaaaatacggttttacggattttgaacatttttacgatttttttgatt

SEQ ID NO: 88063 - DNA, 660 bp, Cannabis sativa
cgttttcggtttcatgaatttaatcatcaataatgaaagtttaacttttgtattaatgaatgattaattaattgtaaagaagctatgaaaaagaaaaaagaaaacgtactcatatttttttgtattgtcgttttgttccgggcggttgaattttgttagctcatcccatatcgttcataatgattacgaatcccaagtatagacaccaactatttatagtttgtatttttttttttttttgaaaaaacttacagacatcaaacggtgacgtatttgaaaagtctcatgatgagctggactttgagttcttaggcaatgtagaaggaaagccatggaggtttcagactaatctgtacggaaatggcagtaggagccgtggccgagaagaacgctaccgcctttggttcgatcccaccaaagagttccaccgctatagcattctgtggaccccaaacatcattatgtaagtagttctttctctttttattttttaaataaaaattagtttcttttcttaattaattatatttcaattaatattttcatgttttaattttcgaatcccaataattcattgatataaatgactaaaatgagagtgatttcaatacgtaatatattttgacattgtcattagtcagataacgcatgcgcgtatgt

SEQ ID NO: 88064 - DNA, 538 bp, Cannabis sativa
gtattgttataatttgatcggatactattagtctttgaatttgcttagaaatatggcattagttttgactgagatataaatttgaagagaaatgttaaaaggaactagtaataatattagtataattaagtataatgtttcgtacctataatttaatgtaataaattttatagaataactaatattaatgattaatgtaacataatactaggacgatgtcttacaccaatgctcaatttcatagtttgcttatctttataaatatatgagattattaagatatctctagtggagtaggtgtatatgcatatattaagttcaatttttatgaaattgatctccaataacagtgtataatgttgtcaaatttgattgtgctaaaacttgtgtcgaatttgacaaaatataaaatatacagctaaatttacattataataaacattatattttttttatttatactttttgcttactcattaatcaattgataattttttacaatttatttatatattaatagagttgttatatactttca

SEQ ID NO: 88065 - DNA, 792 bp, Cannabis sativa
aatccaattcgcacaagtggggattggattggattggatcgaatactttgtgaacacccctatgaatgcctatataaataaagagaagagaattgaaaaaccctaattgaatgtcaaataaccttttctcttctcttctttcttctatttcaaaattcattagcaaaaactcaatctcaatattgttcaaaggtgagttgagtatcaacccacactattcaagttaatactcagacatttgtggaagattgtgatgaacaaaatcgaaggagaaaagatctaagttcaattcttaatcatactctacaacagaaataatcaagggttagaactgaacaggaagagacattatattctgctgccattattataaggttttctataactttatgtgtttacttcattttttttaggattgttcgtatttaagttgttagattatagatttataatcaacatacataatttttttatcaaagcagaagagattctcattaatcaacaagcacaaatacaaccaagctacaacaaaagccgagacaacaacctgctaggctaaaagacaggtaaaaagggagtttggggcataattttcagcctaaagaatttaccatagtcactagaagaagaggtatcactagaagatggggtagaaagaccatagtatccactaaaatccctacaccccgtgatcttgaatatatcaaaaggatcaactggttctaaatcccagctcgcgtctaggtgacttgccctatttgtcatggtaccatattgctcgactataccgta

SEQ ID NO: 88066 - DNA, 1014 bp, Cannabis sativa
  modified_base (53)..(53): a, c, t, g, unknown or other
atcacttcaaattccttatattgataactaatcagattgtaaagagttttatntagggcataaaacccaacaagtgcctactcactgtagtaagcaatattttctttcaatggttgatgattatagtcgatgtgtttggacctacttgctaaccactaaggatgagtgtttggaatagtttagaatttgaaaacctcaggtggaaaaccaaaccaatcttaaaattaagaacgttatgactgataatgggttggagtttgttaactcagaatttaacaagatgtgtcaagaatttggcatcactaggtatagaaccgtagtgaagacctgtgagcaaaatggtgttgctaaaaagatgaacggaaccttgttgaacaaagttagatgtttacaattcagttctgggttaggaaaaccattttgggaggaagccttagcaactgcaacctaccttattaacaggagcccaaatagagttttagaccttaagacacctttatgaaatatggtacaacaagacccccaacctaatttatttaagaacttttgggtgtactgcatatgtacaccaatccattgacaagctagaacctaggtctgtgaaaggaacttttctaggttatgccttaggaaccaaggggtatagaatctacattactaggaaaggtaaaccaaaggttatgattgctagaaatgttattttcaatgagttagaatatcctcacttgacctctaggaagggtagtgtatctccgtgtgttataggaaaaataggaaataaagagactgcaagtgtagaagtggagtgcggaatgaagctcctagaagaaggttcacaggcgaaagatagtgtggaaccggaagacaatgggtagatggaagtcgttgtgcagccggaagaacaagataacaaagaccaaacagaggtgccaaaagggtttggacagacaactctggaaggttattagttggctcgtgatagaacccaaagagggattcatcctccaactaggt

SEQ ID NO: 88067 - DNA, 757 bp, Cannabis sativa
cattgtaccatagtccaatagatctccagatgtgtatgttttaaatctaaatataaaatataagttaagaacatatacctcttgatgactatcctcgaaacttctcgtatgatttatcttttaatctggatgatgaagaaatgcaaattaactcacaccagtgtcttccgaatcgatccaccacacacaagaaatagtgtgggctattaagataaagtgtgtaatgtgttcttattgaattctcaacacatgagcaagaacaatttgagagagaaaacaattttttttttcctcaagtaatttcaaaaattcgtattgaaaaccaatatttgatttctcaaattagacttctatttatagtagttgaattctattaattaaatcttatttaattatttaaataaatatctataatcgaattcgattattgatatttatgatggaatttctcaattacttgagagaatatctcaactactttgaaatatctttaactatttttcaaattcaaatttttatctaatttaattaaacccaaaaagataaaaccaatagggacatagcacctaccatgtctgaattaagacaaggacggtgtcttttttcctaacaacttttgtctcaacaaatattgtctcgacgaaattaattttaacaaattttgtcttttctctatttaattaatttaaaaatttaattatttattttttttctaattcaaaatagattttttcgaacaacattatacaactcttta

SEQ ID NO: 88068 - DNA, 854 bp, Cannabis sativa
  modified_base (359)..(362): a, c, t, g, unknown or other
cccatacctttacaatgcttacagacaattggtttccactcataatcaatggaaactgaaacattagccccaaactcatcctcaaattctataaggttcggaaattcctaatgaattgaaacctctaatagaactctaggaaaattcagtttgtctctttcctttgtaacatcatcaaccattaatggtttttcaacttgcccaatgatcttgtacaacgatttctgcccccaatacttaaattaattaaatattaattaaatataatttttaacataaatataattttcttatttaattaaatctcttaagaaaaatatcaaatatttaagtgccttgaacaaatcaacttaaatatnnnntttctatttaattaaatatatctaaaaaataccaaaaagtctacttagaaaataactatctagatatttcataaactaactattgattttctaattaaaatatattttactctattcattttaaaaaatcaaaaattacttgatttaagctgatccaaaattaattaacaaattaattttcaaaatttaactactgttaatgcagattttcgttaactaaatttgagcctcacggtaataattccacagagaaaaaaataaaagttatagaaaaataatatatatacacatggttttttacgtcgtttggagttaaaattctgcataatcaacgagtcaatcttattcagatttctgagtatttttttagggcctctttcatatgagttctttttgtcctttttttgaaattgtttgccactatttatagtacatagtgggcagttaattgcaaagttgaccagaatatgtttacagccattatccctaaaa

SEQ ID NO: 88069 - DNA, 1083 bp, Cannabis sativa
  modified_base (413)..(421): a, c, t, g, unknown or other
  modified_base (1047)..(1050): a, c, t, g, unknown or other
cacccactgtaaggttttctaaactttatatatgtgtttattttcattgttttagaattcatattaggttgttaattcaacatacttgttagtaaatctagatcctcgtaaaattaatttccaacaccttcttcacaaactaaaattcagccattagtgattgagtgcatgcccacacataaccagttggtcctcaatcaaaatatgtaagactgtgaagaatccaaacaacaagaaggagaatcgggctcagatctgggtgatactctactacagaaaggattcaagggttagagatctaagcggaaggagtcatttaattccactgcaaccactgtaaggtttctcataccttttatgtgtttattttgatcgttttagaaattcatattaggatgttaaaaacatacttnnnnnnnnntctagatcctggtaaaatataatccaatatttcacatatacatacatttgcatatatatcacataaatcacacgccaaaaccctaatcctagaagcctgaacctacaacttaaggttgtgctattactaactggaactacaatatcctagcaaacagggaagcacccaaacgaggcactgaaatgtacatgaattgaggaaatgagttgtttggagaatatgccaaaaactggttaaccggttttacaggtcctggcaaaccggttaaccggtttgcattaggtttccacaaacaattcacaacctactcaaaacatgcccaaatgccaccaaactttccataacacttataatgagcatacacattatattccaaccaacagaactctaaaaaccacataaacaatcatcacaaacagcagcaagagcctatttccaactcaatttaagcttagaattcgaaccacacataaatccaaccctaacagcccttaaatctctaatatgcataactaaccgtagataaagcttcaaaaatacaaaactataagttctagggttacctttgttggaaatattttaccaggctctagatttactaacaagtatgttttattaacatcctnnnntgaatttctaaaacaatgaaattaacacataag

SEQ ID NO: 88070 - DNA, 1646 bp, Cannabis sativa
  modified_base (312)..(339): a, c, t, g, unknown or other
agcaaagaactatccaatcaacccaagttttaataaaaccaataaaagttaatgtaagcccaaataaaaagtctaacagcttagtcaagagagtttgattaaataaacaaaggttcctagacctctaacatcttctttatgcaaacacagtttgtcttaagtgcaccactatccattgatagcagaaaagaaaaagactattcatatgtaccatatataataataaatgaaaaaaaacaaattgagtcacacaaacttaattttatattatatacccactacaaaaatttttatttttagtcacaacaaaannnnnnnnnnnnnnnnnnnnnnnnnnnnctaattataaattattattcttgtgttgtgactaaatggtccgtggctaaaggtattagtcacaaaaaattataatttattgtgactaaatgtgtttttagtcacaatacttgttgtaactaaaattaaattagtgacaacttatgtgtaaatggtatgttatagtcacaaataattttttgttgtgactaaaagttacatttagttacaaattttttatgtaatggtacaaacgaagcacgctcatttgttagtttcctcaaatccttataaaaaactaatataatagtaggaatattattatgcatgtcataataaaatgattttaagaattatcttttttagaaaataaactacataaataataaaacgatgtattaaaatttttaattgtgattgatttactaatttttcttcccttaatttataaatattcaacaactttgtttgtttgttaactcttattttttttaataaaaaataattaatttttattattattaatgtgattaaatcatagaattgattaaaagtatttttctttttttttttatgatgatgtactctctcatcatgataacttattattgtttactgaaatttagtctttgtccacgaagtagttttataagctttttagcaatggactttttacagctttgtagtattttcaagttgtgattcgtgagcaagttttcagaaacccattcctcgtcctttgcctactgaagaccatcttaaaagggcaaaacacactcaagctgttgtgcaagaagctatcaatatggagttgggtgcgtaggaagaactgagagttagtgcactaggaagaactgagagttaccttattgcttggaatcactttatgattgatgcctagagaggaatgagtgatccttttaataattacatagagatatggcatgaggatatgcgaattcaagtgaatcagttgaatgatttagtccaacgaattgtggtgagcttcgatgtggagaatttattcatgtatcctacatagtactctccatacccggccaccaccgccaactcctccggcatactgatgtggcgttaggtgagttcttttcctaatttgttctttcaatatgaattttcagtttgggggagagctaattttatcttgttgtattgtttagttgttaatttttagtttcttttgttattttgtgttgttttaattgtttatttagtgtcagttgtaaagccatttattctttgctcgtaaacaaaattgtattaaactgtgtgtttggtttaatttgttttagagttcaatttaaatg

SEQ ID NO: 88071 - DNA, 655 bp, Cannabis sativa
gataagtttgcattatcaaaacatgattgatacaaaagtaacaaaaatgctagcaggaatgtcagacataaaagatgtgcaaactttactccttgcatttatgttatttttgtatcaataatgttcgcatctgcaaatttatcaattatatatgaataggtaactaggtgaggtacttacaacttttcaacaatgatgtttgtaaattgtataattatgacaaatctaacccgacaacaatataagaagagttgtttatagattcatgtattttaaacaccttaatttggcaataaaactagacaattatggtataggataataaaaaagacaaagaatttgctaatatttagcaaactacaagagtttatctaatacatgtttgtttcatacaagctcctcgccagcttccgggtattctaatggtaaaaatgtcgcaaagacattatttcaacaaagtccataaattttattacactgtcaatgtccctttttttttatatgacacatgaagagtaaattgcttctaatgctaccaaattcatcaagttttatcctgcaattaaaatttcccgaaataaattttaccaagtcattcaattatccatgcataataaaacctcttatccctgatctttggatcaatgacctagct

SEQ ID NO: 88072 - DNA, 771 bp, Cannabis sativa
ctctttctctcttcatcttcttcttattttattctatataattttataacacaaatagttaaatgcacacttaattgttgggtctccgtaactagatgaacatctttattcttcctcaaagcattataaaagaggtagaaaagctctatcgtggatttctttgggatgttaaagaaagtaggagcaatatccatatggcgtctcgggacaaagtttgtttgcttaagtcccatggtgagtttggatggagcaaattggaatagggccgtccttcctaagtatgtttgggcagtgatggggaaacacaacctgctttgggtcaagtggatcaactatgttcatttgaaaggggatgacttctgggagtatatgttagttgctgattctagctggtactggaggaaactatgccatttgagagatagatttagtaaacaaaatatccttgctgctgttagaaatagtaagcttcgatctgctattttgtatagtagccttctgaagccagggatttgcaactacaagcaggttgtttggtgtaggcttagccttgctaaatattgtttcattatgtggcagatagtgaccactagatatataatgactatgatcctcggtatcttcttttgtatgtattttctccttgaatttaccataacttgtcaaagaataaaatggatctctaaatccagtcacattggtccctcgagcaacagtaggaccactagcatcattggtctttctagcattattaggatctgtactgtcagt

SEQ ID NO: 88073 - DNA, 569 bp, Cannabis sativa
tgtccccatattcctgtcccatctctgtcccaacgaattatattttgccaactcatttaaaatgccaactgtacatttaaccaatcaaatattattaactccatttattttcctcgtattttattttctttcttattaaaaagaacaaaagtaatcatctccctctttattctagttattagtcttcagtggctatacacagtatcttttctaatttgctataagtgggtttatgaagtatatacagtatgcttaggattttctttttcttaccaggttgaataatcttcgtcagaaaaataagagttttgatttttacctttaagcttctaaatctgataaaaaaaatatgaagattgaagaataaaaatatgataattcatatcagaaacaattaatattgattaatgagatttcaattttagttaaatatagaatatcaatcgtcaatccacatgcaaacggatgaattatattttggaggggctgatttatttaataaatatatacatataaattaaaggaaaacaaacagactaacggagacttaggctcttaaatgtacagtt

SEQ ID NO: 88074 - DNA, 793 bp, Cannabis sativa
  modified_base (447)..(451): a, c, t, g, unknown or other
agcatacagataagacttggctggatagagattttttcttaacatgtgagaattcctttgaaattatgataaaggaagcggttcgcggggttcaaataatcaagttggcgggaattgaaagagatgttgtttcagactgaagatactaaaaaaattccaacaagttaggctcatcacaatcaactacatgcatatgcatagttaattctttggaagatcactaagaaaagcagctgagaaataagttcaattctgcaggtcttaacaaaataaattcagagaaacgagataagaaacatcactgctggaacagttacagattaagtcctatgatctcttctttcataatactaataatggaaaaacaaagtgaaaacaatgtagccttagataatgtttctaaacaaggcaagctgtaacgcaaactaaaatatctcctttccgttnnnnnataatgtttctaaagaaggtgaaatccacatcaacgaatccttcaaatctgataatctttcaggatcatattcaccaagaactagtttgagatgcttccaattaaccaagggagaactacatatgttcttcaacttctccgaaaagatgagagccttcatacaaatataataaacatatcaactaattaatatacagtatgtagagactaatggtattaacttgaaataaggccaaagaaacaaatacctttgctttgtgaacacgtaggcttacaacgttccatgagcaatttaaattcgaaagaaatttcatcatgttggtaaaacttgtgtcactgtca

SEQ ID NO: 88075 - DNA, 524 bp, Cannabis sativa
ttttttttttttttctgtgaggtgaggcgtatgcctcaaagcgcattgaggcgtaaattgaggtgtaagcctcaattatttaattaaaataatatttttaaagttactaaaaataccaatgataaatgtcttataaatactaaacatattaaaaaatgtctcataaaacaaaaacttagcatcaaatgtctaataaaactcaaacgtaagtaaatatatttttgtttctagaactagaatcatattctattatcctagaacaaatttcagcaataatgacatgatgatttagaaatcactaaattcttgagtaattgttgccctccttatcatcatcatcactactactacccccattgtgatcataaatatcctcctattcatcttcatcaacttctaccaagcgctttcgttttcctaagaaaaaataattacaaattaataatcaataattgattagcataatgcaatatgtaaattaaaacaagaatagagtttatgaacccctttttaaactacttgct

SEQ ID NO: 88076 - DNA, 687 bp, Cannabis sativa
tcacatgaggacatggtcagaatccattcttctatcatttcacacgccgtaaatattgatcctaatttctggcatgttcaacaaaaaagaatattgttggataaggaacaaaccctagcactaaaagaagagataaaaaaagttgtgcaacaacaatttcataattgaagctttctacccagcttgggttgctaatcccgtactagtacccaagccgaacagaaatagaccattagaaccaaaaaaacctaaaacaaattagatccatggtgagcttccaacgaaccacgagccgagatccagagcatgattcaaacgaaccccgagctgagatccatggcgagcttcaaatgctgtcaccacgagctgagatcgctgcacagaaaaataaatgctgtcaccacaagagagagcgagagagagacaaacaaaaaaataaaaagtagaaaaaaacctgtctaccttgggcgatcatgatggagatctcaaaactttggctaatggagtccaacgcgaggcagaaggaagacaatggccatctgtcctggacgaggctcgtgcgcgaaaagaaaatgagaaaggagagagaggccgaatgagtaagctgaggatagtgcgcgatcaagagaactggaggagagggttggaaatattttaccaggatctatatttattaacaagtatgtt

SEQ ID NO: 88077 - DNA, 1510 bp, Cannabis sativa
  modified_base (322)..(324): a, c, t, g, unknown or other
  modified_base (986)..(995): a, c, t, g, unknown or other
ccccacaagttcaaaatgccaacatggaagatgtatactgggagagaagatcctctctcccatctcaagtattttgagatgaaaatggagttacagggagtgagagggcacatatgctgtagaatattccctgccacttggtcggaagccgcacagcaatggtatttcaagttggctcctggaaagtttagttcacggaaaaccttctcttcggaatcgcatggacaattctcttcctcacgtcaactcccattgcatctgggagatttgatcgaagtaaaacagccactaggcgaaccactccgggcatacatcagcagannnatgacggaagcgaccaaggtgtcgcgggtaaacgaggatggaaagttatccacgatactcgagggcattgaagtccttggcgaactatggaaggatataaggaaaaacggatcggtcgactcaatgagtgatttccttgaccaagccgtaggcttcatcaacctcaaggaagccattcaacgaacagaaggtgagcaaaagtcgggcaaaacgaaggctccttccactggaaaatctgcccaacttcccaattattctagcaattcaagtggcaagcgttcaagcaacaaccacaagcaaggaaacgggaagaaaggaaaatacaccaaaaagtccggacagactccctgtgatcatgccaaacacactgcattcactatcctaactgaagatatagagagtgtgtacatggaaactcagtcgttaattccgtagaagaagcctgggcccatgaagaaagataccaacaatagggacatgacaaaattttgtcggttccacggacactacggccacgacaccaacgaatgctacaacctgaagtgggaaatagaatatctgatcaagaaaaacaacccgcacttacaaaaagatgtcaaggccaaccaaggtcagaacaaccaggatctattacctgcaccgatagatggacacttgcaagnnnnnnnnnnaggcccacacatcgctggagatacgggtaaagctcgagagagatatgcccgaacagctcagtacgagaaagaagaagtcatcctggtcgtggaagagaggaagtacaaagttccacgcgcaggagagccaaccataactttcaatgataaagatgttgtcctgatcagattcccgcacaacaacccactggtcgtggaagtccagatatcaaacaaaatggtggctagaaccatgatctataatggagcttcttcaaacattttgttcaagactgcttacgagaaaatggggctctagctcaaggatctaactccatgcctccagcctgtttatggtttctccggtcaagcagttgcacctctaggacaaatccggctacccctcacagttggaaaagctccgatgagaataactatcatggcgcagttcctaatattggatgttctttcagcctttaacgtaatgcttggccgaccagtcttgtatgacttagggtgtcttagagagaatcagc

SEQ ID NO: 88078 - DNA, 515 bp, Cannabis sativa
  modified_base (131)..(136): a, c, t, g, unknown or other
ttaaataaaactaacactacgtggtttgacacgtaacaatcacctagtatatacatatacatatataataatttatagtataaaaaattaagtttaaaatatatagttaagtttaatttttgacagtaatnnnnnntaagttatatttttagaacttctgtaagtatttagttgttaagtgttaagtaaattacaacgtgacaaattatgattggtccatatcattcaaattttcttttttttttttgaaaaaaaaaaattattttaaatatatcaataatatgaaaataacaagtggataataatttaacatttaactttcaggtacctatgaagttttagaaatataacttaagtattattaccgcaaaaaattaaacttatttattggaagtgaaagttaaacttaactatttatatataaattactcatatatatatatatccaaaattagctttttatttattaaatactgatcgccagtataatagtctatatatttatataaagataa

SEQ ID NO: 88079 - DNA, 872 bp, Cannabis sativa
  modified_base (670)..(687): a, c, t, g, unknown or other
tggaaaaataaaaatatgtatattaccctcacaaataaattgataaagacaagccagggccgggcctgtggtggtaatggtagtgattgtggtgtgaaggtaatggtgagagtgataatagttgtgattgtagtgtaagggtggtggtgttaatagaaatggtggtgacagtgataatagttgtgattaggataagtaattaaggtatatcaaatgaagaagagaagaaaagaagagattttaaattttaaaattatttttattttttaaaattaatattaagtagattaataaaaatttactacatgtacaaaagtgtatatgtggatagtttattatgacatttaactgtaatttttaaataaaaatgtacaaagcaaaacgcaataaaagttgataaagttttgctaaaaaaaaattaatttttgtggttaaatatgaaaaaaatttaaaatttaaatcatttaaccgacaatattctatatataaattgataaagatgcttttgtattcacatgaatacttactattggcactagtagtagtagtaagaatgcttctattacttggcgcacgcaagattttatttatttaaacatttatatattagtggattcgaatcacaacctccaatacatacccatgctaaaatagtttttttttttttttnnnnnnnnnnnnnnnnnnaagttcattgcaataaaaagttgggaatcctcgaaaaaatgtagccattacactgactattttctctagcccattttgctaaagcatcacatgctacctcacaaataaattgataaagacaagacagagaatctcaaataagatatgaattacattttggtttcaaatttcaattattgcatttg

SEQ ID NO: 88080 - DNA, 2393 bp, Cannabis sativa
  modified_base (120)..(123): a, c, t, g, unknown or other
  modified_base (881)..(882): a, c, t, g, unknown or other
  modified_base (1675)..(1677): a, c, t, g, unknown or other
cgcggatggaggtggcgcgtggggcccacgcgcagctcagatggttgccgaatttttgggttttgccgatcggaggtgggagaaacttcttgggtcagaggtgagaatagaaaactcctnnnnattagttttctaagatagagcctccaaaccctaattttaagaagggaaggaatgaaaaaattctttgagaagcttttacatgctctgataccatgtagacaatgagagaaatgatttttattttctgatgatcaattttagtatatacaaaaggtatatataatacaatgtgaacacctaaaacactagagtaaatgaaaaaacattaaatgtaaatttacacctaatttacagctagcttgatatcctacactactaaatacaaataggaaactactaaatacaagttaccttaattttttacaattaatattctaacactccctctcaagttggagcataaatgttaatcatgtccagcttgttacaaagataatcaacctgcaccccattcaaagcctttgtaaaaatatctcctaattgttctccagtcttcacatatcctgtggagatcaagccttgttgaattttctcacgaacaaaatgacaatcaatctcaatgtgcttagttcgctcatggaacacgagatttgaggcaatatgaagagcaacttgattatcacttacaattttgccggaatagaagtcttaaacccgaattcaatcaaaagctgataaatccatattacctcacacacagactgtgctataactctatattctgattcagcactggatcgagacacaacattttgtttcttactcttccaagagatcaaattgcccctaacaaatacacaatatcctgaagtggatcnnctatctaccttggagcctgcccaatgtgcataagagaaatactcaatctgggtatgtccatgatccttgtaaactatacctcgtcatgaagctcctttcaagtaacataaaatttgctctaatgctgcacaatgatgaactgttggagaaaacataaactgactaatgacactaactagaaaagtaatatttggacgagtcacagttagataattcaacgtttcaaccaatctgcaatatttctcaggatcttcaaatggttctccatcacgtgtaagatgcacaggttttgctcccaatttttctgtctcagttaacaaatcaagtacacacttcctttaagacagaaaaataccttgtttactccgagtaacttcaacacccaagaaatacttgagcacccctaaatgcttcgtgtgaaactgggtatgaatgaaagatttaagggatgagatgccttcagtatcattttccgtaataacgatgtcatcaacatacaccattaacaaaatgacaccaacaattgatcctttatagaacacaaaatgatctgacttacttttcaacaaactaaatttctcaatagcctgactgaatttatcaaaccaagctcatggactttgtttcaatccatataaagatttgcgaagacgacaaactcgccctaattccccctgagcaacaaacaaaggaggttgctccatatatatttcttcctcaagatctccatgaagaaaagcatttttaatatcaagttgatgcaaaggccaatgatgagtagctgccatggaannnaacagtcgaacagatgtgagtttagcaataggagaaaaagtattacaatagtccactccataggtttgagcataacccttggcaacaagacgaacctttaagcgagcaattgttccatcttgattgaatttaaccgtaaacacccatttgcaccctatgacccgttttcttgaaagtaaattaaccaagtcccaagtactatttgcaattaaagcattcatctcttctatcattgcagcaagccaaccaggatgagacattgcttcacagacagttttatgaatagtaatagaattaagagaagcaataaaaaagcaagaagaagaggagagatgattataagatacaaaagaagaaataggaaaagtacattggcgtttacctttacgtaatgcaataaaaagatcatctttaagtttcggatctgatgacgaagatgcaggtgcaggacatgaaacaggaggtggaggagggggacgcctggtgtacactataggaggccgagggagtggtggaggtggtggagatgtaagcattgtgagaggtatgactgaggcaggtgaagaaacaagggacttgtcagaacatgtatcaggcgcaaaggatgtgacaggatataccaacaaatcatcatcctccccctgacgagtaaagtagttgaagatgaaaaataaggtgtattttccacaaaggtaacatcaatagaaacaagatat

SEQ ID NO: 88081 - DNA, 878 bp, Cannabis sativa
gatcctgatctcgggtcccgatctggttccattttgggtgccgagtcacgagtgggtacctaggttcgtgtccgagtcttgtatcgggtcttgggtcccggtcctagttccgttgccgaagtccctatcctgattttgggtctagctcccagttctagtttgggtttgggtccaagtgtaggttacggtttgggtcctcattgcggttcgagtttgggtctctgtctgggttttcatttgggtttgggtttaggtttgggtccttgtcgtggtcgttgtcctattcttagtccggttccagttccaatttcgatttcgagttcgagtttgggttcgatgttaggtcagggttggagtcttggtctgagtttgggtctgggtctgaatctcggtctaggtgcggatcgagctctgggtgttggttagggggctgggtctgggtccaggttcgggtctgagtcccaggttttttatctcgatttgagttcgggtttagtttcgggtctaagtcctgattctgatcccgatctgtgttcgagtttgggtcttggtgcaggactaggtttgggtcttgttctgggtctaggtcttagttggggcccaacgtttttgtctgggttttggttttgtcttggtatgggttcgtttctaggttcgtgtcctggtctgggtcctgtgcaggtttcgggtacggggttgggtccaacttcagatttcgggtctaggttaggtcctggttatggttcgagtcccggatttagatctgggtcacggttctagggcctaggtccctggtctaggtcccccatccaagtcgggtttgtaggtcctagtctgggcctaggttcgggttcggctattgagtcttggttttagtc

SEQ ID NO: 88082 - DNA, 709 bp, Cannabis sativa
attcaaattttcatcaaattgtctctgtagggtattctaaaagattcactagggtggtggctagggttgctttgtaggggaatgatgttgaactccttaaggttacctatccattcatcaccattgatcttattacatggtattatttttttcaataattttttatcaactcataatagtgtagtgctttgagttctctgtcatattcgttaatgtaatatttatgatatttgataaatataactttttttttttgcttgattgagaaattagaagaaaggtattatactctttggttacatttataaattatttgtatgtgtgtatgtgtgatttatgtaacttgtagtcttttaagtttcttggtgtctttttgatctcttagactgtgttgttgttttttttcattttggtacttatatattttttttattatttttaatttataattataataatattcttgttttatgcttatttattttaaataatttgaaaaaatttctgttttgaattttagggaataaactcaagaacaggaaaataccaaaagagaagacaaaatcataattgataactatgtaaatactagattttatttagttcaaatttgtaatcactatctagttagtagttggtagtacttttattggataactgtaaatttataatgtgtagagctttgattactttgcttatttttaaattt

SEQ ID NO: 88083 - DNA, 1747 bp, Cannabis sativa
aagccatcagcagctaaacctagacgaacatttcgaggttcactagcaaaattaggatgtttgacatcagaatccttccacgttgcaccatccacaaggtgtcacatcaccccatcatcttttgatttaccagtgtggttccataccatctattttgccgtatgccttgaactacatagtttcttcaatcgcgaagctaacggaaagtaacgcatcaccttatgaggcaccttttttgctcctgaattttctgaagttatccatctactattgccacaaactggacatgaatctttatttgcatgttcattgtaaaataaacaacaattatgcttgcacaacatgaattcactcataccccaactttaatttcttcaatcttttcttagcatcatagtagtttgatggaattttattttgctttgaaaaggctagttttaacaacttcagtatttcatcaaatatttattaggaatctttcctctagctttgaataccataactttgccaaaaagttaaaagaagatattcaatcacaactaggatgctactcggcctcaatctcctcaaataactcgccatgccattgatttgcattagaattatcatctatttcaattgacggttgaaggaagtcatccaccatcaaaatcatctcgtcaacttcatggtcatcatcaacgtcatcatggtcattgactacattagtagtgcttgattctgcttcaccgtggtaagtcctcttcttgtaaccagtaaaaaaatcccaatcgaatatgtgttctcttacaacaagtaaagtttgaaacctatattgttcacacaccttatacacgggcacctaattctaccatcacaatccttaagtttcgaggccatctctaaaaaatgcatttaaaccattctaaaattgtggacatctacgattttgcaatgtgattcaagacttgtcgattaccatctaaagttttataaagacatataagattttattgtataaagacaaaagtgaatgacacaattttatgatatttttttttaaaaaaaaatcatgtactattatttatttttaaaaataattattcatcatttaaaaattattatatcattaattaattaaaatattaattactcaattatatataaaatattatattattaactaattaagtttattttttatcttattttttaagtaattattacttctaatttgttatatattaaatttttagtatttaaaaaaattaaattattatttttaatattaattatttaattatttataaattattatgctattaaataattacatttatttttttatatttatcttttaagcaattattatttataatttttttatgttaaatttttattatttaaatactaaaatattatataattgttaaaatggaaatacctttttatttttattttttttatagatgaaaatcatttctatatatatatatatatttatatttatataattatttttaaataatatttttattataattaactttttcaataattaatacatttttattctaattttttcactaatttttttttttaaattacataattaattatttaataaatttataattttgtacctattcaaaagttgtacattttttaaaaaattaatagcataatattttttagcataatagaattatataaccttataaactacatttattattacataatatatattattgcaaataatgaatta

SEQ ID NO: 88084 - DNA, 760 bp, Cannabis sativa
accttaggagctttggctttggccacagagaagcccacagatgagctcatggaaaatccaccagtgggtcgaacatcgccactcattaccaacatcatgtggagaaatctcttgactcaagcattttatcaaatatcaattcttctcacactacaatttaaaggcaaatcgatattcaacgtaaatgagaaggtgaaagacactttgatcttcaatacttttgttctatgccaagtcttcaacgagttcaacgcaaggaaattagagaagagaaacgtgttcaaaggaattcataggaacaaactgttcttgggaatcatcgccataaccatcgttcttcaagtattgatggttgagtttttgaagaaatttgctggtacggagaggttgaactgggcacaatggggtgcgtgtgttggactcgctgccatgtcttggccaataggttggattgtcaagtgtatacctgttccaaaaaatccactttttagctacatcaaattactaattgcatataaataagattttaattgggttcttcacgtgtgtaaaaatgtaacattattcttttgatttttttttttttttttttgataaatttaaaagtatttgtaatatttttaaaaaaaaaaagtatttgtaatttttgaattagcatataagtttatcttatgaacacattaataaaaaaatttgtttaattctttcttttttttttctagtggaaaatttttttttttttttgaaagaaaatgaaaat

SEQ ID NO: 88085 - DNA, 778 bp, Cannabis sativa
tcataattaaaaaattattgttttaagtgacgtggctagttttaattggagagatacacaaactcttctagctagctgcaaataatttaatattattggctattattttccttaattcattgtacatactaattaatttttgtcttgaaagtgaactaataacatgtattaatatttaatgaatgaattttaatttatcttatgatttatatatgtgacagccgaacgaaatggtgttcccattggtccaaaggtgtgtacattttctaatttgttcttgaattgtacttaatttaaaattcaataattatgtctttatctgttttagtaattgaaataattttgaatcaaattttttttcatagttatgtacgttatagtaatttaagacattttgtaaaattgtaagaaattccgaaaaatttaacatgacaaaaatatagttcaaacattacattgcatgcatgactattttattttatacgcatagaaaataaactatttgaacactactttttatattataaattattccgaatctatcaaattaattttataaaatattttaaataactataacgtacataaatataaaataaaaattaaattaatttttttctgaatgcaaaaacaagtaattaaatagctagtgcataattgaatctattatagaagcaccccttaatatatatgtattaaatataaaatattatatatgtattatatataaaatatgataatattttttcactttatgatatttgatatgatttattta

SEQ ID NO: 88086 - DNA, 625 bp, Cannabis sativa
tgattttaatatcataaactatttaaaatttctcaaatttttatattttatagggaatgagttttgtctctttttaaaaaattatattgctttgttatgtactataaactttattttatgctctttaattaaggtggaatgtactctaagctcggtatgaagtgctttgacttctaactgttagatcaactcaaatttgatctaatacctttacacaactactacctacattcttatggagtgtttgttatatgagttaaactttgagagagtaaaatttaacagtaattaaacttaaattaagagaatatgaaactcaaatagtgtcggaggaggttaacacttaacattacaatcaattaaacaagttggagtcacttgaaaatacaaattcctaaatcattaaaatttaatttaccaaacaaaaataccaattgagtttgacattttcattctcatcaaatttagctccatactaaacaccccattagtagtagaatcttcttctcaaagtggtgatagttaaaactaagctaaaaaaacagagcaatattatattattatagtagaaaaagaaaaggcaaagtaagtacctttattttatataactgcacatataaataca

SEQ ID NO: 88087 - DNA, 680 bp, Cannabis sativa
gggacaaaatcatatccctaaaattatatatgtataatatttgattcaatttcatatttttttcctcatcttatccaatctatttagtgtgcgtttgggattgcttttaagaaaacacatttaaaaaattttctataatgtatcttaattcaaagttagaaagtattttaattcaaagtttatcttttctctatatatataaataaagctgagaattgagagatgacgtgctgctccaatttttttttttttttttcaatttttattgtacgtttgctaaaaataatggtaagatacaatggtttttcaaaattatatatttcttttgtttgtaaataattttaatttattacctttgaaaaattaatttattagtgaataaatataagttttttttttttttttacaaaaatataaattattttaagcaattagtgaaaatgcagtgtatatgacaattctcctattggagaaattatttaattttatatatgtataatatttgattcaatttcatatttttctcctcatcttatccaatctatttagggtgcgtttgggatggcttttaagaaaacacacttaaaaaattctctataatatatcttaattcaaaattagaaagtattttaattcaaaggttatctctttgtctctatatataaataaagctgagaatt

SEQ ID NO: 88088 - DNA, 1121 bp, Cannabis sativa
tgtaaaaggtgaaatggaagaaaatacggtataaagatgaacaacatggaggcatggcatagtaaggattatgcactaagtaagctacatggaaacacttataacatcttgccaaaatacttgtacatgctactaaaaacaaacttaggtacaataattaacatcgaaaaagtaagaaaatgatagtttcaaatatgcatttattgcattgaatgctgctctaaaaagtttgacaaattaaaagcctgacatgattatcaatgacacattgctaaaggttgtgtatggttgtaagttggttaatacaaatggataagatgcataattaaaaatattctctcttgcatattgtatagttgattctgaaatgataaagcatgggactggttattcataaaatcatacaatcattcaaacttcgagaagatcaatgtctaatctctaactaacatgaaagcataatcaaagcaatcagaaaggtgttccaagaaataactcatggctacagcatctacaacctcttgtcaaacctcaaaacaaaattaaaaaaaaatatcaaagcattacaaagttccattctttgtagtagcaaaagctcacactgaaattgagttcgaatttcatatgagggtgctagagagcttggatatgcgcctaaaactgtatcaacagaaaattggctacgagaaatggtcaatgtctacacaaaaattagccttaatgacatggagataaatgtttaaaatgttccaagaaagatgacatatcaaagttgagtagtctcgagtcatagcaagttgacctgggaggggtccctagccctgcgcaaagattgacttcgagaactctgagatggaagtttagccttcaataactcatttctaactcactatatttaaatattatttgccatgaagacatggagcaacataatccaggcctcgagaggtaaaattacatgaacttgcaccccataagttaacatgggcacttagggcttcacccaatgcccaagttgacatcctcaactagagtttcagttttcataaatgtcttagtgaaaatgggttaaaatttacattggaacatggactaggcatatcaaagatatatttgaggta

SEQ ID NO: 88089 - DNA, 782 bp, Cannabis sativa
acatcatatgccccgcagagttcagttattacaactgccaaaccaagaccaccacccgtggctccttgaacaatttgctcaatgctgcttctgatgacttgtccaatattaatgttgtaccccttcataatggcgtagacatatttgaggagatccatttggacatccgaaaagtgtttactcgacaccaactgagcactcacaaagtacagccatgtctttgccaccgggtttatctcacacctatgtagaatgtttggcgacccgtcttggccatcattgtcgtggaacctcaaccccagaaatcccacggtttcagccacatctaccaaatcaaactgctcttcctcctcaataattcggaggcgttgttcctccctagaataatccgggacagagaacataacattgaatgcatcagcagtagcgggaaccttcttttcttgcaccttcacctccccatttgtgcgctcgggccaattggcgagaaattcacatgccatagtcacattagcccagccccgagcatccacgaaactaccccatctcatcctctcaatttgagcccgaattgcttcgaacctaggttgacgcctcaaggggtttttagggaattcaataccctgatcttcaatataaggcctaattttgagcctcctcatttacaagtcgggttctatcgaaacctgtagctggcgggtttgacgatgaaccttcttcaacgcgccttgttctttttggccccattatcttagaaataattttaatttttttttcttttt

SEQ ID NO: 88090 - DNA, 771 bp, Cannabis sativa
aaaccctattcttaattacatcacacaattgcttcttattccttcaaacaaaagacagcaacccaaggcattttccatgattatccacctttttcacagtcctatccagacaactcaagttttgtctctgcatccaccatcttcccaaaacacattttagatttataaaagttaacaacttgatatgatgctattgagtactttttcaacagcttttggaacctttggcaatcaatcatcctctcattgaagaaaaccatgctatcatttgtaaagaaaaggtgggacacagagaggcctcgtctaccaatcaaatactctttagattaccctcttcctctgcttgttgaatcatactaaaaaaagcttcaacacaaaacaagaagagaaaggtgaaagcaaatccctttatcgtatcccccattgtggcactacctttccttcgatctcacaattaattagaaaggagaatgtcattgatgtaacacatttcataactttcgctacccctttttcctaatatcccagttgcaacataatgttctataaggtaaatttttgagcaatcctctactgttatccaaaagcaaagttgcaaattttgactttgtggtagagaaagttaattaaagacttcaagggtggagcactaaacttctttctcaagcaggacgtgttactcttttgcaaaatgtgatacaatctatcactgtgtatagtgtgcctacttttctcctctttaaaaaattttggtgggttgagaatgaagac

SEQ ID NO: 88091 - DNA, 729 bp, Cannabis sativa
attcatttatttccttccgaactcataatataatacttaatataaaacatagcatacgtgcatcgcacgtaacaatatactagtagttaataaaataacgaattaaatgtaaatatttttttaaaaaaaaacaatactaatttaatagtattagttttaacgtatataaacagaaaaaaaaaaaccattaaaacaataattttcatttaacaattatacttaatatataaccataaaaatatataatatactagagaatttagaatcgtagctctaatttcataaaataattatattatgaataaaatgttggccaaactcatcattaataatttattatagacttcttaagtaacaatataaaattgtataagcatataataaacatgatcttattatcaaatcatattctctacgctaattaagtagctattagcctaataatattgcctaaaatgagttgaacctatatacttgtgtcgttttcaaaatagtatatatagcatgatattcatgtagaatgatgattctaacatattctttacacgtaattaattttaatatatatctactgtaatgtgtaattaattttaatatatatctactgtaatatcatttagggccagtttggcacagttgtgctgtgggaaaaagcagctgtagccaggggcggacccacattgtagcgagggggggcagtcgccctcgagaaaaaaatgtatatgtatt

SEQ ID NO: 88092 - DNA, 1532 bp, Cannabis sativa
ggaatagcctcggacaaagctctccataaaaaaactgaaatcctaggatgaatgcccgcctcccaaatccatttccaaactttctcctctggtgcaaatctgtccagaattgcagtaatgtaggcagcacgcacagaaaattccctgcttgattttgtttccaaaagacttgatccttgtgggggaaaggaattctaggaatatttgtgatacgagttcctaattcctccccaaaaatctgaaaaataatctctgaattccattcatttcccagggaaacatcccccaaagtttgaattgtatagcctttacctctcaaactatccattagtactccaaattctgaatagtctaaccaagggatccatggctggctccagaaattaattgtagatcctgatgcagcaactgacagagagcctttgaggattatagttctagtttccagaatacatttccattgataggaatcattattcttttgcttgacacaccataaactatcactgttgcaatactttcccaataagcaggagacccatggtttgtcctccttagttgcaagactccaagccagctttgataaaagagcttggttcatatcctcacatttcctcaaacccaatcctcctgaactctttggttggcaaattttatcccaagctttaaaggccatgtatctattcttatcaacatttcctaaccaccagaactttctcatcagagaatctaactcacgacatgttgacaaagggatctttgaagtggacatggcatagataggcattgctgaagtcactgattttataagagttaagcgccctgcttgagacaaaagcttcaccttccaaccttccattttcttcatcagattctccttgagccttaaataatcctccctttttcttcttttaaaaataaaagggtttcccaggtgtctttcgtctccactcacttgagctatattcaaagctttcagcatgttttctttcctggtactacaaagatttcttgagaataggacacttgatttgggtttgctacaaatttggcccgaccatctctcatagattgatatacactcaattagagccttagcttcattttcatttgctctagcaaaaagaatcgtgtcatcagcaaacatgagatgtgcaactggaagggcaacatgagcgatctttataccatggaccgtgcctctttcttcagctctccgaatgagttttgataaaacctcctgacaaagtagaaataagaagggtgacatggggtctccttgccttaaacctctctgcaggattatctttttaagagggcttccattcaaaagaactgaataagaaacacttgtgacacacgacatcaagagctttctgctcctctcatcaaaaccattagccttgagtactctgtctagaaatgcccactccatttgtcatacgccttgtgcatgtcgagtttcattgccataagccctccctttcctctcttgcgccgaatcttatgaattaactcctgagtgagtatag

SEQ ID NO: 88093 - DNA, 721 bp, Cannabis sativa
  modified_base (509)..(524): a, c, t, g, unknown or other
agatattttatattttaaattatttaattaattttaataaaatgaccttatttgaaaataagattattttaatcaagaaattttaaatggtaacatgatattttgctaactttcaaattttgctatttttatttaaattaaattaaaaaaaattagataaatgatatttatttatcattttattttaataacatgaaattagaaaagttgtttgcatctttttgaaaaagatatttaggtttgttgaaaacctaatttttcaaatttataggtttaattttgaaatgaattatttaatttaaatttatttttttttcaaaaataataatattttttattttaaattttagaaattatttaattatttgattaatttaaattaaaaataaatcatatatccaacttgttacatgcacgtgtgttttatagattgtttaattattaaacttgtttttataaaacctattattgtttgatctaaattactatggttaacttgttgacagatnnnnnnnnnnnnnnnnaaccaatggttcaattgtcaataggtcaaataaataattggtataaagtaaattttacaatcttctttcatctgtgtataaacctagttacatgataggatccttccagattagtgtgcctgtgtgagtctatatgtttgcattgggcttaaatgcatatagggagcccatttaatttttgtaattaaaatggacta

SEQ ID NO: 88094 - DNA, 558 bp, Cannabis sativa
atggaagctttcaggcgtgctttgatccaagagccgaacttccttacatacgattaaagagcatcttgattggtgttttgtcaacaaccattgggaaaattttttcaatacacctcaagttaatcatcttgacttttttcaatcggaccatcgtgctatcacagctactttcaccatcctttcagccccgatcagtcgaaataaaagaaggagttgatttcggtttgaagaaaatgtggctggctgatcctgaatgcaatgatattattgcagccacttggtcatcttcttcatccaatgattcgatagcagctgttgctaataacttgagatcttgtgctgaaatccttcaagtttggcatgatggaaagtatgaaagcatgaaaaaatacattaaagaatgccaggctaaggtggaaaacttaataatgcctcggctcaaaccagcagccatcttgatgaattgaaacaagctgaaaccattcttgatgagttgctagaacatgaataagtttattggcagcagcgttcccaggtggattggcttgcttgcggaga

SEQ ID NO: 88095 - DNA, 1168 bp, Cannabis sativa
ttagggtttaggctttaggctttacggttttgggtttaggggttagggtctaggatttagtgtttatggtttacagtttagagtgtagggtttagggtttagtgttagaatataggttttgagtttaggggttaggttttaaggtttaaagttttgagtttagggtttaggggttagagtttagtgtttagagtttagggtttaaggggtttagggtttaggggtttacggattagggttttacggtttagggtatagggtttaggggtttagtgtttagggtttaggggtttatggtttaggattaagcattaagggtttggggtttagggttatgggtttagagtttagagtttagggtttagggtttaggattaagcatttagagtttggggtttagggttatgggtttagagtttagggtttatggtttaggattttttagggttaagggtttagtggtttagtatttacggtttagggtgaggggtatagagtttagggttttgggtttaggcttctagattttttgggtttagggtatatggtttagcgatttagtgttaagggtttagggtttaatggtttattgtttacactttagcgtataaggtttaggggtttagtttttagtgtttagggattagggtttatggttttgggtttaggattaagggttttaagatttagatttagggtataggatttaggatttatagtttagggtttaaggtttgggacttagggtttagggttttgcatttatggtttagagtttatggttagggttttgggttttggatatatggtttagggtatagggtttagggtttatggtttagtgtttagggttttacattcaagttttagggtttagggtttagtgtttagggtttagggtttatggcttagtgtgtagggtttacggtttagtgtttaggatatatggtttagcgtatggggttttgggttttgcatatggggtttagtgttatggtataggttatgggtttagggtttaagatttagggttttgaatttatgctttagggtttagggtttatgtttttgggtttaggtttttttgggtttatggtttagggtgtatggtttaagggtttagtttttagagttttggggtttgtagtttagggtttagggtataagg

SEQ ID NO: 88096 - DNA, 532 bp, Cannabis sativa
ttttgatccatttcacccaaagagaatcacttttttgaaatggcccaaatatatttcgcaagaaccgcttgattccacctagctccatccttgaaccctaaaccaccaaagttcttcggaagacaaaccttttcccaactagccacatgaagcttactcctatttccattccaacccctaagaaaacctctgcaaagtttttcaatttcctttgttatactttgagggagaatgaagatactcatccaatagttacggagtccaagtaacacagaatgaataagttgggatcttcctgcaaaggataggtgtctgctcgcccaacagtggagtcttttcttgatcttctttaggatcacattacaatcatccgctttccattttgttggtctcaacggaacccccaagtattttaagggaaatttaccttcagacaggtttatctccatcagaatatcatgcttgaccttactttcaacccctcccaaataaatttgggatttattaatgttgatagcaagacccgtagtag

SEQ ID NO: 88097 - DNA, 1769 bp, Cannabis sativa
  modified_base (1707)..(1708): a, c, t, g, unknown or other
attaattaactactaaacaagtaatggcacaacaatatgcatgtataatattataattccaattgagtgtttgtttataattaacaacgtgattatagtgtaattatttaattagatgtaaatgagatacccctaaaatttaaatatctatcctctctatttttggtagccgtaaaaattgggtgtaattattaaattattatagtttgtaaatagatatttactatatatctaataatattacaacaatatccatataatttgaaatagaatataataattaatatttatgttgtatataatatatatatatataataattgcacaacaacttttaaatacgatcctatagtgttataattgaatatttttattatcaatatcttatttttgtaatatattatataaactaaaacaatataaattcatttattatgaaatgtgtagattaacaagaatttttgtatctttaaaaatagatcttacacagttaatcatataaataagttgattaaggataacattaaaactagattttctttcattttaataagaaatattcttcacctttcattaaaaagaaaaaactcattattaccactgatctaattacattaaatatctggaccaagtattgtgtttatatattaattaattgccattttccaatccctaattaacaaaaaaaaaaaatccaaaaaatgacatatatttattataaataaaaatttattaattaagagtgggagttggtgcctgcaatattctttcctaggtggctatatatatacctataataattagctataagctgctatagaaaaggatgacagcaaagtgtttaagtcccataagaaaaggattttatgtaaatgtatatatgtgtatgaaatttgctggtacacgtgttcaaagagtgtatattttgttaatttatttagactttttgtgtggttttatttttcttttgttctgcttttccccctccagttcccttttgggaggtatttatatatatattatacatatatatcatcatatatatatgtatatatctcacctctttattatatagaatccacctatatatatatgtataaacttcactttttgatcaatataatttatacatactaattaattcagtactgtaattattctttcggaatatatatattatataatatagattcttagagaatattataatatcaccctcacattaaatattattccacagattatttaccatgtagaaaaattaacaatatgtactaataagaatcgatctcttaattatataattaaataataataatatattgataaccttttcttatgtgatttcgttatgcaacatatgagaaaaattaaacaaacaatatctaaatgaagataagaatattaattatggggccaaaatatatatgtgtaccgcaatcatatatatttttttgtgtaaaaatattccattaaagtaaatcaattatttacagaagatttcaaaaatcttaaacatatacaacaatttttaaatcttaaaagtataagcgaaatcgtatgatattggatgttctacattattatcacttgctgtcatttgttaaaatatggcaaaaaatttaattaaaaaaatcttcattatatataagatatgatcggtgtttgtatttttcatatataaatatatatatgggtgactattcnntggttacatttttattgtaaccgtatggttacatttttttttaacctgtaatagcaggtta

SEQ ID NO: 88098 - DNA, 1305 bp, Cannabis sativa
  modified_base (1266)..(1271): a, c, t, g, unknown or other
agctgggatttaaaaccaattaatccctatgatatattcaggatcacaagttgtagggattttagtggatattatagtccttctacctcgtcttctagtgaatatgataaattccttaggcaggaaattatgccccaatctccccttttatttgtctttcaataaatgtttaacactttatcttatctcacataaatgaattttgagggtctcgttcacagaatgggaaagaagaggtcgaccaacccagaggctccatcagacgtcaacacggaaccaccaaaaaggcacaagaagactactgttatcaagaagcgagcctcccagactgctaatcttgaggtccctgaaactgaaactcacgatctgattcttcctccagcccctgcacgtaccgacaagccaacatctaagacgactcaagtttctgcctcctcgagccaggcccccaaaactctgcctatcgaggctgagaaagctggcccagaatacacctctgagtttggagcatcatgttggcgtcatttcaagggtctcctcccccatgaatgggatttaataaataatggggatcttggggagatgctcgtaaagagtgtatcccatagcctctcggtatattcctttgcccttatctagtcattattttttttacacctttcagaatacttatacattttagtttgttgtttcccagatatctttcttttcctttgtcgcccaacggcgaggcctagaaaaaatgaaatatttggaaggcgagatccaaaacctgataggccagctcgacgttataaccaagcaatggaatgatgccaaactggagaacactcgccttactaatgaagtcgagaaggtgaagaggaatctggaggccgagcttgaagctactaagaaagaggtaaaggacaaggacgatgcatgttgaaaactccaaaaggaacttgatgattccaaggtaatgctcgaggggaaggaagctaaaagtactgagcgatgcattgttgttggtcgtcgtaccatctaccaagcctggatggggaatccagagatagatacaagtttcttgggagagtctgaagaggaaatccttgccttctgcgagaagactaaggaggaagaagatgccgaggcagcagaagaagaagaattgtccaagtcttctactaagtaggcttggtttttttttttttttttactttatctaggaaaatggccttaaaggccgagataatggtttgccccttgtggcactttttgtaaagnnnnnntgcaaggttggatggccaacttttcttttatttt

SEQ ID NO: 88099 - DNA, 624 bp, Cannabis sativa
cattgttttcgagaatgtcatggttataattgtcgggacatgtattctcagaaatgattatgcatccgctgagttttgcacaaaattgtctagagcctcccgcaaaacgacatgtatcgtagatatttctagcagtggttgttggacaagaactcgtggttgttggacaagaactcttcgcctcaacttgaatttgtcctaaaacaaggctcactaacagaacactcacaataaccctagttttgccttccatattgatcttctattagtttttttagttcactctattatatatcttcttacaaaatatttattatagagacactttgttattgatgaacttgttgatgaaactactagtatatatagccaacttatatagtagtaagcttcacctactagtacctatcttataccccacatttaaaatgattatttgtaaaagtagatagaaagtatcatcatgaagaagaaacatagatcattttttttggtaagtaacttttcatttctatcaaacataaattaggtacaacataaatatatagttaaaataaggaacttgtactgtaaaaaaataataagccaagaccaacataaatgtaaatcaacaatccattgtga

SEQ ID NO: 88100 - DNA, 930 bp, Cannabis sativa
  modified_base (223)..(227): a, c, t, g, unknown or other
tcaacaaaaaaccaatcaaaactcaaaaaatccaaatacaaaaagggggaaaaaaaaaaggtaatcaacctccattgctgtacaaaaaacgcaaaaacaacctacaatcaaaaactcgctgcgttcagaggagaggaatcgaagagaaatacatcgggaaatcattgaatctcacccataattgaatcagagaaagaattgaaggtaatacaatttcttcatnnnnntcttcctatcttttattctacataattgggaatatgttaaaaatcaaggaaaacaggaaaaaattgaaatgataaggaaatttggtaaatctgaacaaaaaatcaacaacagattgcatcaaaaaaatattaatgatataattagatgctacagggttttaatctgtaaacagttgtttataagttgttttccagtaaaatacttattgtttgggatttgcaaacaagaaatgttgaatttattcttattaactactgtatgcttcaaaatagttgtttaatagttgatttgacagataaaaaatagtcgttcagattgaaatgttatttgcaaatgttgccactgaaaagaattgtttattagtttttttgttagattgaaatagttgtttgcaacttctgaaactgaaacaaatatttaatttacattatttcaggacatggaaccattacaaattttggtacagagcaatgggcattgggatgataacaaaaactatgttgaattgaatcaagtggagatcattaattttcagcaaatgcacttttgatgaactagtgagaataatgatggaaaaactccaatgcaaccatgaaacaacacaaatatagtacaaaaaaattgatgcaaatatataacaaagtttttttttgccaaatatagtacaatttttacatattccattggagatgttcttgcaaa

SEQ ID NO: 88101 - DNA, 574 bp, Cannabis sativa
tatcattgtttttctcaacaaactcatcatacaagcttgttatgctagaacaaaaaagacaatcagttgtggtgactttgattttcggtttggctgagtactttattttattacgaagatagtagaaaataatgtcaatgtgctgcaaataagaaaataaaaaagccttcaatcatataaaaaactaacagaacaacaattaaaaaacatatcaacataaaaataaaattaaataaacaaaggactgtctgtgaataaaaaaaaaaactaacagaacaacacttaaaaaacagaaaacaataaaaataaacaacaaaaacatataaataaaaaaaacttacagaatcggtaaggaaacaattaggatagcaaaggttgtgaaaccacatcttgttgctaatgtcttcaacccaaaacgaaatggcagaaatatcgtgtccttacccttacaatacacattagttgttgtgctaaaaaaaacaaaaaaaaaagaaagacatcaaaacacaaaaaaataaaaaaaaaaataaaacaataaaagatatataagtgaaaacacctaaaaatacttact

SEQ ID NO: 88102 - DNA, 741 bp, Cannabis sativa
atttggtgaccattacgaggtttgttttgaattaaaatcacatttttcttatctaaaatacaatttactaaatttctgagaatgcatttggttaacaaatgattcttttttcttcttagtgaattattaagggtttttgattgaagggtgaagagcaagagaacttaaatgtactttcaaataatgttattgtgaaagctttggtctgcgagaatgcatgtcaaaaaagggaaaatggcttttctttttctatgtatataataatagactaaaaggattacctgctaaggtttttgtgtttttttacaaagcatccttgttgcaaaagaagatgaagaagcgattctcactgcctaaaaaaactaactgaaggaaaggcatagagaaagggagttgaggaaggcatggaggctccgagcttgatggcgcatgaagcaaaatacccttcatggaaacctctctgcaaattctcattcatttcatgatttttagatttcgtagaacacattcaaagaattttctgaatatggctatacgacaaatggtatttacttcttcaatctcattctaatattatacatatgaactatatttttgggaaagttgattataattcatttatttattatatttgtttctcctcactaacagtgaaccatgaggctaagcctcataggctatttttgagcatgagttaacatctatctaagaattaggcgtaagcctcaaacgcctttgaaa

SEQ ID NO: 88103 - DNA, 594 bp, Cannabis sativa
ttttttttaaaaaaaaataatatggctgtaggcacaaaaaaagtgagttaatgtggctcatatgcaaaatataaatggagaaaagagagaacaaaataaataataataatttaaacgttattaaatatgtacggaatgttattaaatatgtatggaagataaaaaaaaaatatcttattaaattaagaaaagtatttttaatattaaaatagaaaaaaaggtatcatatgtaaaaatctctttattaaattagtctttagtcaaaataaaaaaaaattagtcttacaaaatcacaatttcttacacgttttatccggttaattgactttgagaaatttctatgaaagctcaattatacatgtatttgagattttaacattatttaagattatctactaatattttcttacttattttgtaaacaaatcttagtcgtacttaattaaaattttaattggtcgttcttttttctctccctgcaattatttgagtggttattataatattattagaagtaaaattagataacgttccttaattgttacttgttataaaggtaaattgcggtataaatatttaaagttttgaattttt

SEQ ID NO: 88104 - DNA, 654 bp, Cannabis sativa
tgatgaggcgattcggtagaaaggtactttgttcctcagagataaccagagggagggccaatttaaatcgagaaacaagaaccttagtaacaagcttcgagatgacattgcagaggctaattgggcgatactcttgtatatgttgaggcttcttaacctttgggattagtgtaatgagggtcttgtttaaagcagtagggtcggcattgtcattgagaatgcttagaacaactttagtcaccaaatcaccaacggttgtccagtttttctgataaaacatagccgacatgccatcaattcccgggcttttgtcaggacccattgagtgtaacgccgtatatacttcatccggagtaaatggcttaactaaagatgcatttaattcagcactgaccgtggtaggaatgcatgagagagtagagttgagagcttcttcatcaacagatgcggatgagaaaaggtcagagtaaaaggcttgcacaacagctgcaatatctcctttagagtatactttttgacccaaagagttgtgtagaaactttattttgttgtttgattttcgggaggaagctttagcatgaaaaaacttcgtattacggtccccacaagaaagccaatcaacccttgaacgttgttgccaatacacctcttctt

SEQ ID NO: 88105 - DNA, 797 bp, Cannabis sativa
ataatggaggtagtgtgtggagctgagaacttttacaactgaaactacaagaaaacaaacatcttttttaattttctttattactgttggttattatccgtgatggatagaaaagaattgaacgaagcatcttctaatccgtgcctctcttgttttgcagtacataaaatgtgtttatttccagaacacaacttccccgatttaaaggagtggagaaatctggaaatgtagggctatgtataatgaaattctgctttgcttgctcagctgactggtgcggcacacttggctgactcaacaacaaggagagttgtagtagtaagtaaccaatggaagctttggaatgcacaaatcatacttggcttttacaatttacctttttaatcacacacatgtatgtatgtattcatcaactttttcatgtattaccaccactttcttttctttttgaatattatggcttgaaattaaaattttactaacttcttagcacttccattgttccgatgggtaagaacggaatttgtgaattacctgaggagaactggatagtcttatctctgtaaataaataacctttctataatatgggttcttaaaatattatatggcctttgtatctttctatttgttaaatttgttgatatttagttctctaataatgaaagcttgtgtgaatcgtgaaattgtggtattatattgtgtaattacagtaatagtcgaccttttcttcttttatttttatttttccttgcaaaattttaatgagttgatccatcatatgtatgatatattggc

SEQ ID NO: 88106 - DNA, 915 bp, Cannabis sativa
aggggtttatatactgccataaacaacaatgttttgattgagggaaagcctcttgaatccgcacaagaggaaggtcatatttgaccttggttttataactgttggggtgttggtgtaggggcattttcggaatgcattaatttcctacaggtttcaaatacagatggtcactatgagcattcttgaccattttaaatagttgctagccttattttcatcaattttaaagggtcacctatcaataaagatccttcaaaactaacattataatgaataaataaataaataaaagatttccaaatctcatttaccattttagattttgaacctaaagaaacaaactagcacaaagagagttcagatttaaaataagaaaactaaataaacaacaaaatatatacatgtcaagtgtaaataatttccaaatctgattacaataagacttttaataatctccaaatattattatttaatcatttactattgatgctgaaaagttgtcaatactaactcgctagattggcgagagaataatgaacgtaaatatataatttaagacacataaaatttataatagttggtcactcatgtacacgatagtaatagaactacgtctacttcgagttttatttctcacgagataataacagaaagaggctaagtgtttaaattttggtttctagagagagatgttctaaccttgtgtggatagttttctgaatataaaaaatgagctaagggatctctccgtgaagaagattgagaaaaatacaagtttgcaatttttgaatttagtttagtgatggtatacaacggttgtatagctgtgtaagttgggctactgtacagggcctccgaaaaatgaaatgcctaatatatatttttttaataactttttgttataaaataatataa

SEQ ID NO: 88107 - DNA, 893 bp, Cannabis sativa
aaataaagtgctacatggaggagtttttaaagaagggaagattacagcaagatttgccaaagactacctagggaagtatcatgcttctacaacgcaagcccatacaacaccagctgtaacaagtgtttcacctactgctgcacacaccagtaaaaaaccagcaagcagagacactccatggcagccccctcctgcatcaggcttgaagctgaatgttgatgcagccgtcaatgctacctcgaaaaccttgggagtaggtgccattgtacgggatcataaaggccttgttgttgctgccatctcaaagcctgtccaagggtgcttccgttccgatgaaatggaagctaaagctctatttcatagtctcaattgggcaatccaacagcagctacaagtcacacatattgagaccgatgcgctaagagtctttaatgctttaattcatacatctacagatttatcttgtttttcagatttaatcatagatgttcgttgtcttttgtcctttttccctgaagctactatttctcatgcgatgagaaatgctaatcatgctgctcatggtttagcaaagcatgctttagagttggaccaagacatttgttgggtaggagaaatttcctatcctattttcactactgttgtaaatgattgttaatttataataatagtgaaactttctcaaaaaaaaaaaattacactatatcaaaaatatgttcatacaaaaatatttaattcatatacttaacttttttttttcttattttttttgctaaaaaactttttaattttcttttttaccgatggaacaatctgaacccatatgatataaaaatgagagttttttttttttaattagataaaaaatcaagcataaaaactcaaaattttct

SEQ ID NO: 88108 - DNA, 665 bp, Cannabis sativa
  modified_base (355)..(358): a, c, t, g, unknown or other
aaattaataagcttaataagacccacataagacaaaactcaaacttatgcaaaatgaccattttgcccttccaccctaaaaatcataataaccattaaggggtattttgggtaattctgaaatttcgactattccagatatttctaatgtctaactttatcataccgctatactaaaaaaagccaggatgtgaatctaatagccaaacaccgcgttccaatgttgtcgggcacaaagcatgcaaaattatgaaatttctatatgtgacataaaaatacattctgaattcaaataaatcatcaaaaataattaattcaatactagtaaataaatttcataattaagccctaattannnnctaatttccaaatttaaactaagtgatctttgcaatttcaatgaaagacacatgtcaaattgtgaagaatatggattaatgcatgtaatggtaattatatttgaaaatggaataagtcattaaatgcggaagtgacagagtatatttacaacttgctgactataaggacttacatgagataaacatatacaaactgttgcctactccattaatgagaaatgatacggcattggatgcacaaggcgaggcatcaacctcgttatgcatgagtagacataagtgagatataatgactgtgaagacactt

SEQ ID NO: 88109 - DNA, 952 bp, Cannabis sativa
gaatgagtgaagagaaaaaaattttatggtgggtagtgaaggggagttcggcttcggctggagtgaaatgggatgagaagaagagagaggggagggggttaatgtaacgtgggggtaaaattgagttttagaaaaacttatcccattttacaaatgttacatagtattagtttagaatactaatttttgatttattaagcatggaatttcaaatttccttgtggaaaagacttttaataaaatagtaatcgataagtaaataagtaatattttcatacgttttttttttttttttgtcagatgtttaaatgctttaattttttactcatcttaatctatcacattaagaaaataaggaaaaatcttcaaccataaaacaatataaaagttaaaaagaaaatatcataagttcaaaaatattatcactactaaattacaatataattaatttttatatagattattactataatattaataaaaaatttaaataaaatagaaaatgaatcagtaaaaattgaaacaatgagaaaattaataatattaatatttttataaatactatcattatatatcactacaaaaaatcttatttttaatcacaacaaaagttgttactaaaaataaaaaaagttgtgactaatttttattcttattcttatgtatattattagaaaaaaattaagtgtatgatttgtaacctataaaataaaatttatagtgatcattataaaaaaaaaaaatctattaatatatatattcaaataattttaaattatagtaattataataactatcattacctccaaacataaatttatcggatttgtacctaaacttaaaagggccatgatgcaaaatggccctaaatctaacaattaagttaataaatgtccctttttaaaaaaaattaacaaaatgtccttttattaaaaatttgatgataaaatta

SEQ ID NO: 88110 - DNA, 580 bp, Cannabis sativa
tgtgacgtctcgggaaatcggggcgttacaatcctaaaagttgggaatctcaagctgagtcaaaaccattcaaaaatagacactttcgcgaaagaccttcatgcatcacaattgacgacttaaagaacaaattcaaacaattacctatttcaggagatagcacaatgccttcacaatctatggacatataaacgattacttgatgttccataaaattcaacgtaagtatatttataagtctattcatacatgctttcttagtcggtatttattgcaaacatatttgtattgttaatttcaaaaatttcttataacaggggagattgtgcggtgtgtgcaattaagttcattgagttcaacatggctggtcttagctttgaaagcctattagatgatagaatgacattctacagaaggaagatggcagtagatattttttgtcaacaataggacccttagtaatttgtgttcagttatttactaatttttttgttcaatatttacaaatctcgacctatacagttgagctttactttacagacaagcaataacttgaatttcgtttagtgtttacaaatct

SEQ ID NO: 88111 - DNA, 511 bp, Cannabis sativa
tatatatatatatatacacgatatgactacatatatctagaaatgaaataaagtacacagttttggcataatcttttgttaattcgtttgggaaaatcattcatagtagcttttctcatttatatatattcacttataatatccttataataatttgaaaagtataattattgcgtaattaataatatatatatatatatacagatattagtattacctgtccaaaaatgttgagctttcacgacacatcaaataaaaatctaatatatataagattatatatatgtacgtaagatcgatcgattgattatacgatcctataattattatatatataatatttatatatacgatgccaaatatatataatattatacatatatgtacgtacatatataaatatatagattcctcgatatataacacataaatttccaaactttttaaaaagaagaaataaattttcttaacattaattttataaattttatttatatagtttttcacatat

SEQ ID NO: 88112 - DNA, 753 bp, Cannabis sativa
gcaagttagacaagaaattggcgttaacacaaaccaaactagatatgaaaagtatcaataaacaagcataacatataacataagttgttgaacagagctaaatttaatatctcaagctagtactgccttaatcctagaattaactcatcttaagtaaacatacaaacaacacaaacttgagaaaagatctgtcaacattactctgagattgaaaccaaactaactctattatcaccttccaaaagtcatgaatgtaataaagccatcgatcattaaaagccaaagccaggacattgatatcgaattagataaattttcaagggctttttaattcagataaggtatagtcggactagtcaagtcatccaaatttatgtacaagaaccatttaacatgagcactcactaacagctacttaaaaaatgaagcaattgaaattcctaattccatggtttcgagtttcaagttttgggttttaaaatatggaatagtgcagtagctgtaactgtctcaacacccagaaagactcaacaaagattgaagtatcaacaaaaataatcgtaacaataaaaacataaaactaaaaaaaatggaacacgaaacaatttatactcattcagatcaaaagatgatcatacatccactttcaggttgagaagatgatcaaagaaaaaactttagctagtacacgaaagtgaataacatgatgaacatccttccacaagcggaagagcccatcacgcctcaatcttt

SEQ ID NO: 88113 - DNA, 2939 bp, Cannabis sativa
  modified_base (2571)..(2575): a, c, t, g, unknown or other
atatttaaaataataatatttaaataataatattatgtgtatcaatataaatgtgtcatgtgtataagagtgtacacaaaaataatttaaattggtagttaactatgaaaatatatgataccttaaatttattaaaggttttataatttggagaattttacctaaacacaaattctccaaactactaaactattagcaaatttaaagtcatccggttaactgtcacaatggactttatgtgtacactcttgtacacatgatacatttatattggtatacctaatattattatttaaaaattatttcgaaatttattttaaaattaaataaaattctaaaaataaaatatatattataatttttaaataataatattatctgtatcaatataaatgtgccatatgtataagagtgtacacataaataatttaaattagtagttaactataaaaatatatgaaaccttaaatttattaaaagttttataatttagagaattttacctaaacataaaaattaagtgcaagtaagaaaaaaactttaaaaatatttataaataataattaaaaacaatcactatccaatcattctcatagttaaatatatatatatatataatttataaatgtgtttgtgagttactcacactaatatatggtgtattttcctactcacattaattacattacaaaataaaaaatgtgtaaggaatggaagcattattatttttgtttagccaaacacctgaattttaattcaatgttctataataggtaaattgaggtgcacacgtgaaacaagttctcttaaatattccactatcaatcaatatatatacaagtataatctacctgcaatttatcaagagatgcagaataagatataaaataagaagaaatacttgacattaaaaatatagtttatacattatgaaatagaaagtaaatatagtttctcggaagctctggtcggagaagcggcggcctgttgtttggcggtatcagtagctctagatttgaagtataattatgttattgtggagagtgacttgaggctagtaatcaaccctctcaatgggaaggcatcccactgggctctagaaaactatgtctcattttgttctaagtcttctccatctttcatgtgttgtaccttttttaatattagtaggaactgtaattttgcggctcacaatgtcgctaagtgggcttttacctaccaagtttatagatcgatcccgatcaattctgtactggtaaatattttatgtaacgaccaggagatctagacttaactattataatttaatcctgcgcttgtttttcaaaaaaagaaaagcgcaaacatattatgaaacggcaaaagttgaaagaaataaacttaatttgtacttgttgtattaacaattctatgtaagcaagaaacaaaaagttagctagttaagctttgtttcttttgtaagcaaagttctcttgacatgtcaacctttaaatattatgttcagctatataggttttttgcaaaagtctaatattatcttcaaataaaaaggctttttttaggatggtaaaatgtgacatttaagtacaaactctttttacatagacagaggtggaagtgttgtccatagttcctgttatatttagtatttttataaaagtgttttcagtatatttgtatttgactttataatttttcatagatcttaaacatttcagataaattgtatattcttcacttttctcctacagaaatgcaacttagacatgtcgtcattgtctctctgagtagtactaaatatatttgtaattttaaaataagaacagaaatttaaatcaaaagcaaagacagcaaaagaagaaaaaaaaataaagataaatgtgtgaatatagtacctctaatacattattcattagagtgagggttgaaaataagtatgtatacgaaatgacaccttctgcaaaacttttaatgtatacttgcttttataaaaatcctgttacttgcaagttaagacagaacaaaaaataaaactcaaaaaaataatgcagtgacacttggatatacatggagatatattacaaatgagttgtgttgtgagctgtgttgccactgcatgacaataggaaacaagcaacttgcactatttcttacatgtggcacataaacacattatttttcaatcttattttttttgtttgtaagtagatgacaccaaagctaaagttttacacgtggcccattaagatttttctgtttatagtagaagcacgtgaaaaggatacttatatataaatagatatataaaaagtacattttccaaaaaaaaaaaaatgtataaaaagtagaagtatcggttacatcacattctaaaattactttaaaattattctctttctctcattaattctctcaattttaatattttattaaaacataaataaattgatattttattattattttaataatttttctataaaaaaaaaaacataaatttataaattgatattttactattaaataatttttttataaaaaaaaaaaatataaatctacaaattgatattnnnnnattattttaataatttttctataaatatataaaatatttaaaaaaaagttagaacataaaaaataaattctaaaaaaatattaaaacttaaatcaaatataattaatcgtaaatttcgtttatatacatacataaaatatcaatcaatatatatactttaacatttttggcgttttaaaaaaaataagatataataataatcatcaataaatcaatcaatcaatcaatttataaagaagaaatatgagccagtgacatatcattctaaaatcactcaaaaattatttttctcttctctcaattttaataatttattaaagcataaatctacaaattgatcttttattattattttaataatttt

SEQ ID NO: 88114 - DNA, 507 bp, Cannabis sativa
tttattcattattactttattatgtatatataatattaattcattattatagaaaatgttgtttggatgattattttgtgactggacagatattgttctgttaaggcaattgaggttaataccttacaagatgctcaaaagttgaatgcttattggattgtcctctctttgattttgcttcttgagcatgctttaggaaccctcctccaaaggtaattatatatttatattatttagtttttgcaatgttagtgctatgagactaggagacttacacaattttttttaaaaaaaaatacagtatttttgaaaaaaaatttcgctccactaacataaaaaaataaaaatgttaaacatttcaatctctagtgtaaaaacccttaaaattttaaggccttcatatatacttaaataacaaaaaatttgtggctttttcattcaggttaccattttggacatacattaggttagtggttgtttgttggctagtgatacctcactttgatg

SEQ ID NO: 88115 - DNA, 873 bp, Cannabis sativa
atttatatgctggagatgtaacgcagccaataaaacttgccaagtttctctaggtgcatcacttacttgaatatcaacaagtttcctttgtgttttgtaatattcttctaatgtcttgctctacagaaaagaaaacagcaaataagacaatcaaaggaaacaccatttgaaaacagcatatgtatgtatatatatatacttgttttgcatagttaatgaacttctctttccagagtatttcagaatcagtagaagtggagacttattgtctattttgagggtacaagtttagatttttataattggcattgttgctctttctcatgtatttttgacattttcttaaattattctctccaactgctctttgctcttgaaattcacaactaattcaaaatccgcaatttgatcaagaatctcctatgggaaattaaaaggaattcaatttacaaatcagtgtttgcagtaaaaattaatagaggcaaacaattaaacattatatacaaacataaacaagataattataaagtcccgaaatcttggaacttgcagcttgaatccggaaatgctgatgatcccttggccattgttcgtccaatgcttgtctacactggtctgattgagcagctgcagcgtttctttaaggttaaaaaatcgacaaatgtggtatcagccaaatagaaggacttcagtagtaacagagagtgacgatgaaagtggaagcttcagccagacttatcgtatgaggaaaaacaggtgcaggtacttgatcgaagagagaaggccttgagaaacaagacgattgcactggtaaaagtattatggagaaacaataaagtggaagaggcaacctgagaactagagacggatatg

SEQ ID NO: 88116 - DNA, 562 bp, Cannabis sativa
gatgataatatatgtttcacaaatgtggaaaataatatcctaaccaatagagatggaatcaccaatattatcaatttgatccaaattatgacttttcttcatagtaatcacaaatgtcataaatatctcatcttaataattacatgagagcatttaataagttaatagtattttcttttcttcttcattttaattatttaattaatatgttgttaagttaaatttttagctgtcgtattaatattagtataattaagtattaaattttataagaacagtgttaattataaaagatcgtataattattcaccaaatcacatctcataatgatattagacagtgacgaacctaatatatagagctagagtgacatatttcgtatatatttttatatttacattttatttgtatttttttaatttatatttttttcacattaattttctatgtcttttttgcctctgctgaacaaaatttctacgtctgctcttaatgttagacactatactactactgtttacgtgaaaagttacttttgaaaggtgagatccatcttacaaaa

SEQ ID NO: 88117 - DNA, 730 bp, Cannabis sativa
tcttttgacaaacttgataacacgcagtattactcttaagacttgaagtcatcccaatccgctatctcccatcggcatatgctctctgaaccatacggcttaaagtgtcccatacaacaccagtgtccccataaacacaaaacatgcccataacatgccgcaaactagctcagtcttgatctcagcctacgcccttgcatattgtctatctgcagcttacatcaatcttgcaagtcttcgcactgaaccaccaatctgttgtagtgtttccctctggattcacacaccaaaactgaacaagtaccctgattcctcaaacatatgaattagtgggctcccccacttcaacttgggaagaacttctctcttttagaggaatacccctcaaggtacagctcgcaagctaacagcatactcgcatacggttcttccattccaaatttcacttttgatgaagatgctgaactaatgcctcggtcattctgactcttcgtccctcgacatttcaatgttgccttagtcccttcgtcttgctgactttcaccttaggccaacattgccatggtgttatcttagtacctgagtcctgcagactttcaccctagataactagcactgcctgtgtcccgagtcttcttgactttacatcctgaacaatgatcactctccatgatactcatcttgatgcttgtaatgaataactagtctgttgagtgaaccgtgaaggtct

SEQ ID NO: 88118 - DNA, 1306 bp, Cannabis sativa
gagaatgtggtacttgatatgagctttttttattatatattttgttttttaataccttcattttcttattatttagagtttttataattacataaaaataaaagttcgtaacaaaaaaaaaattatttgtattctttgtttaactcttttcatttatgtttatattaagatttccttgttaaatattaaaattatttgtattccttcattaaaaaaatattatttatatttattctatatttagttattaaaactattcatattctttcattaaataataaaaaaaaactatttatattctttgcattactcttattggtttatgtctatatataatgtcctatactcaagttgaagttttgtatccactcgctagttgtaagaaattaggtgacataacacatttatataaacttttcaattataaatgacaaaccaaacaaatgaatggattcactttaggaaaagtcattccaattctaccaacattccaatcagctaaacactatactagttagttaattaaaataacttttacagcttatacaacttaataatatgaaccaacctaaaacaagaattttagtaatatataaattaataattttaagacaatagaggaaattcattagtttgttttgttattattaattaatatgtttagaaaagtgattatttttttttttaatatcttaattaaaaaaatatgtaaaaatgtgatattttagttatgagatgctaaaaggcaatccttcttggtatcaccattagtgtaattaagtagcagatctcatataacttaaaaaaatatgatttaggaaatatagctaaccaatcgtagggtgccacctaggaaataagtagcaatgctcttttttttttgatgaagttgggggtgttagcacaccccaggaatatattaaacggaaaaagataatacagagttcaaaaccataaaaaaacaacaaggcctaagaggccataaagcaaattgaaaaacagacagtggcaaaacattaaactaactaactgaagaaaattagaaaaggaaaaacagacagcttgacatgctgccgttggtaccccagtaaattaacttgcatgtttcttccattcgacgtagtcattcagcactgatttatccagttctgtgcttcgaatgagcccagtgacccgaaactgtctcgcccatttggcaatgttatgagccatgaagttgcacttccgtgatacatgcccaatctcccagttcttaaaattcctgcagaacttgtggaatcgtcttctgaggtgaactaagttgaag

SEQ ID NO: 88119 - DNA, 543 bp, Cannabis sativa
taccaaaacacccactaccaacattgattttttcttccctgattcaatcacaccagcagatatctctctgcaacatgaacccacaacaacagacccccctctgcacaatgaatcaccacaaccagcagacccttttatgtcacctcatcatcctctatcacctgatcctctatcaacatctccaaattcccctatgaccactaataaaaacacaacagttcccctcccaaccaccaaatcgggcagaaacatcaccaagcctctttatcttcaagactatatctgtgataaggttgctgcctccactaactaccctattgccaattatatttcttatcatagattctccaataaattcacaacagctatcttagctactgctactcttacagaaccgaaatcctacaaagaagcttctcaattcattgcttggctaaaagccatggatactgaaaccgaagctttagaaaggaaccacacatggattgtaacatccttacctcccaatcaacatgtaattgggaacaaatgggtgtacaaaat

SEQ ID NO: 88120 - DNA, 621 bp, Cannabis sativa
tcaagggcatgggattggatcttggtgaggattacatggtgtggtttgtgatggaaaccattccctctgagtttgattcgatcagatcaagctataatgctcgaaaggaacaatggaccgttgaggagatgaatgccattcttgctaatgaagaggagagtgtgtgtggtgatgagaataagggttttgctttcataggctcctcttctaccgtatcaatctcaaacccaatctcaactcctgcaaattcaccggctccgtctccgtcgacctcactgttctctccaaaacaagattcatcgttctaaatgctgctaatctatctgtcaaaaccgcctccgtatctttcatctccaaagatttggtactactttttcttttataatgatcctatggattgtgtgatgttagtttaaagtgattcttagtagttacgatcgttatgtaagttcataatatttgatcggatctttgagagagtgaaatgagttcttcttttgtataaattgattactgtgtttttgaactttttttaatggatgattagagtttggagagaggaaatttcagatcatttggagtataattgttgatttttagcgatccttatggattgtgtga

SEQ ID NO: 88121 - DNA, 513 bp, Cannabis sativa
aaaaaaaaaaaaaagagaatataagaaaagaagaaagaaggtaagtagtaaattaaaatatgaaattaagataaataagttagaatatatagagatttatgatataatttttttttttttcaatttgaagttgtgatgatattttttaaatacaattttaaaaagaaataataaaatagtaagaaaatagaacaataggtgtatgatatttttttaatatcactttttttttttaaaaaaaaaaaaccaagtgtaaatatcactttttaaaaaaaaaaaaaaaaaactaacactacgtgtatgatatccctttttaatatggttaattgttcacaatattttatataataattaatattaaaaaagtaataaaaaagtagaaaaatttttaaaaaaaaataaacacttaataaaaaataaaaaaaataaagaaaaaagaataagtaatttaaagtatttttagactgtcacgtcaccgtctcatacttctctatctattctatataaagtgtg

SEQ ID NO: 88122 - DNA, 800 bp, Cannabis sativa
tctatcatcgacactagccatacctgaagcatattccctccctcatcgcttctatcaattccctcaatcccctctctcgtctcttcaacttccaatttgagccaagaaagcgcatacacacatgcagattcgtcaatggtataggtaagcatctcctctatcaaattccttcttttatattttttttgggttttgtacatttgttttgattttctttttgttgatatgtttcatcgagaaaaattggtttcttcaggtccatttagccaatgggttcttctaactttgggaggagaagaaagtttcttaccggagcacctcgtcaatctcaatgaaaaaccccaatggtatatcaaaacttcatagttacaaaatacgagggggaaagtaattttgggttatagaaaatgagaatttttgagacatgggtttttatttttctctgatgatttgtaggtttttgcaagtgaaccccaaaagggaaggtggtgatgtttgatggcaaatgggtatcttattgtgatgttatagttggtattcttaaggaaaaatactctcaattttctttcactgctaaatatatatcatatataaatcgtttgcatttgatatttgtgtttgtcttgtgaatgtgtaactgacttatattaaaatggaatcagggtccaaagcatcagagaagataaagaaaacatagatcactatctaatagtttggactttgggtagtgattgtattaattattttttatgtttttgtctcattttgaattttattagcttgtatgcttgaaatctaaa

SEQ ID NO: 88123 - DNA, 788 bp, Cannabis sativa
tagggcataaaacctaacatttcttagacgaaataaagcaacatcataagtagatgattacaatcattcatgtccaatggtgtatgatttcaacaattttctaataaaaaagctatagagaaaatctaaagaaaaaattcaattaaataagaatttaatgatgtcctgagagtcaaggttactcttattttataaactttttcattgtttcagtattgtaaacaccaatcctagttgtcacctttagggatgatttaacaagattttttattgataaaatacttatcttacgagatttaacactattaatttgtctaatggatgactatccaaattactaagttagatcaacaatgaaaatttgaaattgatactgcataatcaataataaaaataaaagcaatgttcaatataaattctattaaccctaaaaattagcatatttgatgggtttacgtactcggtatgtatttcgtaatgccgccatcgatactcgtaattcctaggggcactcatgcaatttgatgtgatgtttggtcccatagcgatccattgacgagagcaagggcataataaggaaaggttatacatgtgtggatgagtgctacgtgcattggtgtgtgaggcagtgtcaatgtgagtagggggctgacatgcgagccatgggtatgtgtgtaggttttgtgcgagtgcataggggcttccatgagagcccatggggggctcgcatgcgagttgcgtatttgtggggaaggggcatgcgagtgtgtgtgtgtacatgggggctc

SEQ ID NO: 88124 - DNA, 681 bp, Cannabis sativa
caattgcagcctactccccttacgattacccatttaccctgtttatttaaggcctgatatactgtcattagtacataattggcttcattaatttcttctaacataataagtttacatgaccaaatacgattggcttccgagatagagaaatatattcttctagttaatgcatagttgcatactccggttatatttgcgtcagatctaaatgtaaaaggtagatacaatgacgacacatgtatttcgcgagcacatgctaataacgcatgtattagttaattcatatatataaatatattcattttcttagctgattcttaagagaaccaaaaacaattatatagatgattataaatcgtgatctaattaaaggttcattctctgaattgatttctaatttttattactccccacacttaacttgacaaaattctcttagcttttttatgtactaaataaaaagtaaaagaaccaacaaatgctatatctgcaaagccataaacaatagtagtggtgatataatgaaaatagacgtaacagaacccagcagctagtcattagcgtttaggcagcttttcttattttggtcatgaaaatcatataattactcgacataaaaagcgcaagctctttcagtttctgtcacatttagatccttcaggatataatatcttatatatt

SEQ ID NO: 88125 - DNA, 620 bp, Cannabis sativa
cttttaattgttctaaatatataagtcttcttacacatttctattaaaaaaaattcttttcatgtctcttgaaactcttacacttcaattaatatttttctaaatatagtgtaaatcgtttttttgactaaggttcttataaggttctaattttttctgttctatttatatattatttatttgatagctagttgtattctatgactagtttttcaccaacttactttagagatttgttatttatatattctattaacattagcaataaatcaacatttatagtggaaagaattttattgtgactattatatattattataattttatgaatcatcatttctatatgcattgtacaagattttgttgttatccaaataataatttgtctttataatagggtgtgatgtagttttttttttaataaactttaaacagataacaactttttttttttttaattttttttttattttccaataataaataactactaaaaaaacgtgtgtacgtaggtatgctataaaaaattattatttttagtgacaattttttagtcgtaacataattttttttaactaaatatgacttttagtcctatcaaaatgttacttgtgactaaa

SEQ ID NO: 88126 - DNA, 905 bp, Cannabis sativa
  modified_base (150)..(157): a, c, t, g, unknown or other
  modified_base (638)..(651): a, c, t, g, unknown or other
  modified_base (704)..(720): a, c, t, g, unknown or other
agaacagcctgcgtaaccaagagccattctggtcagatcgtgatcaagtaaaaacttactaatagccacttatttggaaattaaaaccatgtgcctattctactatcaggctactcacatgcttgctaacaggcttttcttaaatcatannnnnnnnataaactactaaagcaataaaagcttactgaactgttaaacgagctgatcgttgatgatgattgtacatgtcgtgacgatcttcggaagacaacctggaagctctgataccaaattgtaacaccctaactaatttaggcttgttagtgtgatttttttaatgtattgtggagctcgtttctaatcaatgagattaacaaaaaacgtgattaattaaaattttacttaattcattaaaacataaaatatcagacataaaaaaattcgggatcccgtttacaaaaatatttacaaaagtttaactattcatattcaaaagtttgtcccctagcgactatacagtaaaagccctgatatcccaaagatcgtacgctccaggcctaaccgccctcgacatgtacaatcttcatctactcgccctcacggttgtttagccttagccttgcccttacctacacatgaaaatagcactgtgagtcaannnnnnnnnnnnnnaaagcataacataaaacataacaatatttcgggttataatcaggcgcccatannnnnnnnnnnnnnnnnatccccgtgtcccacacggtattgagtgtagaacgttcatacgacaatactatcaaccataatgtcagcctatactcatcatgccggtcatactctagccatattgatgtgacaacatcgatcagtatttcagctaacatacatttatcagtaatcaatataactctacgtatattattactgct

SEQ ID NO: 88127 - DNA, 507 bp, Cannabis sativa
  modified_base (26)..(42): a, c, t, g, unknown or other
gaattcagttatatagacacactttnnnnnnnnnnnnnnnnnatatatatatatatatattcactcctagtccaagtccagtccaacaactacagaaacgctattataaatggtggaatgattgcctttgtcatcgaaaaaataataattcacaaaacactaaaaaaaaacgaaaaagataaataatgaatttgtttatatcgagaattactattagatcttcttgacattgttgagagagaacaagaacaaaccagaaagaaagaaagaaaagagaaagaaaaggcagagagaaaagatggtgaaagagatgattaaagagaatgaattccttcattgattactaagccattgttcatgacttatatagaagcttacaatcagatcaagaacaacagaagctaactgaatctgttacaagatgattaaccgaatacagctgtaaaataacagataactaactaataaccgattctaactaactcaagctaacaggatactctaaca

SEQ ID NO: 88128 - DNA, 700 bp, Cannabis sativa
ttattttgaaaatcattataaatagtgcataatttttggatcaattggttatgatatggataagaaaccaatgaattatttttcataaaatgattttaaaagaaatttttgataaatatatatttttttttaaataaactaaaatgttatctctaattctggttagtgaaaatagatatacttttcagttataaaaataatcatcttaaaatgtagattgcaatgatacaattcttcatgccaaataattagtagcgtagccattttttttaaatataaaaataggaggaaaaagaaaatcttttaaaattaaataatatttattacatttgtaaagttaaaccaaaaaaatgagtgaataacgaggaggaaagagaaaatcctttaaaattaaatagtatttcacatatataagaaaaaaaaaaaaaaaaagcaagacgaagtgttaggcgcatggagtatgtggagtactgcagagtgacattacctgaaccaaaaaaatatgattaaaattaaaatggtataaatataattgtagtttcgataattttaaaagttacggtacatatgtaaattagatgtattttaagggtgtggatgtaaattttccttaaataaatcctacttccaattatccagctaaccttgttgcaggagtatgtggttttaacttgtgtgtaagtttttaaaaacctattat

SEQ ID NO: 88129 - DNA, 661 bp, Cannabis sativa
aattaaaagatgagaccggttcttcggttcagtgggggtcgggtctgtctcaggttatggtagactactacactaatatttttcattctatggggtcgaattgtgctgaggttcttgatgttatacaatcatccataatatatgaggataatgttactcttttacaacatgttttggaggaggaggtaaggcatgttgtcttccaaatgcaccaagacaagtcacctgggcctgatggattgacacctactttctatcagaagtgttggcatattgtgggtaaggatgttgttaagatggttcaggacttcttccgatctaagttcatgcctcggggtctaaatgctactaatcgtgttctcattctgaagaagtctccttctgttatgggcaatctgaggcctatcgctctttgcaatgtatcatataaaatcattttgaaagtcatggctaatcggctcaaaagcttattatcgaaggtcatctgggagtttcagagtgtgtttattcctggcaggctcattactgacaatgttcttatttcgtttgagatattacattatcttagacgtaagcaacaggggaagaatgattgtatggcactaaaacttgatatgtgtaatgaccgctctagtaatgtggattagaaaaggcaattagc

SEQ ID NO: 88130 - DNA, 563 bp, Cannabis sativa
atagtgtatatatgatttattaattccgcactttattcataatcatgtatgtttcagtttatatatataaatgtctaacatatattgctttatatacatataaattaattttctaaatctattttgtacaagttagttcctgggtatatattattattcactatatgcatatattgctctatatatatttaagttattagttcttggatataaattattactcattgtatgcatatattacttcatatttatattagttcctagatatagattattattcattttatgcatatattactctatatatatacaagttagtttctaaaaatttaaatttaccaaataaatgcattatattaaatttacattttggatcctacacaaaatttataattttactaaagtttcccattcattaaatgacataaaactttgagctaatacattctcacaccacaatcgactataccaggttaattttagtgtgagtactatttgtacaatttatatacattttagcatttattttaagggctatttacaaaaatatgggaaaataaaga

SEQ ID NO: 88131 - DNA, 764 bp, Cannabis sativa
aagacatcctatccaattgccactactaacctgactaatcttgattaacaacctttgctacccagatcaaatccaccagtagcacctcgaacagaaggtcctatcaacacagagcaatctctacgaagcagaactaggactatttcccattattatgcgggggaaacaggcccaagaaattgcaaaccaactatttgtgagcctcatgtcgacctaggagaggacatcaaactagtcatgctcagagaattcgttggctaggtcgaccaaatagaataacaacacattgtttgttgcagtgcttccaccaacagagacataaattcctaaggtggatggatcacagcgcggagatttaccgcagcgcggagttcctcctaatcatgatgtagggtattggtatgaccttgcatgagtccaagaggagcgcggaggtcttggatctcagtatcatctccaatggtcgttcgaacgttggtagtaggtgggacgactgtgttatgaatgccctggctgggtgctgaacttgtattcccagtctcttgcacaccaggcgtgatttcatctacaggagtcgtcacaccatgacctacattcgacggctattcaagattaacagctggcggaacccttgcgtttcctcggttctgcaatccaggatccactgcttgtggattagttggatcaaccaggtgttacgaattttatgattactacgcaagtatacgcaatcaagtagtctctcacgcaagtgaggtcgaacc

SEQ ID NO: 88132 - DNA, 506 bp, Cannabis sativa
gagaaattgaattaaaaaaccaaggttttaattacaaggttgttgcaatgtttccactgttgaaattttgtggtcgaagtctttaaagggttgtttgatattctttgttttgatactttaagagccatgataatggcatgactccatgtcctgtagttttcttcatttattgattgtgtgacaaacaagtacaagcccaagttaatcagaataatggagataaatgggatcattaggatcatcaaacttattagcttcagattttgatgaattttggatttcattttttcctgccatgtgtatcagcatgaagaagatttcttgtatgtggaaaatatagaatttaggattgtgaattgttagttagttacctatcgtacacgtttcaagacagtaggccctagttcggtatgttaggtaagttagttgataactaactcctagctattcctaagacatgtatataaatgtctaactagtgataattcattgttgaaacattcata

SEQ ID NO: 88133 - DNA, 728 bp, Cannabis sativa
tttacattagacagtacggctgtcttttagcatttttgtaacaagaggtgttatttgttacttataccaatatgatacattatacatagtaagagtagtagtactagacattatagatgtccttcgagtttttgttacaatagaacatttttacagctccctttatattttcaacatttaataattttagttttattttctattagttatttaagacactgttactaaatattaaaatagttttaaatacttaaatgtagatttcagacccacaaacttaacacattagacaagtccacttttaattaataataaacatgattaatcaaaattaattgttatataagtgtgactggagtggatatcattcaatccaatatttaattgaacctatccaatttaatccaattacaaaaaaaatagataggaattagattagatgttaaaaattggattctaattggattggatcaattatttaattaaaaactgatctaatccaattacatttatatatgttttaaaaaattatttatataataaaaatataaaaaaaaatataatatatatgttaattataattttattagatttgtgtgtgttgaatttgtaatactgggttgttttatataattattttcatgatgttttattttatttttttacttaaaatattgttcttttaattatttaaaatttttgcctatgaagtataaacttaaataaaa

SEQ ID NO: 88134 - DNA, 687 bp, Cannabis sativa
gtttctaggttggtccactgtccccctgagctgcagtctcaagtgtgcggacctcgtcttcacaaatcatgagattgtcttggtcgaggccagtatattcagtaatgaagtctactagtgcttgtcctttgattgttgtttgaggatggtaggtgatctcaaactgacctagtttagttgcccacttgagtaggtgccctgattcttctggcatcatcaaaacttacctatgtggttggtcaattagtaccataattgtgagagcttagaagtatgaccttagctttctagaggccaggacaaagtagtaggctacattctcaatgggaggataccttgactccactctgatgagacacttcctgatgtagtacataggatcttgtaccccttcttattcatgcaccagagcatcactggctgcatgcttggtgattgccaaataaatttatagttcttcaccatctattggcttgctcacattgatcagtccattcaaaccccttgttgcttcttttaagtaattaaagaagggaacacacttgtcggttgacttagagatgaatctaatgagtgcaataattcatcctgttatgctttacatgtcttttatctgcgacagtgacttcatgtcttgtaaggcctttatcttctcaggattttcttcaatacctcttgatttgataa

SEQ ID NO: 88135 - DNA, 503 bp, Cannabis sativa
tgaaaagattgttggggatttgatgcgtcttcaacctaacttctcagagtcaagaattgcttgaagtttgttgaacgtccactctatttttcacctctaatcttgaaagtgaaaccattactgagttgtagtgcaattttagccttcctatatggaagccaaactatcattttctactgtgcgtgaaagatcgttgggggttcgatacgtcttaaaccttccttctcagagagaagaattgcttgaagttttttgaacgcgcactatcattttcacatcttatctttatagtgaaaccatttcttgaattgtagtgcaacttcagccttcctgcacggaagctaaattctgccacacaattcaacatggtaatcataggcacgtgtgtttctaccgtgcatgaatgaccgctaggggtttgatacgtcttcaaccttctttctcggagggaagcattgctcgaagtctgttgaacacccactagggttttcacctcaaatatt

SEQ ID NO: 88136 - DNA, 798 bp, Cannabis sativa
tgacttctttcctttgcctttgagtcttttacccacgcctctttgatagtcagatctttcgccaagaactgtttccagaacgtcgtactgataaccagcatcaaattcattaccatatgtgtcgctctgagattgtcgtttaagtcgtttcatatcaagctcatttacctgttcctcctatttaaataaaaattattagaatatataattaatataaaatttaaattttaataataaaatattttattcacttacataatcttttgcagcggcttcattaacgaaattgccagatggctgtttcgtatgaaccaccttccatgcatcaactgcatgctctccaggagggccccccctatatgaacataaacaaataaattaatttataatacattttaagaaaaatcatattttacaattaaaggattaatacttaccattccgtatcgtatcgaagccaacgatcttgtcccttgcattgttggatatttcatctgttgcctattcgctttgtttttacttgagcggtttaactttttttttttaatttttcattattctcacaaaaaatatattacacttcaaaaatatacacagataaaagatgtatatatacacagaacagagcatctcatcaacaaaaaaaaaaaaaaaaaccccaaaaattaagaacctaaaccctaaatcatttacagtgatcttgaaacaaacaaagacaattttcatagaataaatgttaaaaactatggagattggagatgactttgttggaacttattttaccaggattttagatct

SEQ ID NO: 88137 - DNA, 1009 bp, Cannabis sativa
  modified_base (298)..(308): a, c, t, g, unknown or other
aacctcaccaagtcttagttcgtcatgttgattggttctcctttcattgaaaacaaaataagttttttgattgttaaaaaatatagagatcgatggaagaaaataagtaagatacaaaaaaatatataatcaagacaattacgattctattaaaaatgttataaggactgaaagattaagtaaagtattacaactctaagcacaaaaatacacttaaaagagagagtataagattagagttacaactcaaaactctaaaatatatataaatataaaattaagggtaaatactattttnnnnnnnnnnntttgcaaaagttactaattgaaccatctattttgttaaatgataaaatgaaccctgtatttttcaaaatggtgaaaataggaccctgtgcttaatttttgacaatttttttttaatataaccaacttgaagacaattcctaaaacgaacagaaacataaaatgtaaacagttttgtcataacacctttagatcgaattattattaaattttatttcgacaaaaaatcaatttagggtcctatttgtaccattttagaaaatacaaggtccattttgtcatttaacaaaacagatgatctaattggtaacttttacaatacacaagatctaatggtatttatcctaaaaataatacaagattatatatataaaagagtatatatatatgtatatatgatatatatataaatatatataatatagaaatttatatgtataatataatagttatccatgagagtatatcgtaacatatatagtatatataatattatataggatataataatatattatataaagtatatatatattatataaaagagatgaagagtagaatatagtaatagaaaatagattgagagaggaaaaagaatccaaagtgattgaaggaagatcacaaaaaagtttgaacaaagtttcaacagctttgtctaaaaagcttattttcttatctactaacacttaggtggcgtttggtt

SEQ ID NO: 88138 - DNA, 839 bp, Cannabis sativa
cctttaaaagagccttgatttccatttaacataagagagtacgaagctgcatgaagacagctctgaatccacttaataaacttggaaggaaaacaaagaccttttaaaagatcagcaacaaataaccaatccacagtgttgtaagctttgcttatatcaatcttcataatgcatcttgaagataaattcttaagtgtaccctttcagcaagtcctgcaagattagaatgttatgagctaactgctatgtttaacaaaagctttttggttctcatgtatgagcttaggaagcacttcagaaagtcaagaacaaatcatcttagagatgcatttgtatataatgttgcagcaggcaataggtctgtagtcactagcattttggggattctcagtttgggggtaagagagatggttgtagtctcaattaattgatttatttaatcaattaggattctaaataaagagtgtgtcttatttataaattttaccaaggaatgacacaattgagaaaaaaaaataattcaagatttatttattaactaaaagaccttggaaaatctaattaataaatatatttaaatggtaattttatttgataattaattataattattaaatagatagaattagtgtttaacttttaaaccgtatggggaaatgatttatacccatattagaaatataagagtagtatgataaaatgaaaaacaaaatggaaactcaaatggtaaattcacattaaagtatttggatcacacatgcacaagctaattttgtgtgtacaaaaacacttgtaccaaagcccaagtggccaactaaactaactaactagacacaaca

SEQ ID NO: 88139 - DNA, 614 bp, Cannabis sativa
agaaatatgcagcacaaggtggatccgaattcttcttcattgtcaacatacaggtaatatcatgttccttttgtgtttgtagtttgaagattttcttccattatagtgatgctcacaatttatttcgtttccattaggtcccgggctcgacaacttatagcctagcgctttactatatgatgaatactccgttagaagattcaccgttgctagagagttttgtcaagggggatgatgcatatagaaattcgaggtttaagctcataccgtatatatcgaaggttggtacatctaatgcttattgtggtcaatcgagttcgagattcaagtgaaaattctgagtttgatgaaattatcatgcttgtgagctgcctgtgattttgtgttcccatttcttgttaaatatacaaacaagatgagttaagattttatttttgaaaaagaaattaacaatatttggacctctctatctcacatacatgcacacacatagagatattgataagcctaaaacttatgatgtatatcacaaaatgattaaatgatatatttagtctcttcttatgtacataggttgagttttcttaagcgttttaattctattagaccaatta

SEQ ID NO: 88140 - DNA, 541 bp, Cannabis sativa
cactaatatttaataaaaattcacatacatataaacggaaaaattctaatagaggttttattttaccctagctatacatagaaaaattataatctatatatatatatggaaaaattcatgttttctttttttctctgagaaatgctaaaaaacattagtgatacttatcatccttttagatgttatgtcgctattggtgtaattaagtatcagtctcatataatttaatctaatgacttttatggagtatcgctaaccaatcgcaagacataatttataagtagtgttaggcatcactaatacccaataccaatactctttttccatatacatgcaaaatatattattaaaaatttgatttcaacatcttaacttatttttaaaaaataaataaataaaaaaaaatgagaaattagtgtatatctactataacaacaatgtgtttcgtaatatggtacgtaatactaagcactgacctgacttggtattctagagttatagaacactgaagatttcggtggttcaaaggtataattcggtg

SEQ ID NO: 88141 - DNA, 547 bp, Cannabis sativa
aatttttgacccgtatatatgtttatattcacacgcacctcgtacaacctcacatatacataaataaatatatatttatatatatatatatattaacatttttatacatgaataaaaaaatatattgccttttcaggttttaaatgcttgtgttaagaggacacaatgggagggagcattttgggttttgcagcaattaaaggaaaaaagtgtacaacctaccgctacaacttatggactcgtaatggaggttatagttacctcgagtttcttctttctgtcttgtctgtttttttttttagttcataaccagttccaataattagtagtaggttccttaagtaacttatatgaacacaatttttattcggtacatggtgcttttgtctactttgttggtgcttatcatacaagtttctgtcttggtttcatcgacatgataagcgtataaccaagctttcattcttttttttcgctgttaactctgacattcattcataatttggtgtaatttccatcaaaggggaaaggtttatcttttgaactt

SEQ ID NO: 88142 - DNA, 1052 bp, Cannabis sativa
caattgcctaagtatgctagagaatcattcatctatatatatatacatgcacattaccacaaaactcattcataaagttcccacattctttattaacaaaatcatttgtgctctaaaatgaaaacttgagaagaaaggtctacctaacatgggatttgaggtcactttctaatgttgaagaaccaattatgaagactacaaacattgtaattggagatgattcaaagaagagttatgtgtaactttgtctcaagattatattgcaagattaaaagaagaagaagaagaatgatatattcattgatctaagttcacaaaattgtaaataacagaactaagcaagaattgcagaaagcaagaatgatatattcattcaaggaaatgcaatagcattcatttgtaccattctttgaaacatttttgttttggtccataaggccaaatatttacattgcgttggtgttgttcgtcattcaatttctctgtactcataatttgggcattcaaatgagaaataaaatggatgaatggaaaagaatagatctaagagaaatgctaaggaacccaatgatttggtatagaaggataaatcaagatgagctagttcatcatacaccacaagtgactaaacagatcacatgtataaatgtctcaattacaactaaactttcatatattgacttagaagacaaagccatgtgaacttcaaatgcttatgttttcttgcaaatttggcaaaccttatcaaatgtcttcagaaccacttatttagaagcctaaaatatgtatgcatttcaacactccattcatctatataaaggtacttaaccacacaactcaatcatcaagttctcacattctctactaccaaatattttgtgaaatctaagaaaaacacacaaagaaagatcaacatggcatttggattaactagctttgttcaaggtaagaaggctctccgaagatcactttcaggcattaaagaagcaactttgaagtgttcaagcattccaaaaggctactttgcagtctatgttggagaagatcagaag

SEQ ID NO: 88143 - DNA, 3696 bp, Cannabis sativa
caattgttgaatatgctttacttacaccatgcaccaaaccaaccaaccccaaagcaaaaccaaatattgcttttacttttttaaagacattatttgaagtttgaactgtcgagcatttacagaaaaaaaaaaaagttgagagtggctgatcttacttacttgttggtgaagtgtaaagatttgagtttgttcggagaagaattgaggagaaccaagagaactaagaacaaacactggagaacatattagaggtgttctcaaaattcttgtttcttttaactcagttttctatccaagaaaacaaactcaaacactctttaagtgatgatgccaaacaggaccctattcatttgaaaatattacccaaaatctcttcattgcaggacataatgagtataaattttcctagagctgatagcaaagcaaatacttaaggtcattctcaccaataacctttgcaggaacatgaaccattcttaaaatgatggaagcgacttgaatctcttaatatgatttcatgttcaataatcttggatatataggtcatggcattgtggcaatcaccacaaacacgtatattcttggtgatacgaataggtgtaccaagtggagttgtcagaatggcataggcaagagccaacttctcactatgttcaaagagaagatcacctttttcctcatcatccacatcatggagtgcaaaactggtttctgggacatacccgatggctttaatgcgctctatcaagcttgcaagcaattcatatatttgttgggatcgaggatgtcgcctatctcctacaaaaaaagttgtagtcccttcctttccttgaacccaactacaacccggcctcttcttgatccctgtatgtttcatcatatatctaattctagcaacatccttccatcgcttagcattggcgtacatgtttgataacaaagtataagatccatcattctgcaaatccaactttgacaacctatttgcagcatattccccaacctcaacatttccatgaatcctacaaccactaagtaatgaaaaccaaactatcggagttggttccataggcatgtcactaataagcttcaaagcttcacacaagcgaccagcacggcccaagagatcaaccatgcaagcgtagtgttctgccgtaggagtaacaccataatccttggtcatgtcactaaaatatcttattccctcatcaattaatccagaatggctacaagcgtataggagaacgacaaaagtgacaccatccggcaccatacctacttttctcatatcatcaaacacctgaagagcttctttaccatgaccatgcatgccataaccagccatcaatgatgtccatgaaacaaaattcttgagtttcatcttgttaaacacaacttgagcatcaccaatgtctccagatttgcaatacatatcaataaggcaattagacacaaaaggtgtcgtggaatcatgttcattgcgaattacataggcatgaatttgtttaccgaatcttagtgcccctaaatgagcacatgccatcaaagcacaagacatggtgaaagcattaggcctttggtagttatgttgaccaagcatttggtgaaatagaagtaacgcatcattggcttccccatgttgagcatacccaccaatcatgactgtccaactcaccacatttttttccttcggttctataagatcaaacatctttcgtgccattttgagacctttgcatttagcatacatgtcaattagaccattaataatcattaaatcttcctcttgatctttcatgtcttggtttagaacacattttatggcataacaatgagcctcctttccctgaagtaatgctcctgcagatgcacaacctgacaaaagagacacaagggtaacaacatttggatcaataccacaacctagcatttgtcgaaatacattcaatgcttcataacctaaacctcgttgagcaaaccctgcaattactgcactccatgtcacaacattcaattcaattttctcattactcatcttttcaaataagccaatagcatcttcaaatctaccaacatgagaatacgctgtaaccatagcattccacgataccacatccctaaccttcatttgcccaaaaactttgtcagcctcatccatcaactcacacttggaatacatgtccacaatggcattacccacatagacatcttcattaaaaccatttcggacagcaaaaccatgaacttccttaccccacattgataaacccatagagccacaaacaggaaggatattcactagactaaaagcattagggcgtgcactaagatccttcatcattcgaccaaacatattcaatgcattctttgattcaccattttgggaataagctgacacgatcgagttccacgaaacaacatcacctattcctctgttgaacacttcatcaaacattttttgtgcatttcccaaagcactacaacgaccatacatagtgaccagagcattacaaacaaacacatttccattaaacccacttgagcatactacagcgtggactgaagcgcctagccgaaatgaggaaagttcaccacaagctttaagaacaaaaggaaatgtgtaatggtcaggcctccacccaagtctgtgcatttgaaggtgcagtacaaggacttcatttggcaaaccagagcgaattgcacgcctcatcaacgcattccaccaaaatagagaatatggcaacggctcaaggcgctcaagcagtttcgtggcatatgctggagcattgcatgttatgtaggcaccaataagatctgtgacacagtgtgctaggccaagtaccaagattttttggtgagttagcttggcctgaatcaaatacttgcattccttcaataaggaagttgttatctgaagagtacctgaggctggcccagtgtagaaggccttcggggtagtagtcataaatctcaaaacgttaaggttttgacaaattgagaaaagtggcatactagtcaatttccttcattgttataacttatattttgtgattattgccaaaagaacagaattcacacacaaaactcagctttctcatcaactacgctaattgctctgccaaagtcattttccatactacatttgagtggcccccggttgagctagtgtgttaaggggtagaagctccaaaaggtgaattcaattcaggcatgtttggtggggctttttgcactttttcttcccacttttggtttttcaatcaactcttaaattgagagaagaaaacaaatcatttttcccagaagcttaccaactcttaactagcaaaagtaaagagtaaaaacagagaagctgaaaacttattatacacataatcatcatcatgatgtgcaattaattcatcttataataacagagtatatcatccactagagacagattatatcatcttttccttctaatgttttttttttttattgaaaagaaaaattataaacatatattagtagcacataatacaaatcagtttagaacaatataatattcacataagaaaagattaaaatctaactaggaatgcaaaactataagtattaactactctatacagctataaaaattataaacatattttagtagctcataatacaaatcagcttagaactgaaccatttacggtaaaagaatatataaat

SEQ ID NO: 88144 - DNA, 704 bp, Cannabis sativa
  modified_base (79)..(80): a, c, t, g, unknown or other
ttaattaatcacgttttccataaacctcattgattagcaacgagctgcacagcaagtttaaaaatcacgtaatacgccnntgttagttagggtgttacactgccggcggtggttctacaaaacgcagagagagagaaagagaagaggaaaatggggaagaagggttcgtggctatttttatttacttttgactgttgccggcgcaatttggtgcgccgacaaaagtctatcctgaataaaaacgcacgaaacgctttttttcttttaagctgggacttttgccggcgcacttacatgcgccggcaaaagttttccacaaaattttcacacacgttttcctttgggggggaagttgactgccaaaaatttcaagacttttgtcggcgcataaatgcgcgggcaaaagcaaaaccctgatttaacgtgtccactggtcaaacagtttccacttttgtcagcgcaattaaatgcgctggcaaaagtccccacctacttttgcgcgcacgttttttcactgcgagggaaattgactgccttttttaagactaaaatgcgccgtcaaaagtaaataatattaaaaaataaattaataatcttttgctggcgcatgtaaactcgccggcaaaagtttgctcgaactgccaacaattcccaccttttggcagtttggtgccaacttttgccggcgcaattcgtgtacttcg

SEQ ID NO: 88145 - DNA, 620 bp, Cannabis sativa
aactgggtcgaccgagaggggtagaggctgaagaaactgagttataatctgccaagaaactctgagccaaactgacaattgcgtgagcttgatcggttggttgacttttgagggctttgttcctgttaaaccaaataaaccaagcaatacacagaaaaagatctacatcttctttggggaaagaagtgtaaatctcatgagctaaatcatgaaataaaatttctgaagagcaagaaaaaatgtaagggtgaaattgcgtacctttccagactcttcgaacactctgacagtagaacagcgcatgtgacaccgattcttcgaagtttccacaacggctacaacccggggaattaatgattttccgaagggctaggttttgggcagtggggagggtttggtttgtggctcggaaagcaaagtgtttcaccttggcaggtatcgaaaggtgccaatggatgttccaccaaggcgagggagaggaagaagagggaatgtcaggaggaccagtagtggaaaaactaaggtggtagcctgatctgaccgagtaaatcccagaagatgagagttcccagatcagatcatcctgggatggggtaagagggaggggaatagaaaggata

SEQ ID NO: 88146 - DNA, 736 bp, Cannabis sativa
catcataaaggatacatgtgtgagaactctcaatatacattgcaagaaatgttgttttccatgaacaacacttccctgcactctctgatgctgctgcatcatctcaggtgcctatatctcaacctcaaaatttccctactgctactttttcttttcctgctgctgcaactaattcttctttttctgctggttttggtgcttcctcatctacaactcccacccgtgagcatgttccaatacccacaccacctcaaaatgcctctgtaccaacacccacaaccacccttccccaaccaaacactcaacctattcccatcattaccaacctcacaccagaaaacattactacagactcacatactgcaaacataccaccacaaaattgccccagcaacccttccaatcttgcaccagcaaccgcctgtattgaaaaaccagcagctgtcgctgagaccgcaaacacctctcgcactcacaccatgaccacaagatctcaaagtgggattcgtaagcctaaagcatatctttcaactaagcatcctctccaagaatctctactgccaagtgaacccagaactctcaagcaagcactcaaagatcccaaatggttccaatctatgcaaactgaaaacaaagccttagttaaggctaagacatggactttagttcctcatgagccttacatgactgtgattgataacaagtgggtctataggataaagcttaatgctgatgg

SEQ ID NO: 88147 - DNA, 1012 bp, Cannabis sativa
ccattacattcacagaagaagacgccaaactggtgcgtttccctcaccatgacccctagtcatagagactcccatcgccaataaaattgttgcgagaatattggtagatgatgggagttccgtgaatttattgttcaaagaagccttcacggccataggcctcacggacagggatctatcgcccagcggctcccagctcacatggtttaatgggacaacacttatcccaatgaggaaagtaagactccctgtcaccctgtgcccgaataccccacagagcacttttaaatattgcacctttgtggtggtggattgtccaacaacatacaatgccatccttggccagccgaccttggtcgatttcggagcaatcacctccatccgacacttatgccttaaattccttacttaagaagccagagtggggacactgaggggaaaccacggagaggcaaggcaatgctacaatttcgcaacgcacttgtcggtactggtagttcgcgagggcaatgaaccaagattgatggaagaagataagttggatccccccttgggatccgaaaaaactgtaaaacctatggaggacaatgaggaagtacaagtgtgcgaactcgaatccaccaagatcctccgtctaggaaaaaaacctggagctggaggaaagaagcaagattatcgaagcattaagggcagccatagatgttttcgcgtggtgccaatgggatatgaccggcataagcccccacgtaattacccatgtcctaaatgttaacccaaacatgttgccggtacagcagaagcaacgtccccttgatctggtaaaagcggacgccttagaaaaagaggtagataagctgctgaccaagggcctgatccgggatgtgtactacccggaatggcttgctaatccgatactggtaccaaaaccgaatgagacatggcgggtgtgtatagatttcactgatcttaacaaggcctgcccgaaagattgcttccctttacctcgaattga

SEQ ID NO: 88148 - DNA, 848 bp, Cannabis sativa
ccaagcaaatattttcaccttcggagggagttgcaatgaccaaaaaaatttccaccaatgagagtctctattagagctggaactttgatcaattatatccatgtcagcagcaagatggtatcccgatttaacggtataaagaccagagctatgatggtgccatatgagaacatctctgctgctaaaaaaactcagaggcacagataaaattctttccacatccaaagctgaaaaaaactgtttaagtaaaggtaaatcccattgacgctcatcagtaatcaaattagagacaaccccattcgacggcccagagtaatgaaagggcagaaaagtattgtgacctggtatccatgggtcagaacctgattggatatgtcggccatcgcctactttccatctcaaacccttaatgagaagctcacgagcccagtggattccttgccatgtgagagagggagaatgacccaaggatgcttcaagaaagttattgtttgggaagtacctgctcttcaggattcggccaagaagagaatgtggcttttcgaaaatgcgccatgcttgttttgctaacaacgcctggttgaagtggatgaaagaccgaaatcccatacccccttccagtttagacttgcagagtagattccatgatcgccaatgtatccgagaaccattttcagttaaaccccaccagaagttggccatcattgattcaacttgcttgcaaaaataggctggcaaccgaaagcaactcattgcataggtagggatcgattgcactacagcttttaaaaggatctccttgccacccgcagaaaatattttttcattccaagagttcataagcttcc

SEQ ID NO: 88149 - DNA, 814 bp, Cannabis sativa
cctatatcctcaaaatcaagagaacaatagtaatgagacatctttctcatcaacaatttctatggatgagtattctgcagatgtcaacgagtagaataacactacttatgtatgtgacaattatcaaatttgtgagcttgtaaaataaaatttttgttaaatggtgactatccttttgaggaataataatattttttttttctttatctaatcttgatagagtcaaattttgagttattgtgtattaagaaaaatacatgaactattctattcattcatcaatgatacacaatgagtactctttctcatggcttatatttgaaaatttaggagcaaagcattgatgatctcatcatatatatatatatacatatatatatgggaaagaagtgataatagaatatattttttgtcatcttaaaaatttaattgtgtttaactcatgttttttaaaattatttttcgatttttttactaaaaaaaatgaatattctacaccataccaagacatgaatcaatcccacctcaaacctaaccccagatttggaccctgacccgaacctggacccaaaccccagactcggaccccagatcctagctcgaacccagacgaactttgggtccagttcggggtccgagtccaaattttattcaaagtcgtaagagcaccagacaaaggaatttaaggctgattctattcaaaagcaatttgaactcgaccgatgcagaaaaaaaattacaagtaaaatctccaaatgttaatccaaattaaatagtaagctatattcgctaaagttggcttgacaactcctaa

SEQ ID NO: 88150 - DNA, 1294 bp, Cannabis sativa
aaggaggagaagtgcacatgcttccctctcctactaaaactcccacagtgacaggtttcatcaaaacctaaagcacttggtcgatcgctcaagtggaccactgaggctcggccaatatatggccacctgtcaacctagcttgaccataaatggctaagctcttgccagcttcatggctaaatataaaagcatatctccccaaatctctcaagatttgggagaaacgaaagagccaaagaacaagcaagagcaagagcaagagaactcaacctagaaagtggattaaccacctgcatgatgcatgcctagcccttaaagcatctaggggaagtgggtgcacgagacaacaaaagttagactcaaagcttctaataacaaggctaaatatgaagctctaattgctagccttaggctagcaccaaaagcgtgggctaaacacctagacatacaccacgactctcaactagtcgtaggtcctgtcctgggtgaatatgcaacttaatacaaaaagatgacaacctacttaagctaatatgaagacttgtcagctcaaaagctgcactaaagggcaagtctccaaagaggatgtaatagccgacactctcgctcaactagctagttgcgccttgataactaaggaaaacttggtacccgctcagttcttcaaagaactaagcatccttatttttaaaagagatagacgtgatggacaaccaacatgatacacctacagcaacatacctccacacaaaaaccttaccagaaagcagggattaaggggatggctgcagggtgtccaatcctgcacagcataatagacatggtatcccaatacaacctctaagaagcgttaccaagaaagaagttgaatagctattgacaagagttcataaaggctctatgacaatcatgccaggggcaaagccaatcgagtgtagattggatcaaactacagcattgacttggcctctaaagggctggctgaccatggccatagcaggatggccggccatagaaccaacaatctggtcggccactacccctacaggctggccggccatagcctcctccaaatggccaggcaaaactctaacgtggcagaccacctggtcagtaccctggctagcccgatccaccaacagtctactctcacacttttggtgtattgtgactaagaagtaaatgacatatttctagaagaatccctttaaaaatgggaaaaagaagagaccaagccaactcaaagtagcatgtccaccaacaaagattactaggcccttaaacaaacagattg

SEQ ID NO: 88151 - DNA, 568 bp, Cannabis sativa
ttgtattctcaggtccagatgtcagaagttggctggtatccactgcagtgactatgaatcccagacaacctctgctcatcagatctttagctttcaaaagtgtcatccttggtatgcgtgtctcctgaactttacccaaaacactaccaggtcagcaccatcgggctcaaacaccaccatcttccacttgcagtcgattgttgccccatacttagacagaaaatccattcccaagattatataaaaatcagacagttgcagttctattagattagcggttaattcataatcgtcaatccagaaagatatagactgaatccacctagtggatactataaggtcctcgaaggtaacaatgtacaaaacctcaaagcatatgtatcacatggtttatgaaaactttcaattactctactcgacacataggaatgagtagcttccgagttaaacaatacagtataagaatagccatttataaataactgacctgtcaccattgatggactagcatcagcgttagcctgagtcatggtaaaagtcatcctgggttctgagtagtattcttttt

SEQ ID NO: 88152 - DNA, 1787 bp, Cannabis sativa
  modified_base (274)..(283): a, c, t, g, unknown or other
tattggaaatggtatatgtgagtatatagtaactgagattaggattattaccctaacatgagcgttttaatagcctagggttattaccctagtgatattttttgtgtaaattccatgccatattaaatgtaataagatttaaggattatgcgctcaaggaataatcaagttggactcagtaatcaaaatcgagatgaaccattctaaggccttattgtatttagacgcgtgagagcaacacgtaggtccacgccacgtagacataaatagacgnnnnnnnnnnacacgtaggtctacgccacgtaggcatgtgagcgcaacatgcaggtctgtgtcacacaagcaaatttgaatggcattgttatttatattatgatgagcatattatttatatgttttctactgtcttgctgggcttggctcacgggtgctctactatgcaggaatgggtaagactgttgctgatcaaccatgagtgcaggagctggacgaagaatctacatgtccaggccatagtagaccaagcgggttggggtctaccagtgatgtatttttgagactctgttttgtcgcttaggtcggctgaaataaaaaggacttgtaataatattttgtaaatatttttgggatcccgacttttgtaacttttagattgtaaagttaaaattattacaagttttattttcattccgtttatgattaaagtttaatttctgcgctaattttataagtaatcccgattaggggattaggggttcataagtatcttggttagcatgcctaattatttagggcgttacatgcattctttgaatagagcctacaaatactgatttactctaccccctactcgatgataactctggcagtgaaccctgccacaagtgtgcgaaagattgagtacaacagacctgagctaacttgcacgacatccttccctattttgtcccaccatctagtaagtacttcaacactttgttgattttgtgcaattttgaatctaggatagaaatcctaggttcaagctaggtttagtacatagtaaatgtttgatcaatagaatgttgtccgtagaaacacattgttagaattgaactacgcgcaagttcttgtcccttcaggttgtcggtcttatctgaatggactgagcagggtcattttcatttctgagcatgcttgcacggctccaggattagggttgagccaggttgagaatgcatttgaacaatcattaggctgtcttgattctttcatactcagatgagggtgcattgagggtcaatcctttcgggaggggtatctaacccttatgtgtgcacccattttggaatatgtcattgcatgccacataatcttcccaactttataatttttgattgattcacttatcttgtgttggttgtgcccgcaagtactccttaaagcaagaatgctaggcccaacaagagagactggttcgacaagcttcacaagtggatgaggttctgtaaggaaaaagaaaaggtaggacggtatgtgccaaactgtgtctcccagaggggatgatggtccccaacgagccaacatttccactccacctgatccatcaccatctacccaacaaccccatcagtaataccaccagcaacaccatcaacaatagcaacaccaacatcaacagttccaaccacgacactagcaatctacttccctacccgagattccttctgtgggttttaaattccctatgaagattatcccccttgatcttgctactatgcaaagagcgaggggggttgaacatgcct

SEQ ID NO: 88153 - DNA, 567 bp, Cannabis sativa
gtacagtaaaataggagttgtggacaagaagctgacctgtcatcatagatagattggctgcagcatcagcttgagtaatagcaaacacccgagcaggtacgagttttgcttcttgcttctgctcttccttcttagcctgaggtcaatctttcttaaaatgcccaactatgccacactagaatcgtgtttttcaattgcactttccaagatgatatttcttacagtgaggggtactcagggtatgaataaccctgtcgtccatgtctgccttggttccctcaaaacctattgttctatcctgaacctctagatgtcaggaaagtttttctcttttgattagcagtgggataacctccatccctaccatatcctaaagtaggaagagtagtggttccaccaacgcttagagtctctcagggctcctgatgaaattccactgcacactcggctcttagagcctttcaactatctcagcataaatcattgtgtcatttgtagtgactaaaagattgtatttaaagtaagcttggattggatgtatggagtacgcattggaagggaccgata

SEQ ID NO: 88154 - DNA, 655 bp, Cannabis sativa
  modified_base (599)..(604): a, c, t, g, unknown or other
ctaaaaatagcctaacaatagtatccatgtaaatttctaaaatgacatccatctctctacaatgttatagcatcttaatattttatcacttaatatgtccacctcagcaagcatcatttaaatttttaccattggagatgctcttaggctaatactaattagaaagagaaatagttaaatgtatctaaacgtgtcatatcgttattagtacaattaaatattgaatttcatataatttaatgtattaacttttatagaatatggctaagagcatatctccaatgaggaacacgtatattgccaaaatatacatattattttaaaatattatttttttattttctctctcatccacataagatttgtcatcttctcataaaaaaaatattttaatagctgacaactctaaaagttgttcattatggccccacatcatattgaattaatgactttttaaataaaaaataattttttttaataaaaaaatctatatctatatctatactagcaaaaagctacgtgcgaggcacgtacactgaattttatgttagtttttttatgttatttaaaaatggtacaattaaaaattaaagaaaaannnnnnttagttattaggtgagattattattatgtgtatttaaatattatagtttat

SEQ ID NO: 88155 - DNA, 741 bp, Cannabis sativa
tcaaaaaattaaaatgaaaataccgaaaatcaggggcccatcgggcctgcaatcgagcccatcagacctaccaaaaattgaaagaacaacttatccgagacaagaccatcggaccccaaatcggtccaagcatcggacccatcgggccctgctttttgaaaccgatattagggaccatcagacccatatcggtccgagcatcgggcccatcgggccttttctttttgaaaccgaattagggaccatcagacccatatcggacatgcatcggacccatcaggccttcttcttcctcaagaaaaattttaccaatttcatagatcgagataatttaacaaaatttccctaaatctaacaaaatcctaagtttcacaaacacaatcacaaacaaactcaatctttaacactttctcacaaaaaaaattaaaaattaaaacacaccttcaacattgtgggttcggttcgtggatccggtcaatgtggagtcggtaccgtgcgggtcttggtcgaaatagtgtcggtcggagtaattctgtgggtctcggtcggaggaattgtgtgatgtggtcggaggggatgttgggtccgattcgggcgaagggggcagagagagtttgagggtttggggaaggagagagaaagggtttgggattttgagaggggtattttgtggatttatgtaaaatggtcctattttaaaaattacccatattttttgttctcctaaccaattatacctta

SEQ ID NO: 88156 - DNA, 1472 bp, Cannabis sativa
tttagttatattttaaaacttataactagtaattttatggatttcatgactttattatgaaattatgtgttttttgttatgaattttatgatatatatcatgtgtatgattttttttttcttatagttgaggcttacgcctcgtggtactacggtaaaacgcctcagaacccgtttctgcctttcaaaacattgtctttattgtaaagactgcttaactttaatttaaaaattagcagataaataggattataaaatgaaatttgcatattagttatgaattattagtttacatagatttatttgaattcagaatgcattttatatatcatatattgaattttatatttttgcatgttttgtgcccgacaacattggaatgcggcgtttggctatttaaatcatattttagtatttttagtatagtagggcaatatagttagacattgagaatgtcaagattagttgagattttagaaatggccattttacccctagacctttttgttgattaagcttgtggggaagggtattttagtcaatttgccctaggttatggtggctgaattttagagtggcagctggccactacttgcttaattaatctaagtttaattttgatttttggaaaattaagaaaatagaaagaaaaaggaatttgagagaaaaccatcttctctctttctcttgttcgaaaccttaaggaccagcaacaattggagtattttcttgctgcaaattagtgtgttagaccaagtgttagcgatccaatccaaggtaaagctcttagacctcttattatttgatttcttaagcttaaagttatggttttatgcatgaattgtgagtttaggtactgtagttgttgttgttgtttgtggatgttttctgaagttagattgtgattatttatgttgatttgagctagttttggtggtggttgtaagatttgagcaagctttgagtttaaaaactcaagcttgactttttaatggtgaatcttgattttgagcatgttgtggtgttttgttgccttgtttttgttctttgggatatattgaacatgtctggaaggtttggttgagtatggggttgatttgagtgagttagaaatttttgaagttttcctgcactgaatcagtggaccggttcagtaagacctgtaggaaccgaaattccggttggtccctaggaaacccctcaaaactagaatttcgattggggatccggtctaccgattggggcaattttgagaaccctagcttttcccatttttgcgatatttagggtatttccatgttatttatcgatagggaaacttttaatttcaagtttaagtcttcggtaagtgatttagcgtgtcactcaccaatattacgaataacgtgatttaggggcctgtaattcgtcgagtagttgttccacttaggttggctgacacacttgaattcagaaacgaggtaagattagtat

SEQ ID NO: 88157 - DNA, 952 bp, Cannabis sativa
  modified_base (282)..(285): a, c, t, g, unknown or other
ttttaagtatataaaatcaaaattatcttatttaaatctgttattattattttattaaattatataagtgtataaaatttaaaacgatatttatgctacaaatatctctatattagaatagaataataatattaatagaattataatttaaagtatttaattcgtcgaaaaaaatatataatattttagttaatgaaataaatagaattctagctcgccatccattatgtaattttccaataaaaaaaaacacaccttatatctcataataataataataannnnaataataataataataatgtttctcttcaccaggtgccaatggccatccttttttacacatcttttcatgtcctctacttttacccacaacatatgttattattagtacactacttctttctctctctatatatatatttatgcctattattccttcttaggaccactactatatactacttttattttgttttgtttttatctcatccttaccttaaagctactatactattgctgcctagctatagctaggatcaaaccaaaggaaaattaaagattaaaagtgttcatgttgtttataggagagggagagagaaggagatataatatggccaatattgaccaaagatttacaagcatatatatatatatagggatatgattttgtcccgtacttttatggattgtaatccgtgatgtacggcagcagtcaaatgaggaaattatttgatttgacggctgagattgatcttagggtaattaaagttaaaaagtagaaacgtaccttgacactcatttaatgtactctgaaacatacttaatatatcacaaaatacattctgtgcaagtacatcacggacaaaatcatatccctatatatattgagatatctcaatatatatatatatatatataagcatttttagtccttaccttagttgtgaag

SEQ ID NO: 88158 - DNA, 1143 bp, Cannabis sativa
  modified_base (166)..(172): a, c, t, g, unknown or other
  modified_base (599)..(599): a, c, t, g, unknown or other
  modified_base (744)..(745): a, c, t, g, unknown or other
aactctgacgactaatacaccgacagctactccggtgactttttcagtacctacagtaaattctgggaaattcgtcggaattggcattgtagatgatttagtaaccgaaaaaaaatcaccaagaaactggttttttttcttcatcaagaaaccaatttcttgatgnnnnnnncagtttcttggtaatttttttagtatttttttctctatttggttgattgatgaatctagttttacttattttcagtgtatatcatttttgttttgttttcataatctttattattgttgtgtaataaaattagttccttgatgaagaaaccacttttttggtgaagaaaccggtttcttaatgaaaaaactactttcttggtgatttttctagtgattttgctggcgacaataccaaatctaacaacttttttgacgacggcaataactccagcaatttttccgacaccggcaactggcgacttttccggcaccgatatcaaactccagaatagtcatcggacttgacatagacggccaagaaaaatcaccagaaaattaccagaaaaatcaccaagaaacctgtttcttcatcaagaaactagttncttggtgatttttccagcaacaatgctaattctgacaacttattcggtgtcgacagcaattccgacgacttttccagcaccggtggctactccgacgactttttcggtgccaacagtaaactccggtgacttttccggcacgagnnacaacttcggcgatcactatatttctatttgttttatttttttaaaaaataaatatgaagagaattttaatatttttatggtaatttaattaagtttttattttttaagaattttaaagtcagatttctttttaatgttttatatggtaaaaaaaaccatatttttagtttgattggttagataatgttatatttagtgacatttactttttatgccatatttatcataaccttaatagtttttcccatatttttgaaaatagcccaaaatagttgcactaaaatttctagagaaaattacactctataccttttttatattgttttttttttttaaaaaaaaagtataccatttttaactcttttttttaaatattgcaccaattttgcccctgtca

SEQ ID NO: 88159 - DNA, 1018 bp, Cannabis sativa
taccttctttcctgattcaagtgtactggccgagctgaacagaaagtctcgtgctagatggatgccctaatcagtaaaattgggtaaattacatggtcgaataccctaattcgggaaatccaaacctacaactttaggttcttttatactctctatgaatcacactaactcaggaaatagggaaacacctaactacggcattgaaatggacgagaattgagaaaactgatttttcggggaaccctgccaaaaccagtttaccggtttgacaggtactggtaaaactggtaaactggtttttataccaacctccccaaaaattcaccaatttgctcaaaacttctccaatttcaaccaaactttccagagtacctaaaaaatgtatacacaacatattccaaccagaaaatcacagaaaaacccaatgaaactcaacttgccattaaagaccaaagctttgagttcaaaactccaatttgcataaatccaaccccatacactaaaaccaactgcaagaagcttaaactaactaaaatgaaccttaaaatttgaaccctaaacatttctaaccttaacagccatcaattcagaaaatcttaacttgaaaccaattaaaatctaatgaaaacaaagatagaaagtatctagggtttaccttggcttgattccctctaaatccttgctgaaaacaccccaaggatcagcaaaaacccccttgttctgggctggttcgaagagagaggaagggaagagagcttttctgaatttcttggtattttcttcaatttttcttatttttctaaaatgagaaggttacttcattttggctgaaaatgaataagtgacgagctgccaccttgtaatccagccacctaaccccccccataacaaaggactaaagtacccttgttgcctattattaaaataaagtctagaaaaatggtcaaattccataaccttaactaatcgtggtaatttattttctctaaaatatttcccactatgaaataaggttcta

SEQ ID NO: 88160 - DNA, 1235 bp, Cannabis sativa
gaaaacaataccaaacatgctcagtttttttttttttttcaattttttttttgataaaaaataagggaatgtgttgtacattctttctctactcattcggttattttgacaatttaaggatcatgtttgagttataggaacattatacctcggtctctattaactgaggtatctattaactgagtaatcggtaatcatcttaaaagttttcatcacacaaataataccgcctataatacctaggatttagagagtcaagtctttgttaatcccttcacgagacattgtggtagattttgaacccttgacacaagcaaagaagaataacagtaaaagcaatccctaccactacaccacacaactcaacatgtggtaagaataattaagttatgttaagtttgcttagcaaaatataaaatgttacgttaaaatatataacgactagaggtttcatcttggctggttttaataagattatccttaatttacattatttacttcaagaatattttggggtatatgtgttttgggtctgaatttgatggcaaaaatttgaggacaagcttattctaaggattctataattgtaatttttggaacacgttgggacatatatataattaataatatcctaattcttttttttaaaaaaaagagcacaaataaaactcagagatttacgaatcgtacaacctaaaatttctagccctagagttatttagacaaacaaaatcaaaattacccaaacaacagagtaatgcagataaggaaattttttgggcagagggaaacttcgcgatcgaaactctgaaggttgtaaaactgagtcttgatgatttctggaacaaaaagtgtaatcagatgaaataggcaaaaatataagagatagtgagggcatgcgagattggggaaaaagtggttgagatttttgttaaaagctcgaaggtccgatagttgaaaatggcgaaaatgatgtgcaactttaattttatacctaataagtgatcactattcgatcaaagagaatctgatcttacaggtgggaactatacgagaatggaatggtcagaacattaaatgagtaatgatgtgtctcgaagttttgaacatccaaaattttaagcatgcattttttaaacatgataaatacaattatacccctagaagcatttaataagttcttattaattaaaaagtactttttagggagcaattgttaaacctaaaattcgact

SEQ ID NO: 88161 - DNA, 735 bp, Cannabis sativa
ctgtagacaaactgttaagaaaaacataaaattcacatatttagaagatttataaatgtaatgataaatctaaatttaaaatccaatatgtatattttatgatagggaaaataaatattaccatacagataagactgaagtttcaagttgaggatttgatagaaaaccagatagcaaagtaagaagctcgaatgcccaccactcaaggctagaatgacaacatgaaaagaaagagcaaagaattaacaaattctattaataataagagtttgtttgatacgctatattatattgtattgtataaaattatattaaatattatatttttatacaactaaactataatattaaattgtatagtatttatgtcatataatactatgtaatataatacgatttacaaaacaaaaagcttaaaatagaagttttaaggtgttgtttttgtaccaaatcattaatgaagatggtataccgaaccgcaagaactctgcaacgccttgaaataggtttgaaaaaatcgaagctcgagttttttcacaagccggagagaatttcatgaacaaaagtagcaaactcacatttaaccaatatgaaaatccaatagacaatgcagctccaaaatgccctaatcttgacttgaacactaaagcccaacaaattggtaaatggcaacaaattgaggcacatgagctcaaaagcaaaggataggttatgctttgtgtcataaaatatcta

SEQ ID NO: 88162 - DNA, 762 bp, Cannabis sativa
aaaaaactatttagacctattatttctttaatagtatgaaagtttttatattttgttataagataataactgtaaaaaaaaagggtgtcacaatattatctgtttttaaaaactaaaaaaatgaggaattttataaaaatgttaataataaaattggtccatatgaaatgttgagtaagagaattaattttaataaattttgtggtgaaatatatgccttaaattataatgataaaaagagaggtcacgattcatatgactaattgcctctatataaaaatatttatttgtcttattgttttgtaataattaaattgataaatattgtatgaagttggttgtgcaatcgcgtgatcgttataattatatcgtccctcgtacaatcattataatcattgaaaaataaaatttaattatgattatttttttgtatttttttttatcttagaaatccatatattaagtatttttttattaaatgagtacataaatatattagataaatatatcgagttgatttgagaactcaaaataaaaaataaaaaaaaaaaagattatatttaattggacaatatcaagtgataaatcaaccatgtatatttagacaaattaaaatgaatgtaagaatactttatttataatttaaaagtgtactaattatgtattttttaatttatgtgggattttaattaaaaagaaaaaagagttactaagaagccatatttctcaatatttacaaaataaaatataatgatacactga

SEQ ID NO: 88163 - DNA, 756 bp, Cannabis sativa
ctctcagactggatcgagccacaacggcttattttttggcagaccaggaaattaaatttccaccaagaaagatggtgtagccaccagtgggtcgtctatcgtcggggcagcttgcccaatcagcatcagagtagccatagagatttagcagtggtgctggtttgatgagaagaccatctgttatggtgccttttagatacctcaatagccgtttagtggcttcccagtgagttgtggttggggcatggagaaatgacttaacttgttgattataaacgcaacatcgggcctagttaaggtgagatattggagagcgccaattgtgcttctatacaaatgaatatccaaaaagggatctccaatggtaagagataatttgtgagtcgaacttgttggatttgagcttggttttacaccatctagatgtaatttgaccaacaaatctgtgatatacttggactgagagagatacatgccaactgagtttcgaatcacttcgacacctaagaaatagtgtagggggcctaagtctttgagggagaagtgaagattaagatcatcgataagcttctgcttcaggctgctatttggactagtgataaggagatcatcaacgtagaccagtagtaggatgatgttggatcctgaaccagaaacaaaaagagagttgtctgatttggattgagtaaatccccattgtagcaatgttgttttaagcttgtcgttccatgcgcggggtgcttgtttaaggccata

SEQ ID NO: 88164 - DNA, 841 bp, Cannabis sativa
  modified_base (523)..(539): a, c, t, g, unknown or other
gattgcgtgcacttgcgtagtaattaataattttcgcaacaaagagacatatggatgccaagataggtatcagagttgtctttattagacaacgacagttatatttgaatgtcacattagggattagggttgtcttattagacaacgacaaattcattactttataaagtaacaaatatggcttgtcatattagacaagtacttgtgaattattgaatgtttatatacttgtgattatctatgtaaggtgtaacaccttaacttattaggcacactacccaagataattaagaaaccctaatctcctagacgggattactaatacactaagcgcgggaattaaactttaattgcaaatgcaatgaaaataaacttgtaataattttaactttacaacaaacaaaagttacatgtctcgagatcccaaaaaaacgatttacaaaaaattacaagtctgtttccaatagccgacctaagcggcaaaacaaaattacaaaattcatcactggtagaccccaacccnnnnnnnnnnnnnnnnnccgaacatgtacatacatcgcccaactcctacactgatggctgattagagatagaattaacctttcctgcacagtagagcacccttgagccaagcccagcaagacagtataaaatatcaataacatacttaagatatcacataagtattaatgccatttcaccttttttctgtatgacacagacttgcgtgtaacgctcacacgcttaattacgtctatgtggcatagacctacgtgttacgctcacacgtctatgtacaataaggccttagaatggttcatctcggttctggttaccgagt

SEQ ID NO: 88165 - DNA, 819 bp, Cannabis sativa
aaaaaaagaaatgagatagatcaaatggctatggtgaagggttgtttgttagaggcagattaaacaagtgaaaacagaggtggattccacaaatcgaatcacaagaacaagcagcataaagggtcaaatcagtcacacaaaaccaagcctaatcccaaagcaagaaagcagtgctactattgtaagaaagaggtacatttcagagatgaatgcagggcattgaaggctaaactacaaagagataaaagtaaagaaagaggagatgttggtgaggtaactgatggctatgaatcagctgatgtcttggtagtctctagccaagaatcaggtgattcatggatacttgactcagggtgttcatttcacatgacaccaaaaagagaattgtttgacagtttcaagaaattggatggtggatcagtcctattgggtgataacaaggcatgcaaagttgctagaattggaactgtgagacttaagctacatgatgatcagatcagaagcatacatgaagtcaggtatgttccagatttaaagagaaacttactatccattggtgaattatattgattgaaaaaggtcatactataaagattgatagttctttcaaggtcatgaaaggttcattgatcgtcatgaaaggtgaactcaagaatggaatttattatctaaaaggaaagaccatcactggtgaaaatgatatggtagttagaggacctgacatggagagtactaggctttggcatcttagactaggtcatgtaagtgaaagaggcatgagtgaacgtgaaaagcagggcattctcaagggcaaattag

SEQ ID NO: 88166 - DNA, 1416 bp, Cannabis sativa
  modified_base (264)..(267): a, c, t, g, unknown or other
  modified_base (371)..(402): a, c, t, g, unknown or other
gaggtgactgttcagataggatttgatacctcccggaggtgctttgttatagctttgccctccaggagtatgtggatccctcataccttctccgggcggcatgttccttgttgatccctttgattaataagacttagtcaaattatctcaaagcgttactccttaaatccacgtgtcacagtcgcgatggtccacgtattttagaaaaaattaggggcaacaattcacatcagtagcatgaacatcactaacaaccttatcaannnnagcagcatcaccaccatctttacccaactcatcaccatcattggaatcagaatcaatattctctcgatcaagtaatcccttgtcatcatcatcatcatcatcannnnnnnnnnnnnnnnnnnnnnnnnnnnnnnnatcatcatcatcatcagaatcttaggttaccaactcatcacatgacttaacctggatcaaacaatagtattgcaactaaaataaaataggaaaaaaaactaataataacagaagttaaaaaatgatacaagaacagtgtaaataaatacctcattagaagatagacgatgaagacattaactttttcttgaatatccttaactacagtcatgacagacttgaaattaaggtcaacaaaatacctcaaagaaataaagtcttccgccaaggattcttgattggaaatgaccaactccaacttagatttcaacaattcaatgtcctctaaattagactttttagaagatgaaccactctcgaatgtttgcttagaggtaccataatcatcaatagattcatctaaaagtaagccttccaatcgcaacttctgcctctcctcatcagtaggacgaatgttcttaatcttcaactgaaaaacatgaacaaaaaaacaaaaaatgaaacaaaaacaattaaaaaacaaaaattaataaactagcacaaaacaataataaaacagtaaagaaactgaaaatcaccttgttcaacggtaaataaaaaatcttgtccttcaagtctctaaaagttggatttttggtcccaacattattggtccaattcagaattcttggaatcctggatgaaactcttttgcaaaaggtgtttaccatagcaggacaacattcataaaaccaaacaataaacacccaaggacagcccaacgctctataccaaccatcataggattgacctctcttctcctcttttttatttttattttaatctcatgctctattctttctttgaaagaatcaatagttaattcaaacgactccctatcccaacaatactcatcccaacaaccgctatcaacgacatctagattaaacctagaaacttccttatctggagtattgctaagaaggaaatattggatgaaatacaaaatagatagtttcaaacctagggactcat

SEQ ID NO: 88167 - DNA, 1273 bp, Cannabis sativa
ttagggttttaaaagtatcttttggattataagttatgaaaatactataaaaaatacctttaagtaatatttcaccattctcccatgtccctataactcgatatggatgaaatctataagaccaattgtgtggtgctttcatttcaaatttgtacattctaacccaattttccttctcatcatgatcaccaacacaatttttcaaattccatatctcaatgtgatttgtagaagataaatccacataactcaaaactcctatattgagatcaatcaattgatcaatataaaaacattgttcatcaacatgaccaagctttgaaggcttagaaatcaatctaaattgctctttctccacatcaaaccccattatgacaaacttatgattacgagcattggaatgacaacaattccaataaacaactccattaatacacttaggacctccttttattggaacacaatgttgttgaggttgtgatttttctagttcaatccattttgaatcttttagtgtgtaaaaggtagtagtgaaaggtacacacatagtactatgccaatcaacaacaacacatacaactttgtactttcgagttgatttatcaaaccctaatccgtacgaaaactgtttatgtattacaccatttattaattctactacagttaaaggtggtaattctaaaacatcttgtcttaaagggttaatcaaataaggtgtagcacctaaggatgttactcttgagaagcaaagtataccattagcacaactctcaaagaagatttcgtttttgttatcattcaattgtgaagcccatggaaacaatgacttccaatttatctccaaaagcctttgattcatactcttcaaatttatctccaaaagcctttgattcatactcttattagggttagggttagggttgttatggtcatcatgggattgagatggcttataattactaacaactaagagtaaggggtcttctactgcattcttcaattgtttctttgcaagttgtggaccataagagcttccatctatgatttgacgccatagtttacaaatgcatcttaattttagaatggttttcacctctaaattagagaaaatattcacaattagatcctcacataattgatccattgagtaagataaagagtgtgagtagtgataatttagatggtgagaaagaattattatgtgtgtatatataggctttgattacttattcggttatttccatatcctattcaaattatatttatataatat

SEQ ID NO: 88168 - DNA, 1644 bp, Cannabis sativa
attgttaaagaactcaatcattttattttctaatcctactagacacattttaagcaatgcatcttttgaaggacataaaaggcaaccacctttggattttatatatagcagccatgactgttgcatagactactcaaatcacatctcatttattttgtccattatttgattcttgggcagatctcttgctgcttgtgaattactgtacaatgctggatatacaaaccttttctgggttcaagggggtctagaggctgccgaagatgaggtacttgtttcatttaaatttgaaataaacttttaatgtactctcattttttaactaaatatgaactatggtgcaggatcttgtcatagaaggaccacagccacttaaatttgctggtattggtgggatgtcggaattccttgggtaattacgtttatttttttgtttttttttttaaatacatgaagaagaaagaaggcacatacaatggtacatttttttgtaaagaatttattaaattttttttaattattatccaaagatcttgtacttttccaagtaaaataaaaaaggatagtgtttcacatgatcgagttttatcagcaatgaaattacattaattctgttaatttcagttggactgatcaacaaagagttgtagctgccaaagcaggttggggttaccgactattattctccgctcgtctggtaattctgttttatggtacaaattaacctttaaaacatatagttttagaccttttctaaagactagtgtctttgtttattcttttgacacaggttggagtctttctaattgctgatgccttgttcattggtgctcagagattaggtatctacatccaggatataagatcacattgatgcattttacatttaggaaaaacattgtgcagtagcagatgacaagaatcacaattttctgagtgtcacaagtcaattttggtcagtaggattattgtctcaaagtcaaagatgttttagtgtatattcttcagtgttaacttttcctgccaagatttctaccacgtgctgttcagaatagtatttggtcaacgtagatgtctcctgtaagttgtaacaagtaaagtatttctttaaattacattatttactagagagttttacatgtattgtttcctcatttttatactccatttaaggctcgcttggtaggccgtggaagggtcgtatttaaataataaataacaccatgtttggatataataatgtattgtattaattattacgaccaaaaaatttaatacaatgtaagctgtattatttaatacataacaaatggttcgtattagcttgtattactaatatttacaaaagatttagagtcaactctaatctccaacctgaactaggacccatgattgggacccttggactcggacccagatccaagacccaaacccggatccaggactcgaacctggacccagacctgaacctggacctaaacttgggacctgaacccagacttgaacatggacccggacctggacgtgcacctgggaccccggacccggacccgcacccaaacctgcactcgcacccggacacggaccccagacccggattcggacttagaccgggattgagacccggacccgagactcggaccc

SEQ ID NO: 88169 - DNA, 610 bp, Cannabis sativa
gtttaaagttttaaaattataaaatattgtgttctaataaaataaaaaacaattcaaaaataactaaaaaataactctaaaacaattgaacaaacaacatgaaaataactataaaacaacaaacatataactacaaagcaacaaaaaaataacaaaatattgacctaattgtaataagcaagataatattaactcatcaatatatttttgtattaggaatttttttatttagttttgacaacttgatttatctttttgtattattaaattatttttttaatgacatttgtttttataactttattctttcaacttttttttttctcttttcttttttgagttagtaatagttaaaaaataaaaataagctgaaaaacaattaaaaacaacataaaaataacaatacaaatacacatatatataataaaagcattgtttagaacaaattaaaaaatatatacgataaaaaatacacataaactaaacaataacggtataaaaataagggattttttcaaaactatacataaattataaaataattacaaaaataccttaataaatctcatttacaataataccttgtcacatcattaaaatttgccttaat

SEQ ID NO: 88170 - DNA, 1078 bp, Cannabis sativa
ctaccaaaaaatttggtagcaaaaaaagtattagctaccaaatatagattatttactaccaattttttggtagctagaacttatatttcttgtagttggctcaattgttggctgagtaaggagataagctgctgacattaggaagaaagatcaactggagtggtactgttagtgttttctggtttggaactggcagtagctatgttggcactagccttgtctttttcagacttctttttgtcaccataacttggtggtaatccatggagaaaatagcatttgtccacataatgtcctggtttaccataattagtgtaggagggcctcggtttctttgatttaggattagtagtggaagaagatgggccaactgaggatgcaagagaggaaaaatctgaagaaccaagggtcctttgtctctcttcttgaacaatcatagagaagacccgagagagattaggaattggttcattaagaaggatttgggctcttaccgaggcataagattcattgaggtcagttagaaattgcaagacttgattttaattataataatcaagaaacaatttcatggcaccacaagaacaagtagcattgggttttaaattcttttagctcatcccaaatcgatttgagctttgtgaagtaggaggtgacagattgatcaccttgttgcaaacaggtcagttgtgtttgtaactgaaagatttgaggtccattaccttcattgaatctttcttgaagatcatgccacatatatgtagcaagatcaaaatacatgatgctctgtgctatttcagaagagacagagtttatgagccaagacatcaccatgatattacaacgattccaagagttaaggagaggattaccagatgcaggtcgaggaagggtgccatctatgaatgcagatttattctttgctgtcaacgccattgttatgcctcttttccaggactgaaagtttgtgccattgaggatggtggaaacaagaatgaggcctggatggtcggctgaactgagaaagaacaggctggagatgtcttcatgagccagtcgatcaagaagagaccttcga

SEQ ID NO: 88171 - DNA, 611 bp, Cannabis sativa
tgacaaataatcgagaacacaaagataacatgtcaagaatagttagaaatgtaaaatcatttgccattttagacaaacaattgagaacctattgaaaagccttcgagaaaggtcctccctgaccttgggatattcgcattgagaaccttttgagaacgtatcgataacctatcgagaaaggttttccctgatgttaagacattcgtgtcgagaacctatcaagaacctgtcgagaaagattatccctaactttgagacaattttgtcgagatcccatcgagaacgtattaagaatccatcgagaaaaatactaacacagagaatactccaaactacgatatccgatttcagcaaaatttatatcaaaaccaagaaaaattaactacatagatctaacgaaaatatactatacatggggcaaaggatgtttacaaaacactttcaaacaaatgttttacaaaatacttacccattaatccacaatgagagagggaggttggatggatgtcctttacggcagttcgtcgagtatcccaacggcagtttgggcggttgtaggtttttttttttgtaaagtggttctcggctgatagggagagagagagagagag

SEQ ID NO: 88172 - DNA, 885 bp, Cannabis sativa
caaccctgcattcttcacttggctgagatttgaccaatttctaatgcattggttaatgaattctgtcaccgaggcaatgctgggacatgtaatcaacgctcaaaactcagctgagatttggaccatttttgaacaattgtttgctactagatcgagagctagattgcttcagatcagaggcttgttgcagtccaccaagaaaggctccttatccatagatgactacatcttgaaaatgaagcaattcagtgattctctatctgctgctggtcattccctgtccgaagatgatctaatcctatacattcttggaggattaggagctgaatatgaagctgtcgttgtcaatcttacctcaagatctgaaaacctaactctccaagaagtccaatttatgcttcaaaatcaagaaatgagaataaaccagcaaacctctgaatcactcaccaatgttcaagccaatcttgctaatatgtctctgaacaacaacaaccgaggaactaacagctatgggggtcgtggttatcgtggttctagtagaggtggaagaacaaacaacaacaattatggtggtagaggtagaggatcaaataaaccaatatgtcagctttgtggcagaacaggtcacacggttgtgaagtgttaccataggttcgatatcaactttacaggaccaccagtggaaaatccaacttcacattccaccaccccaactgataatccccaagctcatcttccacaaaccaccaaaagtcaagatctgtccactgcatggtacattgacagtggagccactcaccacatgacaaacaactctgaaaatctcacctcctctgctgattacaagggcaaagccaaggtcattgttggtaatggttctagtct

SEQ ID NO: 88173 - DNA, 731 bp, Cannabis sativa
tttttgttggatagtttgggaaaaattaagcaattcactttttttttacagaacttaatttcgatttaattgaattagttgtgattttttgaagctttgaataaaaggatagggtggtgtcaccccatacccgtgcggatccgagtgatcactcggtcacgcgcacctcagacacgaggttgtttgagatttctcggtctgaagcctcagttttgtctgaaaccttggctccacgcgtggacaaggctgctcgcagcctctcttgccgaggtttctcggccgtgcaccctgcttagcgctcgcggatggtatgcaataccatcagtaccatttacaattttttttcaattttcttcatgttttatgctttttcatagaattaatttcggattttttttgtgtaattttgtatttagatttttgtttttcatatttcaaatctcattattagaattaaattaattagtatttttaaattagtttaagatattagtgatgtttgaagcttaaaaataggtaaaaaatctaattttcggcttaattaattatcttatttttaaaatttgattatttgatcttattttttaaatttatggtcagatatttattttttattttttatataaattgatcttatttgatttttttaaaataagattattttaatcatgaatttttaaattgaaataggatattatgctaactttaaattttgttattttttattttaa

SEQ ID NO: 88174 - DNA, 1227 bp, Cannabis sativa
gatcataacatcaacaaataaagactacataaatataaaaactgataatcattacttaaataataatgaccaactttatttattttagacatttccatgtaatcacttactacataaacgttagtttttatcttatatattaatgtagtttatgctataataatatcaaatggaaaaaataattaggtaatgacatggtaggtgctacaaactatcttctcctattcttgccttgctttcctaatttttttctatttttatagtttttttctatttattttttattataatataatttatagtaatagtaatatttgtctattatttaaaacaaaccctaaccattctcattctcttatattttttgtctgttggtgtctcttccatgtggcaagacaaactatatattaaagaaaggcaccagtcggatcgagaccatccaaccaatcaaaccaatctccccatctgtacattggccgatgaagctcgacgaagttctggcatgggcaaaggttctgataacaatcaccctttctgcctccatgtttcttctcccatttaagtacgtacgcttaacttatttctttgtttatctcttcttatttattgtttttgtctttctttctattatgttggattgtgtctcaatttcaaaaaattgagaacaactcagtctataattagttattatcatttatgtgatgattaatctcaaattaattagtttctatttcttttttcatgttttttttctcttattatctaacattatgttatggaactgatggatgagaaaattaagtttcacagtttttgcaactgattgtgctatggactttggatggtcagatttagggagtttgttgtacagaaagcttatatttcaacaaactaattctcgatgacccagattgattacactgacataaaggtgggttttgtttagactctgtgagtctgtaatgatacttccaagccacttttagattgcacttaataggaagcttgtgttctatatagatagtcggcatcaataagcctcatataatccaatagtcttcataataaaatgtattgtgataaatttataagtatatatatatatatgatcatatattttatttataagtcctctaattaaaacatcaacttattaataagaatgtttttaattatttttttatcatttattccttcaagaaaaagaaaaataagagtatattaatg

SEQ ID NO: 88175 - DNA, 882 bp, Cannabis sativa
gtcctgagagctaaaattacatgaacttgcaacctggaagccaacctagacacctagagtttcacccagtgcctaagttgactatcaactagacataccatggacatatttgaggcatcaaaatcaaattcagagtaagttcatttttgagcacccagagtacttggtgcccgggcacccaacacccaagttaacaatttatcaatctgagtgtcttccatgtattaaatctttgattcaacttttgtattttctttgtcttcatcaaaaatggggaaatagggtacttttggagaagaaacaacacattctatgtgccgaaagcaaggcccaacgcccaagttgacacttggggctggcccagcgcccaggttgacattttatcaacatgggccaatgttgatgatgtctttcaagaaatcttctgagcatattcttcattttcaaaaaagattaagattcaactatttgttaggaccaaacatagtttttgaagggctataattgggacccagcgcccatattgacatattgtcaacctgagttgtttctaatcaagttcacgtaaaagtgttccctacatttttttctatcattagaaataatgaagatttaagcaaactcggggagaaaaccacaaacctaagcccctgaaaatagggcccagcgcccaggttgacttggtgttgggcctagtgcccaagttcgcaacaaacctagtgtgctacttttaattgcttaaatgtcaaatataattcgactaatgaatccagaatggtcaaaaacatagtaggagaccttgtccttaagttcaagaaccttggaagtatcaaaataagatctaggagctcatgaataagtacccagcgcctaggttgacaa

SEQ ID NO: 88176 - DNA, 1048 bp, Cannabis sativa
  modified_base (72)..(72): a, c, t, g, unknown or other
tgcttgtctaatttagtaagtttgttgttggtagattgtagtaattgcagcttcttgccgtcgttgggacanctgccttctctcaaagatctttggattagaggattgaagggtgtggtgagaatagattcagagttttattgttcttcttcttctgttgcaataccaacaaagcccttattctttacatctttggagaccttgaaatttgataatttggagaagtttgaagagtggtcatttatcgaaggtggagtttttcctcgtcttaagaatcttcaattaagggggtgtgagagactcaaagtgacattgttagcagattatttcccgtcattgacagatcttgaaatagttaattgtgaggaactaatacttccaagagctcaactcatgcaggcccctttgatcactttaaagaagattgaatttagttattgtgccaacttgaggcacttagacgaggaggcctttcagcacctcacctcccttgaggagttgatcattgatgattgtcctaacctcgaatgtttgccaaaagaactacccacttctctttctgatctgcatatcacttattgtccattgctaacaccacgagtgaagagggagacaggggaggactggccaattattgctcacatcccaaatatcactcttgatcggaagaaaatataaggtatgatagtttgactcttttcttttttttttttgggttatatattttgtgatgtgtaactttatttatgtgtatgtattgtgtatagcagatttattggaagaagctatctcctatacttgttttgctcattttaattatttacttatattttgctaaaaataaataaataataataataatataatggttgtgagatgtttgacacaatcaatttatgtttttattgacaaattttgaaaacacaagaaaatgagagtagacttgataaaatctgctaggtttctttctaccctatttgagacaatcaatttttctgttttcattgaaatatttaaaatacagttgctcattctgtttcttttcaat

SEQ ID NO: 88177 - DNA, 1108 bp, Cannabis sativa
tataagaataaaaataaatttgggaaagagtatgaaaagctcacaaaaacagaggaagattattcaaaatgttagtaagtttggtaggtacattgttataaataccaatttttgaatgcttaatacgactaaaataaaactcgaactaagtataccaatttctctttcagaatgttcacagcaagcatggataagattttgacatataccaaaagaagaaaaacatagcagttgtactaccaattaccaaactgattgtcaaatttacataacaaactactaactacccgggactcgattactcaaaagggaagctcaaatggtaaggcatgtggtttgcctttacattacaactactaactacccgggactcaattacccaaaagaggtagctgaaatgaaatggttaggcacatggtttgctcccacaaggtctgaagttcgagtactcgaactttcctggttcccaaatattgtatgattaggcggggatcctagttttaaaaagaaaaaactacctggaactcaattagaacatgaaaattaaacaaagcttatttgcaaaggctgacaattcatgttatcatcgtagttatcaacacaattattccacttattgaaatcttaacaacaaacacgatacaattactaaacatgttgaaatctcaaacacgaacacaacacgattatttgcatttttagtaggtttatacaacacgattaaacatgtcaaaaagtgaaacatgaacactactcgacttgattattaaacgtgttacccaaacttagttattgtcaaaaattcacatccctatcaaataatcagatatattgtggtaagaagaatcttaagccacctaactttcactgtatgaataatcaaccaaacattataacataaagcaaaagaacagtagattttgtaaaaactagtcaatattttaacaaaaatcatccataacaacaacgaacaaatgagcattagaatcaaaaagtcagatagtaaagcagtaaagaacaagaacatacacaaaggccaaatgaaaaacatcagatcagataagagattatatatatatgaaatgaaaaggtcgatgggaatgaaatg

SEQ ID NO: 88178 - DNA, 806 bp, Cannabis sativa
ctggtacaaaatttctttccgaaaaatttggctggtttttggattttaaaactttcctatctgtcctgtgcatgttcaaatgtacttaacagtactgaataagttaatttggttggcacaaactgagtactgtatatttttagatattattaaatgagtaaggtcttataattagatattattgcttgtggttgaaacttgattatatgtacaacaaaatgaaatggaaatcatatgatggcatgtgaaaatttttattttgatgtttcaattactgcaaccaacatgctgtttcaggagatggctcattttatggagaagttacttagtactttttaattcacatgccacagtaatttatggtttcagttcagaattaattgtttcttgactacttctgctagcattttcttacttaaaagacaatttaagtaccttgaattcacaatgcaaaattatgctgtcctctgtacaattctcatgtgaatttgttcaaatcaattttgcattcttcttatgtgccaagtgccaacatcttttctaacagggaaactcgagaagaaatggttttagctgacatgtgtctcaaacctggtgaaccatgggaatattgcccaagagaagccttgcgacgggtttcaaaaattctaaaagaagaatttaactttgtatgtcttatagtctagcttagatacgaaagcacttagatttcttgttttattttttaatatcttgaatggaatatttccaggtaatgaatgcaggatttgagaatgagttttttttgttgaagagtgtactgaggt

SEQ ID NO: 88179 - DNA, 506 bp, Cannabis sativa
ttattattattgttatttaaattaagggtatccgattcaatctaacatctttttttttcttcatctaatctaatccaattactaattagattagattatttttaataagatatccaattaggcacttaatttttaatattaacattaataatatgataaaaaaaaataagctaaaaactaaatatcatcattcattaaaatttaatactccataaaaatatcattgttacaagtccaatataactaaaagtttaaaataagtaaaacaataactttattaagtaataaaatagaacaaactatcatgaaaataaatatacaaaacaactaaatattgcaaattcaatacaaaataaaattaactaaaaatataattatatatatttttaattatacataaataaatataaatatttttttaatatacataaatataattagatgagatcagtttttaattagattttgaaaataacatctactaagtgatccaatccaattaaaat

SEQ ID NO: 88180 - DNA, 658 bp, Cannabis sativa
ttcaaaagtttagggggtaaaaatcttaattaagcatttgtaattaatggtaatgtcagatgtattattgattgtaatgaaaaatagaacctatgcttaataaattatatgctccattgatttgttatctaaattaacttatctccatatgatttaatgattatctaagctaaataaattgtatgcttcgtagacttattgcttgcctaaaatagtgaattataataggaagattaaaaaaattgactatttaagtattttttgtggtattttatagtttaattgagaaaatagattaatttttaggggaattattttgtatactatcttttattattatttttgtttttcaaatttatagtttgagttgctctagtagtttctatgtgtgttgctatgtagattttgattacaatttagattgctccgttaattgctatatgagttgttatgtgaattttcgtaaaaaaacaaaaaaaagtataaaaataaaaaaattctctattttttttttattattatggattttaaaggattactcagggtgaaaattaactattaactatttttttttcttaactcttaactatttcctaatattttaataaaatctttcttgccttttctttttatgttatttaatcttaaacctaaaaat

SEQ ID NO: 88181 - DNA, 1646 bp, Cannabis sativa
tcgggttcaacctggtacccttcgagcgggttcgcatgttgagtttttaggggcaccgggtttcgggttgaacccgccaacccgcaatttaaatatattatacatatttttattttttactacagtttatatatatattgatttattaattaaaaaataaaaaaaaaaacctaaaatattgttacatttcagcattcattgaacaccacaaaaacaaatagctatactctgttgaagtgggcaaattactggttattaaaatggggatggagcttcctcttcattttgaatttcaaaagcttccacaggtgatattaataatttgagaagttgttagcaatcgaaggcttgaagagttgaaggaatctaatatgtttaatctttgttctaagttcttccactatgtggcagctgggactcatattacccatcatactcagtatctcaatttgttgcatgccttaaacaattatcttattatgtgtgttctcacttctgtaattattgatggaaatttttcgatccttaaacaatttgttgcatgccttaaacaatgaagttgtggacattacatttaccaataaaccaacgatgcctctttgaacacagcggaagaacccgccaacccggtcaacccggccaaccaaaactcgccaacctgtgacccaccaacctgccaacccgtgccctactcggttccgagttcagtttcatttttttgaactcgaaacctattaacctaaaattcgcgaacccaaaactcgataaacccacccgatgttcagccctacccgcgtctggtgggatattgtgggacagactcgtgatgttagtgtgagacttgggaagagttcaagagtctatttgaggaaaaattctataacatcgctgcgaggacttcacatatggaggattttgtgaaactaactcaggggaaaatgtctgtggccgaatacactctgaagtttgatctgttgtccaagtgtgctggtgatttggtgcctacagatttcaccaggaatcaaaaatatgtgagaggactgaatgccacaatcaatcgagacttgaaaattacctttactcatgaaactttgtacaagaaagtggtagagcgagccttaattattgaggcggctgagcaacatgtaataaaagaacagacagcaaaggatgtcaccatagcattgaaccatcctgctagtggtaatgtttgtaaggggaccgacggtggtaaccctcatcacaaacggaaggctgatgcttctggaacatcaggggtaatagagaagttttggggaaacataggtggttgtaagggccgcgggtcttcattctgatcctatcttgagtgtcccaaatgcaagaaacacaatcagggtgaatgtagggccaagatttgtttctagtgtggcatggtgggccacttcattagatattgtcctcaggcaaagaaggaggagcctaagaacaatactactcagaacccgagacgactttttactatgactcaagctgatactgatgccagtccgtcagtggtgataagtcagttatctataaatggctgttcctatactgtatcgtttgactcgggagctactcattcttatgtgtcgagtagagtaattgaatgtttccataaacca

SEQ ID NO: 88182 - DNA, 1860 bp, Cannabis sativa
ttttctgatttgtgtatataagcatggaatataagtggtttgtttaacactaatcaaatctctctactttagtttgatcaagtaaataaataattttttttcttcttttcaaaaaaaaatcatcaaatgaatacacaagattatgttcaaataaaacaagacttgctttctgtattaatctgtagcatcaacaagcttcaactttgaaatatttcatttatttgtatccctcattgatgatcaaaagtgacattgaaatatgttgttatgtagacttaagttttggttatgaaatttttgtttctatgtatatattccaatttcatcctgctaaattttctagaatattcaactaatcttctgtaattgagtatcaaaatctactatcattattttcctcttgataatttcgttttatgaatgtgatgaatttgagtgacttactttttcttttgagattatagattctatgtattaataacattcaatactttgtctttaaggtagtgttttagttttatgagttctgaaagttctagtaatttcgaaagctaagtaaatgatttaagtatgaatttagataaattaaagctagaaagataattaaatcaatgaacatcaaatttataaacgtcttttgtattggaaacacattctaatcgagtagtgtttgggtctccaagaatcgggtaaagtaacatctactataaaatcatttcaattacattgaccagttctgatttacaaatccaacaacataatctaaaatgattttacacaagatttacctaactcttgaatacaatcaagaacacgatctaatcacacttagatcgaagaagacaagctccacttgcttccgccaagctaaaatccctctagcagatcagtctgaactcacttcagacattgcagatctatactctttcttcaacctccgaagatccaatgaactacgatctgccagtcacaatcaaagaaacactagcagagcaagaatcactagaatattctatcaaaaaaaaaagagctagttagaaaaagttatatcagcttaatatataccatacttcgataaaatcgactcaagtaactaactcaacagctcaagccaactggcgccaactaaactaattaaaagacatacattaaaaagctgacctagcagatgataaaagtaactagactaagtagatgcgactaagaccaacttagatgaacaactcaataagccaagacagcaactagaacacaatatacttaaactagaacaagcaacataattttccatatagaaaacatggcacttataatctctcccttggtaattatgatcaacgaccaagcaccatatttagaatgagagacacaaaagaacaaatcacataaacaaatgccaacaatccaaaagataacattaagatagtttatcaactgacaacgttaagttcaacagagagaggaaaaaataaccagacaaaagctaaacccaaaatatgaacaatgtttagtgtatatgtacaaaagatgaaacactatatctctccctcgatgatcataattactcactgttggaattggcgacaagagatgcaaagggaacatgcactaaagtagcatcatcattaggaacagagaaaagaacattagtggaatgcttcccctggacaccagcagttgttgaacccttctgaacatttgtatgaccctgctccccctggacatcaacataatctggctccccctggacagtagcacaaccagaaaggccttcatcaatactagggttgtacatatatttttgtaaactgcccaaatcaaaacgaaaaaaccgacaaaaaattgaaaaatttgacgaaa

SEQ ID NO: 88183 - DNA, 740 bp, Cannabis sativa
cctaatgttgctaataaccataacaggatggttaacaacttaattatgtgttagaggcacatgtgagcaccattaatactatagttggcccattaaattataggttaccataaaagaccccataagcccaattggttaataaccccttagggttataagggcagtaacatgtgtggtaaaggggtgagatggttttttgtggtgaaaggcaaaagggttgctccacaagtgttctctccaaaacttttgctcaaggatcttggtggtgatgactctcatggatggaatgtgaggtatgtgttttattatttttgatgctctaaataaatactagatcttggctttaatgattatgagtaatcatttttaacaattggtcaagagccaaagttattgattttagggctcaaaattttttcacaaaactttttttttttcaaatctaaaatttgtagtgtttttttcggattaatgtgtttaaggttgtgtgaatatgagtattatcctctaaatgtgttcatatatgtcatggaaacaatcttttacattttccattgagaaatatatgagttttaacaatggagaaacgcattttggattcatcatttttatgatgtattattctttgtttgttgagtaaatgagtattggaaaatgatagaagattaaaaatgggacaacatgccttaaacagcatcgactttggtggccggatgtgggagatatggccgggtcacgaa

SEQ ID NO: 88184 - DNA, 817 bp, Cannabis sativa
aaagccaagaagaaacagaggaggcgattgacacaactttctccccaggatctaatgatgataagccgattaagagaaagaggggaaggccaaaaaaatacgagcagaccagtcccagttcagccttgattgcaagcaaacgaggaagaccatcaaagtccaaagaacccaccggagttatttcacaaagtttgaagaagaaaggggccaaatcttcatctagaggcaaggaaaaacactaccgtaatctgtggaatgcgaaatgtatcgacttagctattgacttagataatcattttgttcttattgagaaaaaggtggtggacaaaccaaactgtagaattgaagaattgggggacaatggtgcacaatcttcgcacactgaggtgcctactgggaacggaagctataagaataaaggccaggtttttcattttggggctacggagacttgcccgaaaaagtctccaacacccccatgaagcttcttgcttggaattgtcgcgggctcgggaatgccgcggcagttcgacaattgacggcagtggtacgccggtcaaatcccgacattctaatactctccgaaacaaggttggtattagaaaaattccaacatctaatgaacaaactgcattttactgagatttcgtatgtttcaccaattggcctatcggggggatttggagtttgctggaaacagggggtgctatgtaaaattatggaagcagacaagaatgtgttgattggtacgattgagtccgaccctccggggattagctggaattttatgggtatttatggtcccccatctatgaca

SEQ ID NO: 88185 - DNA, 890 bp, Cannabis sativa
  modified_base (34)..(44): a, c, t, g, unknown or other
  modified_base (436)..(441): a, c, t, g, unknown or other
aatcatcttctttgagaaactttaacgagtgaannnnnnnnnnnaataacatgaacatgagttcatgattactcagaatttaggccgatctactatagatcatcgttatgaaatgaattagctatttatgataaatgtcatgttaataaagatagatttattcatattggtttttgtcatatataatctctattatatacaacactttcacttaaatgtcttactacatcaataatctgaactaaggttacttgcaccgtagaacagacattactctaccgtacaacaaccactgattaaagactctaaaactttaatatgttgctgactattttattcatagctaagtggtcttagttctctatacatctacaagccacaatctcatatatgaataaggaattttctgatatttaatataaattattcaataatnnnnnntaataatttaacattcaagcatatatcaaaatgtttaactcttcatcaataatgaaaaatgtctttatagaatttttaggacataaacccccaacaccttcttctccagtgacaggtgctgggggtctccccttgaggtgatgagatgagtgttgtctaggtgtatctccacaccttgaagacgacaaaagagtctaggcaatttgagatgattgtatgtaaggaagcaacttagtctgagcttgtcgttcccatagacgacaccaaactattgacactgaaaactcattaattaacttaaggtcaaaaaatcaaaactcaaacactagagttagaatgaagatgaaaatataaaaattcaaaaacttaaggaaatgtttagagcaataatggaggaagacaaatacttgtgtttctatgcatgaagtgttacaatgattttctaaccc

SEQ ID NO: 88186 - DNA, 982 bp, Cannabis sativa
aactagatgttaatttacgtgcatcagtacaaacagtgaaatctaaatttaagtagccaactacttttagattatcggttcgtttgaacatgagtttgtaatccttagtaccctgaaggtacctcataaccttctttgcaactttccactgttctattctcgggctactctaaaattttctcaacactttgacataataagcaatgtcaggtcttgtgcacacctgagcatataataggctaccaacaacagatttataaggaatgttcttcatttattctcctttaaaatccttctacactagcttaaattcaaattatcacccttagcaatggaagcaatgctcagtgaacaatctttcatctgaaacctttctatgactttatttatgtaggcttcttgagataaacctaagataccttggtatctatctttatgaatcttaatgcctatgacataggatacttcacccatgtctttcatctcaaagttctttaaaagaaattgtgttacttcatgtagcaactccttatcactagatgcaagaagaatatcatgaacatataaaataagaaagaaaattttactcccattatccattgatccatgacattatctttaaatccagaggaagaaaggacataattatattttagataccgttggcgagatagtttttttaatccatagatgaatttcttaagcttgcataccaaatgctcaccctcactagaggagaatcattctggttgtttcatgtatacctcctcctctagatgaccattcaggaaaacaatttttacatccatctattccaactctaaatcaaaatgagcaactaattccaggatgactctaagagaatttttctttgataatggagaaaagttctctgcatagtcaattccttcttcttgactaaatcctttagcatcaagtctttttatgtatctccgagtgtttcctaatgagtcccttttag

SEQ ID NO: 88187 - DNA, 1727 bp, Cannabis sativa
catcatcatcatcatcatcagcatcatcatcatcattttcttcttcttcttcattggcagcaacatcaacatcatcgacaacatcatcattatcatacccagaaggaaataaggtagggagttgaataatgcaggtatgatctccagtattattattattcccttgaagcatagaataaggtttatatagtgttaccgtccaatctttatttacagtaatcacctaaccttttgaagagctacaaaatcttttatcatacggcataacaatttttgactctaaaattttattattggtaatattataaatattccatgtagaattagtagtagaatcgctttcagaaggagttagaaatattggaacttgatgatatcaatattagttatgtaatgtttcggttcattaaacttgattatctctcattaaagaaggccattctgaacaaacagttccaaatagcaaataatcagtagaagactccattctctctaaaattaacagtaagatatatcttcgtgtgtttgtccaatctacaaacttaagtcattggtttttaccaactaaatctaatagcctttatttagcacttattaatttcttgattaataatgcacttattaatttcttgattagtaatgcaataataaatgaatgagaaagaattggtgaaaataatgcttacttataattaaaaatgagaaatctaatcctattccaattcattttattattattattatttatttattttgaacagaatcctacttcaattctaattctataaagtttataaatttgaaataaaatatttaaaataatatctatatgataaaaaaatagaaataactaaaattatatgtatgtatattaaaataaaatatatatttaatatttgtattggtgggaaggattaataatttgtttggatatttttattttaggattttgatgattgaagcagaggatgtggatgtgttggataagaatttgggttccaatattagaatgaaaacacatttgcagtgaatttctcaaaattccaattgatttaatgtgagacgataaatggatgaaggagggttctcggcaatgaattggtctccgagacattctcaatgagtttggttaattgatttttcaagtttagattacacttgttttcatctgatcgagaatgttgcaggcaaagctacagtttttgaggatggaattgtggttcgtcttcaaacccaaatgtgttgctgttgaaggtaaaaatcaaaaggataattgctcacactccattgatcatatgcaaatgtttttattgaaaaagaagtttaaccaagagcgtcgaagcttataattatacatataagtaagaatagataatggtgatcccactcccacatattcatacacaaggccgaacttctatgtatcactgcaatagtcttaaaaccattcctgcatgtatatatcattgataacaaattagttcatgcacaaaattatgcatgtcaacatagttgctaaacaaaaaatgaccaactgatagaaccataccaaaaaatgcacattctatctataaagaaaatattgaaagaaaagaccgattgattaactcttatttgtaaaatttagagcaaagaaacaataagaggctgtttggctttacagtttaaaaactattaggagtcgtttggcaaaaatttttaaaaactgttttttaaaaattgagttt

SEQ ID NO: 88188 - DNA, 580 bp, Cannabis sativa
cactatagatttggaattgaattgcactctcaattatatagaacgctctatatgtaccatgatatagatatgttatgattattcattgttacaatcctatattacgggagtgaaaatcttttcccactcgtgtattgtattgcacgtcactatagttactttattttttttaaataatataaaatatctaacttgatttagtgacccgcattgtgggttaaaattataaaaattatactgtctaataaagcgcgtcactaaaagtttctaaaaatgtttagtgacgtgcacattctgtgccggtcactaaagagtatcactaagttgtcaaattgtagtagtgggaagactattttaagacatgatctagtccaagcattgaaggctcaccaagcctattcactgggttaccactggcgtcgtaatgacccaaaggatagtttggcaggacataacaagtcttaaacctcctcctcatcgctggtacaaccttctcaaagtcaaactcgacactgggactctcagccccatgttcaatctctggatcgacatcaacatggggttgagcaacctcctctac

SEQ ID NO: 88189 - DNA, 646 bp, Cannabis sativa
tgtcaactcaaaaatatgtgacgacatatttttttagcttatttaatacataatctaataatatgttaccacgtgtttttgagttgacacttaatgcccaaaaaagatacgattgcaacaaaatcgtaagctaaagtatttttgttgctctttttttttttattagagtcatatgtgtaattgtcataaatattaagagggttgcgccgcaaatatcccataatagtattaataacgtaggttaattattacattttgttttcaaaatacccttctcttaacttaacatcacttcttttctattctctctatattctcccaacagctccaccatatctcccattctttcattttctttactaaatatgactaaaattttacacaaaagtgatcatttttgttgcaccaaagcacgaattggaggtgggacgaggtagacgctaagctaaatggaaccacgggaaccaatgggtaattggtatttttttgtttcattttgttgttggttgttatgtttgttttagaatgttgttttgatgttcgatctgttgattgctattttttgtgtaaaaatagttgttcttcaatttttttgctttatactggttcctagtttttttcccttagtccgatctctcccattctc

SEQ ID NO: 88190 - DNA, 651 bp, Cannabis sativa
tggtggaagacttctaattctaaaagataaaagcattcattagatgtcttgggaaaggttgagcaagcataaaagcgtcgggggtatgggttttcgtaatctccgccatcacaatttgtctctccttggcaagcaaggttgccgttttctcactcgccccgattcgctagcttcaagaatcttcaaggctagatatttccctcgaggcacttatctcacggctcagctgggtaaaccgagttttgtttggcgtagcatctgggaggctcaaagtgtggtgaacaatggagtgcattggaaaattggcgatggcgaatcggtatctgttctaggtgaccgatggttaccatatgatgttaatccttgtgtaacttcttctcatcctgcccttaatgatattatggttgaaaatttgtttaaagttgatggtgttggctgggacttggagatagtgaatgatcttttcaatgttagagacaaagcattgatttgcagcatcccgattcaagctaatggagagccggattccttctactggtttcttgaatgttcaggtgattacactgtaaagagtgctttcaatttgttgcagaaattgaatggctcttggaatcatgtggatttttcgggtttttggaataatctatggag

SEQ ID NO: 88191 - DNA, 591 bp, Cannabis sativa
ttaaaaatttaaaactttttaaaaaatttaggccaaacgactcctattagtttttaaaaactattttgtgtttttaaaattttatgaagctaaacaactcatattatttcgtgcttttgaagtcacaaataaaattaatatatattatatatttatattaattcgttattttttttcagttaatcaaaaaaaaaggagaaaaaaatcattgtgtttttctttgcaaaataataataaataaaaaatctttgcaagaaagtcattgtctgattctcaaggggcccattcatatgaatttcctcaaataacattctgtatcaaacaaagtttgacccatatttaacttaattaattagttttgaatgaagttgaaatgaaaacaaaaaaaaaataatgtttaggtaaaagttattatgagttaaatgacacaattacacaaacaaatatataaatgataattataattattaatcatgtccatgaaagaaagtcattggaaatatcaaaggagttgtggctgaaatttcctaattaaaaattagttgcattacaaatatgtttgtgtagatatttgtaaatttttttagaaaa

SEQ ID NO: 88192 - DNA, 613 bp, Cannabis sativa
actaaagacaaaaaatgggagaccgagaaaataaacaaggcaaaaatagacaatacaatacatattttgttatgaaaaataacatgtacgagtcgatttgaagaattttcttacctgtatggaatctgcaaagcataacaaaatcttgatttttcatacaggttggcatagactgagaggtcttcttcagtgaaccaagatggtggtagaggagtagatgaatcaaaccaaagttcgaccctgagaagccaagtcgcctcagtccacctgccccaaatcaccggagcatggccatctagcctaagcaggagctccacgggaaggaatcaatgtggtgctacgctgagaagaggaaagattgcagctttgttgtgggcaaaaacacgtcgaactgagaggagagattggggcttcgattgagagaaagagggaaagggtgttgttggtcgtcggagaagaggagcagtagctccgattgagagaaagaagggagaggcagaggcttcgatttagagaaggagagagaggcatcgactgagcgaaagagagagaggcttcgattgagagagaaagagagagagagtgagggggcacaatagtagggttttctttt

SEQ ID NO: 88193 - DNA, 612 bp, Cannabis sativa
tatgctgttttttgatgtttttttcaggtggaacttcagtattttattgagttaggaacgttgtttgaagatgttatagctttattatctaaattttcaggggcatttttgtcccatggggctcgctctaagattttagcgacccatgattggcaaagcatgttctgcggttagacgataagctatgctggttcgaggaggttccagcgccggtggcggacgtgggcgtcgtaaattcatgagtgattttaatcactttgtcaaaaaaaaaatctattacctttttaaatttaaggctaggatttttgtcccttaaattttaacatgtatcaaattatgttccttaaattttaacatgtaccaaattatttctctgaactattgggattgttagatttaaggacttttgtcaaatttcattcaattttactatttcagtgattgtctatgtactaaaccatgctccctagattttgatatctaccaaatcatgtcccttaaactttgatgtgtactatatcatgcccctgaactttcatctatgttagatttttttttaataaaattagacaaaagtccttaaatccaacaatctcaaagatcggaagagcg

SEQ ID NO: 88194 - DNA, 530 bp, Cannabis sativa
attgaccacttttgaaacaaggtacgtatgcatctcatcagagacatattgaaactaaaatgtaaatcatacattttcattgaagaaaggttctaatccttcacattccactgccaaaggctttctgctgctgaaccttttgaggtttctaagaccacaaagctgaatgtgttgtagtttagggaaggaaatggtgtcattggaactaccttcttcttctccaccttcttttatcacaacaatctcttccatattctcacaccaccgtacattcagatttttaagttgaatgaaacttcttgccacagcagaagaaaaaagatactttaacttgtcacaatcgctaacagttaaatcttttaaattctgcatgtgagatacttcttgaagtttatctggccaaatcatctctataggattaagtttccacaattgtaattcttccaaaataggaaatgataccacctggaaaatataaagaaaaaaagataaaaataaatgatttttcaaattcaaccaactatatgttt

SEQ ID NO: 88195 - DNA, 1310 bp, Cannabis sativa
agcttttttgataagggtataatttaactcttcaccatacaagtagcataacaaaacccacacataataaagattttggagttagtattaatttgagtgtcgggtaatccttttcatgcagttttaatttttgagaagcataggcaacaaacttgtcattcccctagagagttcctcctatcttgtacttgaaacattagtggatgcaatatatggttcctcactattaagcatagggagaacaaattttgtgttcaatcttcacttcaattcatagaaatctccttcaccactctcatcccacacaactttactttattccatgtcagctttgtcaaaggcataacaatcagggaaaaattctctacataacaataatagtagcctgctgttgtcggaggaattttgacaacaccaaatataaaataaagagttgatatttaactaaaaaacaacgagtactcaacctaaaatagcgagtactcaaatgaggctgcctacacaatagaaaagtattgaaaataatgaacacaaggaagtatagtggttcagttagatcacggtctgctttgtccactattgcaagggattttctgacctcaacaaacccatcttctatggcttctttctttgacggcaacacctcaaatatctatggcttcgatacacttatcagagattctcaaagttatgctttaaatggggcttgctaacccatggtcaaagaattttctttgaatctccaactttagttaaagacagcaaaggtaattttcaccctatgtatggcgtatggctaagaagtgatgcccaagaaaaatccacattttccacacctttggccaaatgattgcaggactgggttctccaaatgcgtctgggaaaggatctcatcctctgcaatcaaatgaaaattcaaaatagcgattctgatgaactccgagaatgtcatatgcagtttttggcaaaatgaagagtcgtcatagatgatgatggtggtgccaaggatcccttgtctcgacaggttattacttaacttcctttggtttgtgtcacgggcattggagaatttgccccttttagtaataattcaaaaacgacatacacccaagacctgaaagatgctacacccattgatacagggacttcatccaataatatttccagctccaatacgtcctataagcataatgactcgtacaacaggcttacgaatccgaaggtgattgagacttatgacgggagttccttttttggtgaaacatcgaaagctagtaatttgattctaaggtgttgaccgaggttttcgg

SEQ ID NO: 88196 - DNA, 1140 bp, Cannabis sativa
attatctcttgactccttatgttccattaattcaatgtgaacagtaaatctataacttattatagatttggatctaattgttagcactcacagaattaacactttaagggaacaaatattcgatctgttaggaaagcttgaattctactattgtataacatgttcccagccactcatgttattaagctctcaaaacagaagttgtaagaaacatcttctccgagaaactttaatgagtgatatgaataactctttcatggtaaacaacacgttaataaaagatatttattacatatcggtccagtcatgcataatcaaataatacacaatacctttactacatgtatatccacatatgtgattcgaatcaaaatcacacacactgtatagtaaatcatatttaagagtttcatattaaagattcacattactttaatacactaccaacttattttattcatatcatataatcttaattcgcttgtacatccttacaagattatacattctccatatgtataagacttttttagatatttatttattatacttctataattaatgtatcatttatcttataattgtatttcatatattctataatatattatctattaattacttacttttagggcataaattctaacagaatgtaatatatgaaccaagcaacataaattaatttctgttcttttattaattagtaaataagattatattaaaataaattttatttaacacataaatctccaacataaaattcttggacaacaattctcaaattgcaacaaatatttgtgatttttttttttttctaaatgaaaattacttggtggtactctaagctgtctttgttcatttctactattctttatcttcatcactttattacttggtcataccctatgctctctttattacttggccatatcctttctctattgattagaatcttcatcctccattcttagcaataaagaactctattacatattaagttttgttttattgctctaaaaatttaggttagatttgattggaggtaatgaaatagaattaaataaaaattagtgaattagagcatgtttggtattgttttctattttttgttttaacaaattgtttttagaaatgagaaca

SEQ ID NO: 88197 - DNA, 822 bp, Cannabis sativa
cggccctgtgtattctgcatcctcattacagcagccaaacctgcttcaccattcagccaagaggcatccgaaaactctcttgcccgccaaacttctttctgtataaggttagagatcaagatatataactataatactttcttttacatgaaaattgaccagtgtagtaatctttgtttgctcatgaaatttttatttttatacagttttaaacattacaataggcaatgtggcttcccactactgagcactcaaattaaaaaacaaaaaattaaagtatgagttattataagaaatggaaaagtcatttattctattagagtactatcaacactttctctatcttatccttcaaaatattttactaattttttttttttttcaattttagctcatatttatattacatattacatcaattttttattatcaattaaattatatatttataatacacaaataataaattattgttatattatattataaaaataatttaaaataagatattattataaaaataatagaaaaattataatttggcactgaaacttaaacatctcttaactagatatagttaagtattttttttttaaaaaaacaatatttaaaattttaaaaatttgaaaaaaaataaatataaagtttaagaatattaaaattgaacatactctcaatattaaaaacaaccaataaaaaataataatattacaaataatatattaatatttttatatatatttaatttaatctaaatttagtataagtccaattaaactaaaacaaataatattaatatttatatatatttaaattaatgta

SEQ ID NO: 88198 - DNA, 555 bp, Cannabis sativa
actaattattatccaaaatacaatataaaattcataaaaaagatactaatatactaaaaaaaatacaaacatacattataaatataagataaaatactaaacgggtccccgttggggcggagagtgtgattctcgtccccgcctcgtttaacattcggggacaaaaagtaatctccgtccccgccccgttccccatttagacggggaataaccgccctattatgggcgggtccccgcaggactccatccccgtgggagaaatatgcatccctagtaaccggtaaatgaaaataacagcctaaaaaaaatggagttaattcattaaatgatgtggctttatttaattggttaaacagaaaatatgacagaagattaggacagaggatccaagtccgtatctattggacattctactttctagtagcaatgtagctgttattaaaaatttaaaagtatgaattgtaatctttaaactagccaaatgaattttaaaaagataattgataaattaatgtcggttaatgctcattgctcattgttcgggcaaatactttt

SEQ ID NO: 88199 - DNA, 802 bp, Cannabis sativa
aatggcatataacttacaagaaatggtccattagtaaccatgactatcacgtagtccactagctatctctatttcttcaaaattactacatattgcatgcatagaaaaaaaaaaaaaagtcaataattaaacttttcttgttacacgttctaggattttgagctaccaattttattgtaacatgacaacatgatcctaacatctttagacaaagttataaaggccaataatttaaataaatatcactttgttttatatataaaatagggaaatatactactttctattaccactagcaaataatcgacatgtttataagaaaattactattccacatcgagatatctaagagtaataacttatattttcggttattactctaccctccttacaaagattttgtcctcaaaatttacttaccagagaataactcaggatactattttctacatatctgactccaactcccatgtcgcttctctattagaactatcactctacaggattttgactaagggtatagtcttatttcgtaagacctttattcccttttccatcaaacgcacagggtgtgccataaagctcatgtcctgctacacgttaaagttctcgtatttaagcacatgtgtcggatcagatactactctcgtaacatagaaattttgaaaacattatgcgttcctgctaatgttggcggttgggccaaacgatgagctacttgaccaactatgtccagcatctcaaaaggacctatgaatcttgggcttagctttcctctttttccaaaatgcataatcccttc

SEQ ID NO: 88200 - DNA, 546 bp, Cannabis sativa
cgaacctgagcaaccaaatctccgtctgaacaactcgattcgcctgaggaaaactcgcaccaccaactatgccggaatcgaaccactagcttcgccgaaaaagggaatcgaaccctaactccgcttgagaagaaaatcacacctgcctgagaaggaaatgagtgaagataagagaagatggagaggtgaagatggaaatggggtttagaacaagcttagcctgaaagtggtgaagcctggagaagataaagaggtgaaaatggaaaatagttttctatatctggaaaaaaattaaaaaaaaaagttaaaaaaaggggaaaaaaaaccacataataatttaaaataaaaaaaataccaacacttacctaaaactaaaatttattcatatatatctaaacatttaataaaaatccatattataggtattttcctcttttaaaaaatgtttgattagtttgtgattcaaaaattgtgttttttaaaaatgtgttttggaaataaaaatttaaattttgtaagtgaaaatttgtttctaaatatgtgatt

SEQ ID NO: 88201 - DNA, 806 bp, Cannabis sativa
ttcaaatcagcttggtgcagctcctctagggacttcagcttggcagtcagttcttcaaccgcctccttggcctccagaagctcacgcctcgccttggtcacaccctcatccctggtcttcagagcatcgtcctttgcctttagctcctcagccttggcctttagcgcctcctagtgactccatccatctgagcctccctctattgggcctcctcccggatagctttcctctgtgccgccaagtcccttagactcttcatggcctcatccatgcccccaaactcggacatgatgtacccatggtcaattagagtctttgagaggtgaccagtctctgcagcaatctggcaaaataagaaaaatgtgtaagtacgggaggccaagcgccaaaaaacaaggcccgagaacactaatagatagacttaccgcggtcatggctgcactgatgtcctgaatctggtagattgagttcgtggaagcacaggctgcatatctcttggccgggagttgggtcagattagagacgaagtggcttatcaactctgaggcaaaagttgaaagggtaggcccgatgaagcgattgaaccagtctgtaagggggtccatgtttaaatcccaggcgttcccgaagtactcactgcgtgaggaattgtcttgggcctcccttaggacctttttcaacgcctccaccttcgcactcccctttgtgtattcagccatagcatagttgtgcttggcaatccggagctgttgtctctcttcatcagtaagaacaggggtcaggacaatgctgggaggcacagtata

SEQ ID NO: 88202 - DNA, 771 bp, Cannabis sativa
agatatatatattttttttttaaaaaaaagaaaaatatcaattcaatttaaatttaaatatttaaaaattaatattatatgtttgatattttttaaaggttagattaatcgtgaatttgaaattaaaagaatttaatatttttaaatatcatttaaatattattttattttcattaaacataatttaactcaatttacttacctaactagttattttaaaataataattaaaaaaaacacttcaggttgaaattaataataataataatattaataataataattttttttttctgggccatttatgttttgagatatattggtcttttttattggtgagtcaacaacacatttacttttacaatttattgagaactatatattgtattgaactgaatcccatagtaaactacactatgttataatgttattttgaggattatgtataacaaatttatcctagctagcaatatatctatgtaatagttaatgtttctgtgtctgtgtctattatgcacaaataaaagtaactattaaaatataataagaattaaagaagtaagaaagtgggctccttttgtttcttaattattgtatttttattgtaaattcaccttttgtaaagctaagagtaaagcgaaataagagaatttgttcattaatttgcccccaagtagcggtatgaccatacagtaggaacttttttgtgtaattcggattttacttttgttgttaacggcttggcgcagcggcaccaaaaatactacacct

SEQ ID NO: 88203 - DNA, 1117 bp, Cannabis sativa
agatctagaactaccctcaacagtttgtgtagccataaagcctattttctattcattgagatctgttgactttgtataccattccattataaatgaatgatcttagcatagatctattgtggtcttttaataataatggaaacaacaatcattgttaccataattatatctggtatacttgtatgttttactggttacgctttatatactgcttttgggcaaccctctcaacaactaagagatccattcgaggaacacggggactagttgaagtaatgagcctcccgatattcctaagactaagaaaataaaagatataaaaaactaaattcaataaaaaaaataataatcaaattacaccatctcgataataggcgaataaaattaaaaagatcctatcaataaaatttccatttattcgagatctagacataggcagaatttattctatactttcttttaattacctttcgtgagaaaataaaaaatcccacaaaatgaaggtattttacaatatgaaataacataaaaacagactcattaaaataaaacttctactcatattgattcctgtcaaaaggaatcaatacaaactatgataagaaatatttgaagccgattagatttcatccaaataaaaatagaataaccgcatgttatgtattgtgtgtagaactgtatacgttgacaattaaatctaaaaattcttgctgcctttgataaatttcgaataaatcaatggggtaagggtttcttgttgaaagatctaaaattttaaaaaaatgtataatcacaatgtcattttttagttttttattttatttttaaacactgttgtgaatcgctttgatttactttataatacacagacacgtcctttattatattgctttgattagatttctttttttgttttaattttaattaaagtgactgtaaataattaaaaaaaactaagaaaaaaaaaagaaccaaaaattcttgaacaatgcatttttacgttacagcttaaatagttttgtgaagtcatatccgtcaaaatttgctagcaaaagacttggtttttaattggttaaatgagtcaacgtttcctaatctcattaagtcctctcggtac

SEQ ID NO: 88204 - DNA, 709 bp, Cannabis sativa
  modified_base (52)..(63): a, c, t, g, unknown or other
tttaaaaaacactaaccaaacgtgacttgtgttttaaaaacttcaaaaactnnnnnnnnnnnncatttctaaaaataattttttgaaaacaaaaaactataccaaacaggctctaatattttttaatatttctcatatttaaatttacgcttatgctattaaacctcaaagtgatagtgattttataattaaggtagcatttagttagatgcaatgaaatagaaatgaaataattttttattctaattttttatttggttgcatttaaaatattggaatatcattctaatagaatgactttcttattattttaatggaataattattctatttttaaatgaaataaaatatcattccaatacaagatgagaaaaaaaaatatttttttatcaacttttttatgcattttaaatttgattctattttatttttattattcatatttctatcattctcatttatattcttatatttcattcatttcaaccaaatgtcaatgtttgcacattttttttaaaattatactcacatgagacctcaaatccattgcactataatgttgtagtttttttagtgtaccgtaattgtatcatctatttattaataatatgtaagtaataaaaatatagaaataagaatctatatataaatataaaggaaagcacaaaggagtctaggtggcatgctagattttttttagtgtattttt

SEQ ID NO: 88205 - DNA, 1566 bp, Cannabis sativa
  modified_base (1265)..(1267): a, c, t, g, unknown or other
ttatgttttacataccaaatacactgacacaagtttacttttataaaacaaatcatttaaataatcatactactttagttaccaaaatctaaaaaaaatcaaatttaaaataaaactaacatttacgtggttcggcacgtaactttcacctagtatatatataaatttacatatacttttggtgattttgattaaaaaattatgctatgtaatttgttatcacataaaatttttatttatttttatatcaggtaatgaaaataaaaataaaaaatgtataagaaagtctttaattttaataataaaaatacactataaaatatataatgaaaataatataatagagtattgaccaatggaagaaacaagatgaactgatctaattccaatgtaaatatgattatttttttatgactaaccgttctaaaaatccattggagcttttagataacataaaatcaataaagttgataaatgtcaattttttattgttgggacagggagtttgagacaggtcatttttatttttcttgatcatattattggtggaatgtcaatagtggtaactattaatttttcatgatatagatacgtactttctttattttattaagaatatacaatgtaccctttatgttgcttgaaataagatatatacacttcaatacattgggacaaaataaattatattttaattgagagattataattaaatagagttacactaaaaaaaattaaaataccaaacaatattaatataacaataataacaataaataattattaatactataatagaattatttttagagtaaatataatgttaatacatatatacaattttgaatagaattattaattttatgtaaaataaatttacaaatatatgtatatatttttttaagatgtaattattatactttgttaatatgggacttagaaaatttataagtaattacaatttagaggttattcttatttataattggcccaaattaggatttgattttttttttatataacaaattagaagttattcttaaatgaattattcttaaatagaagttctgctgtatatgtcattaggtttggctagtagaaaggggttaggaattggactatatgcaacctccttataggcaaaaatatacatgacttttaacccattccaatattaaggatcgatcaatcaaataatagatagtaaatgggtcggtttgaaaataaatgaattgctagttgtcgaatattattatcgtcagacnnnaacctaactaaactaactagggggattttcattccttgtccattactttccagtatttttcatatcacaaaaattttgattaggactcaagaatccatatcaacaaaaggtctagcggttggtgttggaataatggcatccattggtatttgatttgatatattacggtcaataacatcggtgaattgggtgaaggatacagaaagagaaggatttgatccatcgataaacaaaagcctacatagcagttccaatgctacgccttgaaccactcggccatctctcctacataatgatta

SEQ ID NO: 88206 - DNA, 593 bp, Cannabis sativa
ttaaaaatggtcataggataccaaattgcatatattagcagttaaattggttcaaaattgcagtgaggcctgcacttttctgaagcaaaagctaaatttttctaaatttcagaattatgttcttgtagattattctctcaattttttgaacatgaatactattactaagtttgtatatacagtatatattgttatacctgatttaataccagagaagttttaattttttttttcaaccatgttagatgagattattaactgtagaagctacttttttgtactttgttgtgagatgaattgcctttgaaccttttacagtttcattctttttcgccttaattgccttattcttctcttgttgaatcagcaaaagctctctctctggactagctccacttgaggcagtactatttgatgttgatggaactctatgcgattcggatccacttcaccaccaagctttcagtgaaattcttctagaggtatgtcaattgcgcctcccgaatcacaaattcatgatcctctaattcttttaccaaaatgatagaatgatgtacactttctctggttgacaataatgaagtttacccaac

SEQ ID NO: 88207 - DNA, 844 bp, Cannabis sativa
cggtatcatattgtctttcatgtaaacacacctctattttcagttcatacagaagagggtctatatccaacacttcatacaaagtttcatgcatcttttgcaaagtagtgtcaacctcaaacattaacatcttactttttgagttattgaatcaccagttgaaaccttcaactgcccaagccccatcatacagtacaaccacaaacacagttgaatctgcaaacaaaaatgacaaaaaaattacttcagataaaaaatatgtcgtgaaatatcgcgaaaagcatcaccatttatcgtggaaattatcgacaactatatcgcgacacatcgcttcttgtcgataaatgtaatttgggactggcccagacactacgtctaaatatatcgacaaacatcttaaacaatatcgacaaaattgaaaaaatcgtcaacatgacacaaaattacagtatgtcgcgacatacatcgctacaaatcgctaaacttcatcctaagctcacacccattcttttatctctaaatgtcgctaataacatcgtaaaatatcgctaaactcacaaaacaaccaagaaaacgcagaatcgctgcatttcgtgttttcttgacaaaaatggtacataaaaataaggatatgtatagatgtattcatatcaacataaatacaactaaatcaaccaataattactaaagaaatagcatacccattattttttgaaggaatttctttcttagagctttggtttcaagtttccataatgtaaagctgccgaacaacactagctccgacgatgggaggtccgattggtagagtgtgtggtgtgagtatcctagagagagagagaga

SEQ ID NO: 88208 - DNA, 610 bp, Cannabis sativa
  modified_base (63)..(76): a, c, t, g, unknown or other
ttatgaattttaagttatattttggataataattagtttattgaataataattaatgtgtaannnnnnnnnnnnnntgtagtttaatatttttgtatattcaaaatttcattataaatattattttattattaggggattccccgtccccttcccgccttattaggggattccccgcctcattcccgatggggaataaacggggatggggattaaaattcttaacgggaatgggatgggggagcactccccactaattccgcgcctcgtgtacatttctactggtgcctaatagcaatactcttgttaggagccactaaaatattatgcaattaagaattggattctacatataaaaatattaatgtaatgattcatatgaaatattaataactaatgcaagaaggcaagaagtctaatagtagtattgtttgtgccaacttatttactatatagtgacccattatcactcttatggtagtgaaccagggtgatctatggccatgaccaaaatgaaagataaaagcaattcaatatttttgtgtcattgatgatagatgagcacacatgagcaatttaatatttaaaatgttaattttcttagtagctat

SEQ ID NO: 88209 - DNA, 1112 bp, Cannabis sativa
  modified_base (1015)..(1016): a, c, t, g, unknown or other
ttttggatttaacaaaaattgtatattaaaccataaacataaaaataacatgtaaacttaaatgacttctaatcttctattgatagcaaataagattacactaaaatgtattttatttagggtataaaattccaacaattattgggaagatccacttggtcaactttatcgaacaagtcaaagaacacgaataatacatttaagctagaacctaaacatatcaggattaagatctattgacctaaaatcaactaagtaatattgacttctaaagatttaacgataagtttatgatatcttatctaatgacaatattggtccagtccgatgtatactctatacatccaatactagcatactttgccaatgcattggaaaggacatgccacatatcaatgtgtaagtaaattttattgttgattatcacgtcagtgcactgatatatcacaggactaaagactttgaaacatataatcatgattatttttcactgtgtagacaacactataatcgtgaataactatatgttcaggattaaatagaatttatacattaaacatataatcataaaagtaatcacgtgaaccatgcaacataaaatgatttgtaatcttttattaattagtaaatttgattatattgtaatgagttttatttagggcataaaatcccaacacacatcatggtcaaaaattggcttgaagcttcagacttgattttcgttcacaaacagagcgtgttgaacatccgaaacacaaaatcttttttatctctattatatctttagagaactctaaatttcatgataaattcatcatatgcatcttatttaatatgtttcttctcatttttaattgatattataaattttaccatttaaatctaaaacaagtagaaaacaaaacttaattttgcataaaataaatacaatcaattgaaacatacatctaaatcactttataaaatatacataaactagcatatcagttatagttaggggtgaaaatcggtcggnnatggtcggtttttacaattttataatcgaccggtcggttacggtttttattttacgaaaaccgtaaccgaccgtttaaaaattataaccgtataaa

SEQ ID NO: 88210 - DNA, 705 bp, Cannabis sativa
  modified_base (679)..(679): a, c, t, g, unknown or other
tttattttatttacaaaacacacatattttaaaaaattaaactatttttttataaaatttaataaataatttaagtaaattaagattttatgaaaaataaaaatcagacttatttatatttacaaactcatattttaaaaaataaaagaaaaataactacaaattcaataaaaatattaaattatttttttaaaaaaaattaaaaatcaaactaaaaaaatatatactcaaaatttttcccataaaatttaatttttaatatatatgggtttttttttttatatctaaatggattcttttataaaacataattaatttttgaaatcacttagttaatattaaagttttgattttctttttaattatttttcaaaatgatttttttagtaatctaaattaattttttaagatttagctaaaaaaaattaatttttttatatttattttgagtgggtataatttaatagttattaaaatttaagggacacaattattaatttgtaacaacaaattattatttgaaatgaataaatatagaacttaacaaaaaaataaaaataaattaccgtaaatataaatgctgaataaattttggaaaattctataatacactcccttaaaagagatgcatcgatacttctctatccattttattatccgaaataattttttagtcaanttttttctcatggtcatgtaaattat

SEQ ID NO: 88211 - DNA, 1066 bp, Cannabis sativa
caatttttccaatgaattgcattaccagatgatgttgatccccaccagaagtttgacatcatgctttcaatttgattacacaaagtgacaggcagacggaagcaactcattgcacaacagctttcaatagaacctctttaccaccaactgagaataattgctctttccaactactaagcaacttccatattttatatgtaatactgctaaacaactttgttttatctctaccagcaaaagatggcaaaccaagatagtcctcatgacaaggctgtatcggcatgttgagcatttgttggaaaaaagcttggttttgagaccttgtatttggagagaaagaaagcacacacttgtcttggttaaccacttgacctgaagcccttccatagatgtctaaaacatgcttaatagaccttgctgattgatgatttgctcgacaaaagagtacactatcatcagcaaaaaagaggtgtgacaccgaaggagcagttctaaagacttttaacccatgcaatgatccattttcttctgcagtttgcagtagacttgagagtccctccgcacaaattaaaaaaagataaggtgagagtgggtcaccttgtctaataccacgtgtaggaactaactcacccatcacttgtccatttaaaaggaaggaatatgtgactgattgcaagcagcgaagtattaagtcaatgacaacagatccaaatcccatttttaacattacttgagcaagatagggccactcaacacgatcgaaagctttcgacatatccaatttaattgcagcataaccttgtgtgcctcttttacgattcttaagggaatggagcaattcaaatgcaacaaggacattgtctgttatcaacctttgagacagaaaagcactttgatactcagagataaccaaaggtaagaaaggctgaatacgcagtacaattgatttagatattagcttgtaaagcacagtgcacaaactgatcggcctgtattgagtgatgagctgtggctttttcaccttcggtattagtgtgattatggttttattaaggagtgtaggatc

SEQ ID NO: 88212 - DNA, 757 bp, Cannabis sativa
ttcaaacaaatccaaaaatttaaacaactcacaggaataagcttcaaggcaacctttgatagtacgctctccgaaatttaaacaatgcaaaaatccatttaatctgaaaacgaatacatcgttaaaacctaaaagaattatttgatgaagaaaaacttctcgaagattacctttccaatggagtgtattctagaaacttcatagtgtcccagatattcgttaacgcgaaccttaacaactaaaagtgaaaagtgaattaaaattgtgcaattatacagtgaaacgaaattgtacaataaacatttaaatttgacaaattcttcgaaaagtttgaaactgcgaaagcaaatggaacggagacgataaggaatgagataaaattaagaaactcaaattacctcggagcaagcccttgatagattgggggtggtttggagcgaaattcgaccgaatttcagtaattattgaaatttttgggatcgggttggtttcagcaagccctaaaattcgaatattcggaatatgatttgattttctgttgtcattgatctctattttttgccacaaataaaaaataaattaatataattcaatctttatacggtagtacttctattcaaaaatagaccgaccaagtaaattatattctaattgagagcttataactaaatagaattatactagataagaaaattaaaatactaaaaaatatcaatctaacaataataacaataaataattattaatattatattat

SEQ ID NO: 88213 - DNA, 583 bp, Cannabis sativa
ggcaaaaaggttgtgtgtccaggaatccacggatcaaaaccacttctaattgatctaccctcaccaatcttccaccttaaaccatgaatcaacagctcccgaccccaacggattccttgccacgtgagggaaggagaatgacccatactagcttctaaaaaagagttgttaggaaaatacttgctcttgagaagtgtagcaaggagtgaggttggattgtcaactagccgccaagcttgtttggctaggagagcttgattaaattgtatgaatgatcgaaagcccattccaccttctcctttagttttgcaaagtaaattccaagaacgccagtgaattttggagccattttcattcattccccaccagaagttggacatcatgctctcaagttgattgcaaaagtaaactggcaaacgaaaacaactcatagcatatgttgggattgattgaacaaccgctttcaaaagaacttcacggcctccagcagagaagagtttttcattccagatgcatgagtttccaaatccgctccttaatgttgctaaaaagttcctttttatctctccccgagtaagacggt

SEQ ID NO: 88214 - DNA, 542 bp, Cannabis sativa
ggatctattccgattgactctttatcggagaacattttgtgtaatgaccgagaggtctaatatctttcaatatatataactacgcttattttcaaaaaaaaaaaaaaactatggctaaaagagttaactataacttgtttgttactataatatattcaaaaaatataaaaaaaagtgtaaaagtaaaagtatcaaaaaatataaagtattcttttctctctgaacaaaattatcaagcctatagaaataaattctgaaattacattacaaagagaagcatttgttaatacaaactaaattatatattctttctagatgatacaggagaaagcaaaagattacataacaaagtgaaataagtactgaaaattcaagttataaaagaagcattatatagtagttgtgagtgtttctttttaacctattagaatatttctaattaaggtataaaataaagaattgattttgtgataaatgaatattttatattgattgaatctaaacaaaattaattacgtaatattttatatatggtcagattt

SEQ ID NO: 88215 - DNA, 1415 bp, Cannabis sativa
tatgtttttattattattttgagtctgtaatcaactcaataaagaagaagaacaaaagtgcaagccttcgggataaggctcttcaagctttcgagaaaaagtgtttcaagtcttgcctcagaaataaacaagcactcttcaagcaaagcaaatgagttcgacacttgaagtttcaacaagattcattcgtgaaggtggaatacatcaagctagcaacatataataagatggagtatatttatgcataagttaaaaaaattgtatttttgatatcttattaatgaatcttatctttgggcattgatctgtgtactagtaacaattttcaaggattgttaataccatgtataaaaatcttgtttgtttttatttttctatacttttattcttggctgatttttattctaaagttacggaatcatgttttgtagctacaaaatatctatttcaataccatatttattattctacatgattaattaaataataaattaataatattaaaacacacaatttcaaattagaatacatatattaaattattaagaattatgcttatatattttcactcaagtcttagaaaggtaggtagtaaaccaaatggactttgtaataataataattaataagttcttattatcaaattgatcaacacctaatccatttatatgatttaaaatgattatggacattaaaattgtcatcttatttttgaacagttcaaaaatgtgcgtattttttttttcttgtttttacttttctcaatatagcagcctttattaagaacatgtttttggcgagcagaataaaagggtcatagctcacctctcaccacctatcatgaagccacgaggaattacccagtcaaaaaagaataaattaccaagccaaatgaggtggcaaaagaataaaataagaccaattcacatgctaatatcctcaaataatttttatcaaaaaaaatatcctcaaataataacaatttacatgatgacatgatgatctatgttgtttatttaaagctaataaatacgcaaatagcaatattataatttaatgcaaccaaccaaaataaaaaataagtaataaagaaaattaccatagtttcaattcattggcaaatatctttgaacacattttttgtagtagaccctagttgactggtcttttaaaaatcgttttccaacttctgaaactcccaaaccaaaagtatgtgtttgggtaatttgtgagttttaggcttttaactctaaaattactcttttaaaaagaaaccaattttagtagcattcttgaaaaattaaaaatagaaagctagccaaacaaaactataatttacttaattatgaaagaaagtggggtttagttagaaagaataaaaatataagaatatgaatgaggacagtcagtagtcc

SEQ ID NO: 88216 - DNA, 895 bp, Cannabis sativa
  modified_base (313)..(334): a, c, t, g, unknown or other
gtcctcgagaccttgaatgtcccaaatttgaactcgcttcatcttgtactgatcttctcctacgaaagagattagatacacgtcctctatttaaatacgtgtatacatcctttctctttactcgagaaggatattgagggtgttttggaggtagcccacttgaccttggtttatttctaggatttcttttgttaccacgagggattccatggttccctggtcgaggctgtcttgcctcttcgttcctacgagatgactctggcacatcagttcgctcattcccttagtttgcaaatccatgggaactttgagnnnnnnnnnnnnnnnnnnnnnnattatttgtttgattatccattgggacatcccttgtatccccaggttattcttcctgattgttttgaggattcccctggtttatttcctgtctcctggttctagagcctcgagttcgtcctcgtgtcttcgcagcaaatgtacatattcgaccagttttcaggacctttaaaaccatggctgctctgataccaagttgtaatgccctattccataggaatgccacgtgtgtgattttataaaactagtttaatactaatgtattaattatgataaaaaaaactatgaggataataaaaacttgactaaaataaaacactaaaaacggacattataacggcagtaaaaaggagttccggagatccctgttataaaagatttatccaaaagacaatatacaacaacaattcaaaatacagcagacacaattggtctaaaacaactcctggcaactcaacacgcaggctggtggggtcaatatgtacattgctggagaagaccgccgtctcatggctgttcttgttgggttttgtgccctaaataaaaaccatttcaatataat

SEQ ID NO: 88217 - DNA, 4801 bp, Cannabis sativa
tgcttttgttaatagagacccagagtcctatcagttgacgataagttggcagtccttggctgcaagtaagttccctgtctaatcggttttcatgaaattgcatttcatcaagtatttttttatatggattaattatattggtctttagagatttggagagaaggattgtagaagctgagatggatcttacattagcgaagagtcaagggtatctgaagaaccatttgcaacaaagtggctcttcctcatcccgaattctagctgttattggagtgtatactggatttggcagtcgattgaagagaaatgtgtttagaggatcttggatgcctagaggttagttgggatcagaaaatatgttccatgcttgatgttttaataatttaaaatatgttaagcaggtgtgaagtacaaattttggattagtctgaagaagaaaagaaaactaaaaaggctgattattgcaaattacaatgcttttgcttcaggagtatgtttgtctttccataacagtaatatgttttaagtgtactatttggtttttgcaggagatgccttgaaaaaactagaagaaagaggtgtagtcatacgttttgtaattggtcggaggttttcctcaaactttaatctctgttattaattgatttcgtgctttcttattcttatttatgtaatttgtggttttatttgttgaacagcatcaatgatgagactatattattttacaaatttctctcattctcttcttttttttttttgttgaaatgatagtgctaaccggggtgatagcttagatcgtaatattgatgtggaaaatcgttcaacaaaagatttttttattctggtaagcattataatttcagttgctgctattacaacttcacagcttttattctctctctatatatatgagcatgtatttgtatgtggtattaatatttccataattttgttatgtaatgatattgaaccaattgttccagaatttatagtgtaatagctttgcaaagcgagaaaacaaaggattctaaaagacaaaaagattctttgtgaatattacatgacaatgtcttatttaccaattaactattatttgaaacagtaattaatttgttgattttcgatggtggaaaaagttcaatattctatttagagttggttattaataataattgttcgattgacttaaacatagaagtttatagttttggatatgtttgattggtattaggaaggtcacgaggaagctgaagaagagttgcccaagaaagctaagttcttctttagcacagcggttcaaacttggaatgcagacttctatgttaaagttgatgacaacattgaccttgatcttggttgagcttttctatatttttcactcttgcaatatatattgtaatgtaggccttctttattgatcaataatttttttatcatattatttacatatttttgttaacatgacagaggggctaattgaacttcttgaacgtcgccgtgatcagaacagttcttatattggttgcatgaagtcaggagatgttgtagctgaagagtatgtattacgttataccttaattaaactttattgttgtgtaatatcctattttccttgtgagtctatagtgatcatgccctcatcgagtaattattgttatgatttgtcaatataaaagtgaacaatacacaaggagctgtactattattgagaaaaattacacggaggtatataaaaacatctaaacattggcaaatttgacaaaattgagtttgaatgaatacattgaggtatataaaaacatctaaacatgttaggagcaatttagcagtttcgggaggatcaaaattcaggtgaaccagcgttatgtcacctgtccctaggcgataatatgtctcgggttcaaagagatgatactgtcgtatgagtggtgatgtttcgccacctagtaggcaacgcatcgctactcgcttgaaattttggctccaaaagttgtgctttgaaattgtaacatgttgcaacaagcttaggttggtgctaacatgtagaagtctaatagaatagatcctctctattatgtgtattaaaagactaaaattgtttctgtttatacaaagataaaatggcatattaaaattgaccactttttgttattgtgccatatcctgttatttacccgcttcacttttgcatgtgtagatttcttgttttctagttccgtcatatttttttattaattattagctgtgaatttttcagatttgttttttgcttactacaacctaaactaatctgaaggttttattgatttgaatttaggggaaagccttggtatgaacctgaatggtggaaatttggtgatgagaaatcgtaagtgatgttatatttgtttcagtgtgcttctaatgctccttatatatgcatttatgtatgtacgcttataacacttgtgttctgcatcaactataatcgcctttcttgatttttcttttcttcaggtacttccggcatgcatctggttctcttttgattctctccaagagtttggctcagtatgtctacataaacaggttagtcatcaacttcttggcaagccaagcagttttactatttataaacagccaaaccttgtaaaattgtgtgggatattgtatcaagtacagttatggttaatactccaactgaatgcaccagcagttattaactcaaatactaaattgcatcactttggtatcaaccaatagttccaagtcacagtctaatatttattttgtttacttgtgaatacagcgcttcgttgaaggtttatgctcatgatgatatatcaataggttcgtggatgatgggtctacaagcaacatatatagatgacaatcgattttgctgtggtagcattagacaaggtaaatttgcttcttgcaagtttttgctcaaatatgtgggtagaagttgtgatttctgcttgacgaaattgacatttaactcttttatcagacaaagtgtgttctctagcctaattaaggagatgcatatggcttgtcaagaagacatcaaatcttagttcattggtagttcttgggcgtcgaactccttgcggtgaatgatttgtgagaagaaattgacaaaatggttcttgtagatttatttagatattggcctcaattctttttagggtttacccatgtttgactgcctatcctttcatcccaacgattcatcttatgtagtggcctcaatgctaatctgaattgatggaagagtttaaatagaatatcagtgatctccaataaaaatggtttaaatagaaggcattgtttgttttaatgttcttaatttataaatcgatttatatgtacacggatggggtgaggaattggtggggcgttctcccacgatctccatcttgttaagaattttaatcccatttcccgcatattgtccgtacagggaattctacaactactttagtttatattttagtttctccattacaagtagacctccacaggaccatctccatgggaaaagtgtggataatttattgataacgccttaaatatggtgaaattagtaactaaatactatcaactgtattatattgttaattagaaattaggactaattagttttcattattttcctagtttgttacaatagtttacctaatgtgtataaatatatattattttctcaataaaatacataagaaataattctcttcaccgttgtttttaacatggtatcaatttaagtggcgttcggttggatgaaataaaaatatatgaatagcaatgagaatgagaataagaataagagtagaatggaattaaatttgaaacacataaaaaatggtaaaaaaattattaattttttttttcattttacattgaaatggtcattcattccaccaaaatgaaagaaaaattatttcattgcaatgatattttaatactttaaaatacaacgaaacaaatgaatgaaataaaaattgtttcttttctatttcattacctccaatcaaggtcttaaggattgacaatggccttgagtactactcaaatgagttcacggaattgtgagccaaaatgggaattcagggacatagaaccgtgaccaaaaccccttagcaaaatagtgttgctgagaagatgaatagaacattgattgagagggttaggtgcatgttactaggagttggtttagacagaaccttttggggagaagcttttaaaacaacctgctacctaatcaacagatcaccatctgtgccaaacaactttaagatcccacaagagttatggataggtaaatccccaaacatagatcacctgaaagtgtttatatatactgcatttgtgcatgttagacaatataagttgcagcctagagcattgagatgcatgtttcttggctaccctgaagaggttaagggatatggagtgtggtgcttagaacctggattcaagaagtacttgataagtagagatgttgtttttaaggaagatgaaatggccatgaaaaccaagagcacttccaaagacagtgaagctgtttcagatgagaatgtccagatttaggtggagccatttgatcctacaacatcaactaatgttgttccagatggaactgaggtaacaaaaggagaagacaatgaagatcagcaagagctagacagagaaaagctcctgaccattttggttatgatgaattcattgcatatgcacttatgattgcagaagaggttgacaatttagaacccactagctttcaagaagctatgagaagtaaagatgctgaagcatg

SEQ ID NO: 88218 - DNA, 780 bp, Cannabis sativa
tgtgaggcaactaatattaaactttaaaataactaataatgcacttatgtaatacaaacaaaacttaccataatcaaattttctctatacgagccgtgtattgttaattctgaaccatgttttttaaaataataaaatatagtagcataattattattcaactaatatacgacttaaatgcaattaaaaataaaaaatttgaatgtgcatcgacatgaaaaaaattatcagtatttttttgtcactaatcaacaataatcaattatatcttaataatattatgtgaagaaacaactgttagaattttataaaccaactttaataacaaccaaatgaatatataaataaataaccatgttataatttttttaaagagctttgtattggattgtcgatatgaaatacctgcaaatatcataaaaattattgtatcgttgacagtttgtaatcattgatatgtctagtttcagagcattagcaaaatattaatgcaactgcaatgcaactactcagaaacttaaaaattagagcaatatttctatgtacgtggctctagataaattcaaattttcttgattattcatgatttgatatgaataaatccaccattgaaaatctagaaaataatgttgatgcaacaagagaaacattagctagtgtattgatacattttctttttcaatttatacctaatttgaattaatcaggaactctaaacctattttagacagatctacattttatgaatctgaaaattgatattaggaagattagttttct

SEQ ID NO: 88219 - DNA, 515 bp, Cannabis sativa
cctttctcagattccccctttctttgattaatatagcgaactgcttttcaattcgatttttctaactgggtttattcggttttctagctatgagtgtaagctttgcttgactcttcacaataatgaggggaattacttggctcatacacaagggaaacgtcatcaaacgaatttggctaagagagctgctcgggaggccaaggaagctccggcgcaacctcagcctcacaagcggaaagtcaatattcgtaaaacaggtatgtcttttcttttcgttcttcgtttgtttagcaatgatttcatacattttatcaaacagttggtgtgtagggaaatgccgcttagttattggaaatttatggttagttgggcatttactacatatgcttgaggttccataggtttctgaagatatattcatcttgactttataggtttcgttagttttaaattgagtccttgcctaacaaggatatagcgcagttgagttctacagtactgaagtttgaatgatc

SEQ ID NO: 88220 - DNA, 955 bp, Cannabis sativa
aaagaagatgaaaaaatagaaataaatgaataaaaaaaaataattacttacaactgaggtggtgcttcctatgtcgtggctgcctggaaaagaataatatcaagacaagattacacttcaacaaataaacatgaaaagtgctttgtaagtattaaatatttaccagtaaagaaataagaaataaggccatagaaaatgatagaaacaattaccagaagagacggagggagcaagccactgatgtaggtgtcgtatttgtgatgttctacaaagaggaagaagatacttatttgattagagagaggatgaggaggaatctaaagagaatcgatctgagcgaaaataaaaaaaaaatagagacgagagagggagggagaagcttacctattccattgtcatcgtcgatctagaatggggatctgtaggtgcgtgcatgcattattgctctagctggaagtgaaagagacaaatgagggtaccagggaaatcgatgaagatatgagagtgggaagagccacttctggtatggcagggacgacgatagagaggaaaaaaggcggagtgttgttgaatcgttaatttggtttggctatcctggaagtgtgagttgatgaaagagagggaaggaggcagagggagagtatgcgtgagttagggttgcttagggttagaaattgggttttgtctgattttctttatatgtataaaatatgtaatttttttaagtaatagaaacacatacgggttgggttgggttcattgggccacaaaaagcccagcccgattccgccccataacatacgggttgatcactttacaacccaatacaatttctgttgggttttatgccctaaataaaactctgtttcaatgtaatccagattattctatatcaataaagtgacagaagtattttttcattcacttgtgtaagttttggttcacttaatcaatt

SEQ ID NO: 88221 - DNA, 1061 bp, Cannabis sativa
taactaaggataacttagaaaaaaaaatagactgtgtcaagtacttggatgaaaagtaaccaaggaaagaaaaacacaaactacccatgaaagttgtctaaagataataaaactaaggagcatatgcgctcgggataaatagcacaaaggctaaaactctcaaggaagagtatcttcaggcgtgtccataaaagtagcagcaccgggaatattagttgtggaaggaagcgtggcttctcgaaggagtcttgccttgcacttcataagctccttatctttattctggggtggcatgtgtgaaaggttaagtttttggttatttttccacaactgataaaattggtcgtcgaaggcacacctgtagttctgatggtctctcgctgccgtctcctcatgcttctaaatagtgtccttcaaagccttaaccgttgagtcatgttctttagtgaccttttctagcgccttctctagcgccatattcatcttcgcaagagcaaagttctgatcaatataataacccacttgaccctttctctccttcagttgtctttgcgcatcattgagttctgtcagcctcttaccaagaatgtccttaagttcatccttgtcacgctcatactttccatccaaaagagcagagagcttcttctgctccttaagggctgcttctgcgacagctagtttctcttgtaaattttaagaattaagattggagaccatgaattgagttacaccctaaaaaaataataacaaataaataaatataagagaatgaaagggtgttagcacaataaaaggctatgagatcatataaatatgagcgtgcacatgaaaagataggctattatcaatacattttgataaatagtccatcacgtacccgaaggatgccttggactcctctactaacagtatcaccttcgtagttggacatgtcacgcaccacctcaagagatgcagtttttcgaacaaggaggtcaatgttgtcgtgcacagactctagcatctgaattgtggcatcatcgggacgaattatgggaaccacgatggaaggtctcctc

SEQ ID NO: 88222 - DNA, 712 bp, Cannabis sativa
aaatagttaattaatacttaatttatttttattaaatattacttttagttataacaaaaaattatttgtgattaaattaaacatataatatttagatacaaattagcactaatttagtttaaacattgtgactaaaaatatatgtaattaattacaatatattataatttttgtgactaatattttttatcacggaccttttaatcacaacgtcaaaattataatttataattagttacaatttttcgctttaattacaaattttattgtaacaaaatataaaatttgtagtaattgtatatataagctattattttagtgttatgcactgtaaatagttaatattaattttgtgttatatatattcagcaacattattgtaggttaaacatacccatgcatagctttattttgtggctttgtatgcttaatagaatcaaaacaaaaataggttgaagaatttgagaattctaaatgctttctatgcaacattgaagatgagaccgtgactcacttattttttgagtgttctttctccttggaatgcttagaatggacgtaccttagaaagaattgtaaggtggataaggaggacaaaattatgcaaggtgaagaaatcaatttttattgctgttactgcagccctgttgctataattttaaacactacgcaagtatacgcattcaagtagtaaatctcacacaggtgaggt

SEQ ID NO: 88223 - DNA, 719 bp, Cannabis sativa
taaacaagtctaaatgatactatactctattgagttaatacaaataaaagtgcaacaccattcatacagattcaagtgaggaaagaaaaatcacttcttctacaaaactatacaaaattaataatatacccagataccgaaaaagcagtcaaagaagcatatagtagatttagattatacgcaaaacccagaaacaaaacaataattataaacaaagataaaaggatacataaacgactagataatcaaaaccaaggggcgaaaggctttgggatttttggggttagcttacacgatggtggcgctcggcggagtggctctcggcagtggagaggtggcagtggtgcgtcgccggtggtggcagagctgcgtcgccgtaagagagagagagagagttgtgagtgaaatcgatgataaagaacgagagagagtcttaccgtggtttggggcaaatgagagggtttggagcaaataagagggaaaacgtgatctgaaatgtagagggtttgtcgcgcgttttattataaagggctttccccgacggttttaaaccgtggagcaaagtatgggctacgggtgctaatactttgcccgacggttccaaaccgtggggaatagtatttgattatattttatttaattttttctctacatttattaactgtcgcttaatttatacgagtgtttaaaaccgtcgcctatagtgtactataggcgac

SEQ ID NO: 88224 - DNA, 918 bp, Cannabis sativa
  modified_base (510)..(515): a, c, t, g, unknown or other
tttaatctatttattttaatattaatatatttatttaattaaaattactaatttagataactctaaatataaattttaatttaatatttatacaattataccatcggaagatctaaaaataaaaattattttctatcctaagtattaattttccaataaatataataaaaattacttatttactataatcatgaataaatatatgatctgaatttaatagaatttatacattaaacataatccttaaataagtcatgtgaataatgcaacataaaatgatttttgatcttttattaattagtatatcagattgtattgaaatgagttttatttagagcacaaaatccaacaaaaacatcttccactatccctaaggggtaagcatcagtctgattagttaattgaatcaaaacctgagtttctcttaacgaaacaagatttaaagaagcaaaaatagaataagacatattattaaaaattgttcctaaatctatcatgcaatgatcaaannnnnnttttaccaattgtgcattgaattgtacttgtcttaggtaacaactttctttggagaacaacaaaaacattctctctcacacttattttctcacctccatccaactttttctcatttagacacaactccttgagaatgttagcacaatgatgctcttctttgatttcctcaagacatagaattttttcctcaatttttgaaagagttttagggatctccttgatgggctcctcttcgttagattttttcaatctacttggaaaaggtggaggagtgacataagttggtacaattagtatgtatggctttttcagtggtggtggaccaactaaagtagaagattcaacttttggtggagatgattcttcaagggatgaattgttgactcctttagttggaatcaa

SEQ ID NO: 88225 - DNA, 535 bp, Cannabis sativa
aagtttgaatatgaaataaatttatcaaggtgatgaggtgtagaagaagagtcctgaataaccgaataacactcgaaatctctcaaataggatggtggtctggactgtctttgagatctgcgtagagcaacttgagactgactttgattgtcaacattaggggtttctgcaccagtggaaacatggtgatctgcttcagcagtttctgcaacaggtaaatcttcaacaggtattgttgctggtgcaacagttggaggtgttacttgctgctccatgtccttttcacctgaatcatgcatcggggcagcagagctggtgttgtttgtgtttcctgcagacaactcattagcagaatgactatcaatcacggtatgaggcaagacaaaatgagcaaaaggatcaatattattgttttttgtgttcaatttttgaaaaggaaaaatgttttcatgaaaaacatttcttgaaataaaaaattgattattatttaaatcatagagcttgtatcctttaattccttggggatatcccataa

SEQ ID NO: 88226 - DNA, 533 bp, Cannabis sativa
ttatgaaaattatttattaattttgaattatttaattatgatcatttatttgaattcagaatgcatttaatatgtcatatatagaaatttcataattttgaatgttttgtctccggcaacattggaacgcggtgtttggctactagaatcacatcctagtatttttagtaacaggacaataaaattagacattgggaatttcaagaataggcgggattttagaatttcccaaaatacctctaagtaaccctttatgcccttttagagtgggagggacaaaattgtcattttgccccataagctttttgtcctttagtggacttggctttagttagtaatctaatttttttatgaatattaggctgatatcatcttttgattaaacaaatgaattctactcatttatcaaaaataagaaaaactaagaaaagactctttctttcaaccctctctccttctctctcttgaaatccctagagaaagcaacaatttgttgtttctttctgaaattcaagctagtttcagcaagaatt

SEQ ID NO: 88227 - DNA, 783 bp, Cannabis sativa
atatcaggatggaatggctcggtttcctcatccgagtcatagcctggcaacttaccatgttttccatcttgatattttctgaatttatcctctagttcaattattcgtagttggatggggtccacttgttgttgatttgcattttgattaagttgatggcgcaaattatgtgtattttggttcaaacgcttgcgaagatctggctgtctttgatttaggtgatcgcaaagatcaggttgccttcgctcataattacttacagatcttgtctccgagtaactctcggattgatagtttcatgaattgctcatgcttacttccttctcgcgtttacctacttaaccaactgtgccctcgagacattgagcgtccaaagctttaacttgcttcatcttgtaccggccttctcctacggaagagattagatacatgtcctttattcaactatgtgtatacatcctccctatctgctcgagaaagacgttgaggatgtcttagaggtagcctagttaaccttggttgatttccagggtttctctcattattgcgagggattccctggttcgctagtcgaggcttcctcgcctcttaattcttgtgagatgcctctggcacgtcagctcgttcattcccttggttagcaaatccatgggaagtttaaggaacatctcgcctttgttctggatttctagtattattaggatttgtttgattatccattgggacatcccttgtatccctaggttattcttcctaggaattttggggattcccctggtttgt

SEQ ID NO: 88228 - DNA, 857 bp, Cannabis sativa
actcgcatcacaagaacttgttgcatgcaccacgcattattaatatccttatcacttcagagaacagaaaactatttgaccaacaaaacagagcactcaacaagttggacactgagagacacatccaagaattgatgaactccagcgaaatcaaggaggaagatgagaaaggcatagatgtaccatttttcactttagaaagtatactcaccgcaacaaataatttatctgtggaaaacaaacttggacaagggggttatggacctgtttacaaggtatttatagcttcagcaattttttttaaccaagtaattatggtttcataaaagaaaagaaaaacatattggttagttcagtgttaaaaatagctgcatttgctccttattttaatattgatactgtcttgaagaaacttataaatgctcattgataagaagctattagagttaatcccacattatttatgagtggaaataaattgttatatataagataaatgggatactctttctattgccaattggttttgagatggaacttcattcatcttataccaaattctaacagaaacacttaaattaagtagtttttttttttttgttattgtttttaagtttaaagcgcaacatgaatggtgccacttttccttttctgtgtaaattaattagtttattatgtttttaagaaattgcaaaattacatatgtttctctacatcagggaaaatttccaggaggccaagaaattgcagtaaagaagctgtcaagtgtttcaagacaagggatacatgaattcaagaatgaagtgattttaatagcaaaacttcagcatcgtaaccttgttagacttcggggatat

SEQ ID NO: 88229 - DNA, 1619 bp, Cannabis sativa
ttgtaatttttgtgactaatacatttagccacagattttttagtcatgatataaaaataataatttataattagtcacaattttttgacttttagtcataaattttgtaatgactaaaattaaaattttttgtagtgttatattttaactgcgctctccattaattttttcttgatatacattttggttgttaattttgatctttttttttagttaaggtggcctcactttcaataatttttaccatatcttttatatggttggttttcagggcggaattaggtaaatttatttggaggggctaattttttttttcatctcaccgtaatactctttcggctggtaataatactctttgatagtcacatgcacccaaaggatattaccagccgaaatagaggcatgcattaagtgggataaaatatgttggcatcaaagtggaaaatgtcgccattaaagaggtgaacgtttcgcaacgttctttcaaaaaccagctccatgcacccctatattgaaatcacgtaacgctggtcgaaacgcttctcgtttgcatgttcaggcgacatgtctggttttccagtacacattaatgtgttttgtaacttttcttcatgtaaacttctctaaaatgttccaacactcaatttaattatataaatgaattgtgaaagtttataacagctatattatcaccattattaatcccacaatacctttaactcatacatttacacaattattcacatatggttcatatgagttacaaattctagctatttcagattttgtaacgcctttctgttacttttttttggtgcatgattaaactatatttatcacatatatcatatatattaattattcattaatatatatatatacataatctatattatattatatcaaattttatgtcactacaaataaaattatttttgttaataactttttagtcgcaatataatttttttgtgactatataatacttttagttacaggccttttaatcataacgtaagaatataatagtttataattagttataattttttaattttaattataaattttattataactaaaagtaagatttttcatagaaatgataggaatatactcctttttctttttatagtgtcacctacacatattatgatagatatattatagaacatactaaaatcttaatttttttttctacatggtttccttaaatcctatacaatcaatgaatattttaaaaaaaaaaattaacactgatcaattataaatatataaaccatatttatattttaatataaataaaaaatatttaataagttttaatatgatcgatgtataagcatgcttttattgtcaaggacaaaagagttgaaattgactcatgctagattaattcaaagatttataattttatatgtctaaattaatgcaagttgtttagtaccaatgtttaacaatttcttttattattattatataagggtctttgtataatagtgatcaaaattagtcactatttgtagtgatttgtttatagcctcaagaatttaatctaacagttaatgctatgaacaaaaatattaaatacaataaattatttattctttttaaaaatg

SEQ ID NO: 88230 - DNA, 629 bp, Cannabis sativa
taaaattataaattaataaaataaattaaaggttgagataaaaacaaacgttgttgatgatgaccaccatcgtatcaccaccattatatactacgaccacctgcatcaccatcgccatcgccccactaccaccaccaccatcactattgccaccaccccaccaccaccacaccattacaacatcaccaccatcattgcaataacaaacaccatcaacaccaaaacacatatccaaaaccaaatttaattttttttgccaaacccatctaaaaaaaattgataaatgtaaatctgggaaaataaaatttacacgctttatgttgacgcaattttttgtcaactgatctaagaagatcataaacgagcaaaatgaacacaagtggatgtcgatcaaaataaattaatttatggaaagaaatttgacaatgatgaacaataaatttttaaagtggttcaccccctttcggtggtattaggctagtccacttgtaattttattgatctcaatgctcaagaagagttctctaaaattatattctacaagagttcactcctcaagcgattttataaagtgaaagagtgtaagagagatagtccatttacaattaacttcataacctttatatagg

SEQ ID NO: 88231 - DNA, 925 bp, Cannabis sativa
ttggaaactatgtcagtaccctagatgacggttttgggtgcccatgtaggcactgagatccagcgaagacgtttctaggagccatccctggaaaaagttcagtgaacaggtcctaggtaccctaaaatggtgaaccatgaagctgaggatgtcatgtggacatcctagggctcaacctggtctagcattaatactaggcgcataggttgacatcctatgcgtcgtctcacatcagttttggttcttatcaacttcttataggaaatctgcttagccattgtcctaacatacatgagagacatacccccgtcaagtttcagactttggagatgactctacgagaaatgatacccgggcaccaagaagccctagtaggcgcccaagttgatatatagtatctgggcgcaccatgactagggttcaaatttttggggacatatctggaccctgatttctcaaatctatccaggaacaatccaagaacatgatattatagggcattgttcacaccttggacattccatgccaacacattcataatgaattttaaacttttaaagactcactaatttatctagttcattcgtgtaaaaatagttaattcattataaatttcatcacactgtattatttttttcaaaaaaaagaaggaaaaaaacctttctattcataagaaaaatttcactgccctaatgcaaaatttctcataattttatttcaccaattaccaatatccaacgtataagagcggagggttttgttttggtacacaaataaataatacaatcatgcgacaaagtgacaatagatataatatattatatatctcaagttcttattgagtatatgaaaagtaatcatttatcaattatgttataattagaatcccatttcaaccaaaatagaagaataataagatcactaa

SEQ ID NO: 88232 - DNA, 749 bp, Cannabis sativa
aaaaaaaatcaaaaaggaaaaaacaaagaagacaaaaactcataaacttattgttaagaatgcctaagcttgttgaccaagctgcatgattaccccacagccatattgaacattcaattgctcacatcaaacattttaaagttgttagctagcatagcccaaaaactacaatacaatttcaatatttatgctagtaagactaacaagagtttcttatcttgaatcatctgtaccataaaaaaagagggaaaataaaaacttaacttgaaacacattcttatcttaaaaactaaagctgaattgaaaatatcaaaacaataaatagttgtttcatatttgacacacatgattatagttatactaaagtaattactttaaaaactgtatcattgattgaaaatctcttaatgagtttcattcacatttttttttcttcttctttttttactccttgtttggcttcacattcccattttttttttcattttctctaatcaactgtattatgttacccaatacagttttattgtcatttgtttgatcgctacaatttaatgacttttaattcttttgtcttcttttttttttcttctcagccactacattctctcccttttgaaagttcactttatctattgtcttaagactcatcctcaatcaagagttttctacaaaaatatcaaattcacaaattttttttattttggtgtagagttgtctccttcttgattggaggagtactttctcaa

SEQ ID NO: 88233 - DNA, 703 bp, Cannabis sativa
  modified_base (635)..(640): a, c, t, g, unknown or other
tacgtggaccactaaaaatttgccccgtgtacaagtgtgtacacgtggatagtccaccgtggcacttaactgtgatttttggacgaaggtttacagagcaaaacgcaaccagggtttagatagttatgtcgccaaaattttgatttttgtggttacaaactgtacaaacggaaccagggtttaactgttacaaactgtaaagttcaagtggtttagccgccaatgttcctttgttatttgtgtcttgttattccgtccgactatctcattgagctttcatgcgtgtttaggataatgaacagatttataccactacaattacccaaatgagccacaaaggagcactaccatagctcttgttattgctttattgtgtgttttttttttgctaaaagctttatggtgtgtactgtgtactataacaaatagaactgctctttcaaatgagtttgaacatgttattcctaatattatttactctttgtaataatcttactatttttgggttcaatcattgtaataggggttagctcctcatgtagcaaaaatggctattcacttattatctgcttgaaaaaataataaaagggaagggaaaacattggaaacaatagtgttgggaatattttaccagnnnnnngatttactaacaagtatgttgatcctaaatatgaattctctaaaacaatgaaataaactcata

SEQ ID NO: 88234 - DNA, 628 bp, Cannabis sativa
tacacatatatattatgcaattattataagaaatatataaattattattagtataatttaatatcagatctcatatattttaatttaataaataataaaaaaaaatcttttaactacttataatatatgcacattggtataataatatcaatgctcttatcatacatataatataattggctagggtgtctacatccggttggctgagaatgatgtcatattatatgtaattggtcaattttatacataaagtctatgcactgcttttgtaattttaggtaaatgccaatattaattagataatcaaagattgattttgggtttgagcggaaacctaattaaattcctttctctttcttttatatataataataatagggatatgattttatccgttattgtactttcacggattgtaatccgtgatgtacggcagccgtcaaataagagagttatttgatctgacagttgagattaatctaggagtaattagggttgaaaagtagaaacgtaccctaaaactcatttaatgtactctgagatccatctaatgtaccacgaaatacattccgtaaaagtacattaggggacaaaattatattcctataataatatctcattctcatac

SEQ ID NO: 88235 - DNA, 1396 bp, Cannabis sativa
  modified_base (28)..(32): a, c, t, g, unknown or other
ttaattaatcacgatttccataaacctnnnnnattagcaacgagctggacagtacgtttaaaaatcacttaacacgcctagtctagttagggtgttacagatatggaatgttaatatcaaaaatataaaatataaaatatttttaagaaaaaataaaaaaaaatatttaaatattatttattttattataatttatttattttaaatatatttttagatataataaataataatatattttaattaaaaataaatttattatagaatattttaatcaaaacagttttctaaaagttgggctgtaccagctttagcttttaactgtagctttcctataaattctttaataagctgtttttaaacaatttaccaaacacttttttatcacagttttttcaaaaaacagcttttaacttttctaaaaactgtgccaaacgttccaaaagatattcagaaagaaaaaaattaggcatacttactttcaaaaatattatgaaggtaaccctgctaatatggaggtggcttgagtatttaacaaaagattattgatatgtttttgagcctaaaatttatagtgttcccatcaaaacaagaaaaatagaaaacaaatgaagtacccatcaacttaaggtacaaaatcaatggcaactcaacgtcacaaatttataaatgaattatggattcatttaataaaattatatttttaaacacactaatactgatatgaatataaaaggagccagatcaatatgtcctccatgcttggaaagatattcatactagaaaaaaagacaaagtttgggtcaatgatgtgagttacaataatattttatttatttttttcttaaaattacgaaactgttgtattttaaataatttttatctatggttagaacgaattgacccatgagatagccagaagcagacttgaaagcaaatttcgacaatgattctagattctcaaaatttacactgacatgaagagcctatatatagacagaagtaagtatgaaccaagactttaattaaacaaaactaacataactaattctaacaactttagactacgtgaaaacaaatttgattatgttctttcatttgccaaaacagatagaaaatctatcaaaacactacttttaagagtgttatttaaaaaaatgcattgatacttcttgaagagtgcattccatatagcacacatacatattattgtaacaccaatcctatcagctactttttatttttgactggaaaagcacgttaccacgtaagatcgaccatgatgctttgagacagcatacatcattatttagaaattattgtatttttttttctatttaaatcaaattaatttaagtaatatctaactagcgaaaagaaaatacatagaaaatat

SEQ ID NO: 88236 - DNA, 826 bp, Cannabis sativa
attttgatcacagttgacatacctttgtacctgcgggttattttttcttatcagaaattcaatctcccgctttagattgtggcactcattggtgtcgtgtctgtagtctccatgaaattgataaaacttggtcatgtctctctttctgacatcttttttcatgggtgcgggcttcttgtacggggctagtgactgagtggccatgtaaacactttctatgtcctccattaggatggtaaatctagtatacttggtaggattctcccgaggagcttgttcggtttttcaagtgaactttcctattttcgcattcccttgcatattattgttgttggaccgtttaccatttgaacttgaattgctcgggtaatgggggagcttgaaacatttcccaatagaaggagcttttgacttgctaggtttttgttcgccttctgctcactgaatggcctcttcgagtttgataaatccttctgcacggtcaagaaaatcactcatcgagtctactggaccgttctttcttatgtccttccaaagctcaccagggacttcaatgccccccaggatcgtagacaacttttcgtcttcggttacccgtgaaaccttactcgcctccgacatgaatgtgctggtgtaggctcggagaggctctcctggtctttcctttacctcgaccagatctcctaaatgcatggaactctgaggagaaagctttccacgagttgaaatgtaacgtccccgcttcatgtctccattgggcccttacacccacggaataattggctcttatacacgagtacgccactttggctgcttcctggaatga

SEQ ID NO: 88237 - DNA, 911 bp, Cannabis sativa
gtcctaaacaaattcatttatagaataaaataattgatgtttcatcaataaagaacatttaatataagcatagaaaaatttatgtgtttaattatttaaattttatagtttttaaattgtttgtatttctttttgtatggatctcacttatatatatatatatatatatggaggatgttaattactatggttacatttatttttagccatttaattactattgaatagttgtgattaatttaaaaataaaaaaaattaattaactttgtaacctaatagtaacttgatattttatttctttagaaaatcttaataaaaattaaattactaataattattaaatagctttttacaatttgttactaagcaaggatatttaagtaattatttttcttttgcacttaattattaatatatttgtaataatttttttatattttaaagttattacacacatacattaattaataaaaaaatagtaagaatgacctctaaatagaagtaactctacgctcaatcttattttcaatactttaagtgccaaatcagtatattagttccagattggttcaaattatttaattattttttaatttaaaaattaaataaaaaattaaaatctataacaattataattttaacgataagttagcttttatttttttttatttctccttcctcatcaagttcaaaaaaatatttgaaataactagggcaaatttacatagtaaaatgatcaccgagaaataacattgattgaggaggcggagccttgtaacaccctaatgattaggcatgctacagtgaatttttaattacagtgcgcacttttgctaataataatgtttttaaaaaaatcgtgataaatttaaacttttgattaattgtgaacttttataattattaatata

SEQ ID NO: 88238 - DNA, 605 bp, Cannabis sativa
aataattattagtaatttaattaagtttttatatgaaaataaaatattagattacaagttatgtattatttttttaatttttaaattaatcacaactatttaagatctaacaactaaaaataaatgtaaccatgatggttatatttgatgtaattattaaaaccttctccttatatatagtaatacaaatatttatcaattttctccacaccacaaacttagctaatcgtctagcaaaacaacaaccagattatcctacacgccctttattatctatttttttttttcaataaatactactatttccacacacttaacttattacaaatattcacacttacatatggattattggcaactttaaaacaattgtttttaatagtgttgactttgactttcatcgtaactcagtcacagataatcaatattctttcccattcaataatcccacaaattgaaaataaaaagtaccctttatatcatttatttatacacacataatttaactatactactgtcttttttttaagggtgcgtttggaaagccactgtgtaattagatttgtgtgtaattggaggtaattacacaatttagcatgtttgtc

SEQ ID NO: 88239 - DNA, 964 bp, Cannabis sativa
ctcctcagttccttcttcaggtttagaatccgaagatgagacggaagggggattctccatgaaatttttggcctttgaagatgaagacaccacctttctccctttggagacatttttggccagaaccacctcgggcttttgaggagtggataccttggaccttattcgagaactcaccgtgggcaaagtcactatagctttcttgacatttggagcatcatttgaagaagaagacttcgacaatgtgtaatctgatgaatgagattcatcatgatcaccaaacctaggtgttagagtagcaatcgaagaagcaatgactggtggagaggcgagattgtaggtcgattttcgagcatgggtcttcgactttctggcagatttcgtcggagcagaagacgaaccaggaactccggtcactggagcaggcggcgcaggtggggtgatcggagatacagaagcagagccacaagagggcttcttggacggttgagcattctttgtttttgccatttctctttgaaaccctagaacacaaacacactctcacacttaaaaaaaattaggcttttgaaaaaaataagaagagatgagagagtggtgatcgtgggtgagagggtagttgagtatctataacattttaattttaattacccaataagcaaaaaaaaaaaaatgaaaaaggaaagtaacttccttaccttaaacaccacgcggggagagaaaaaagggaaaccaaaaagatttttcaaaaattggtcaagatttgcttatatggaaaagagaaacaacatatccccacaaaatctaagaattaaaaacccaacctattgtgaaattgccacaaaaagaggagaccacaaaataattaattatttaagaacaagtttcctaaaacacaaaaaaattgccaaaaataaaggaaacacaatataaagaatgtaataaaaacatgtttccataaatg

SEQ ID NO: 88240 - DNA, 539 bp, Cannabis sativa
tacatcgacggaaccatggcatgtccggctcaattctccaatcccacctcgaaccaagtcgacccaaccttcacaacatggcacaggtataatcgattactcatgagctggctgtacgcctctctctctccgactccatgctcagccaaatagtggctttcactactgcaacagagatttgggtctcccttgaacgcacttactcagccgcctcatttgcacggagctccgactatcgcacggccttgcaaaatctgaagaaagatggtttgaatgcttcagcatatcttcaaaaattaaaatctctgtgcaacaccctcgtctctgttggggaactgatttcttctcaagagcatttaacttatctcttgaatggtctcggaccggagtacaacgcctttgtcactccgatcttagctcggtctgtcaaacccaccattgaagaggtccatgctcttcttctcagttatgaagcacgcctggaaagacaaaatgctgctgcctctttgagctctcttcaagccaactttgcaaatctc

SEQ ID NO: 88241 - DNA, 978 bp, Cannabis sativa
tatattatttatttttattcgctatgtcatttatgtacaccatccacgtaaaatttatgtataatgcatatatatattattgctaataacataaaaaaactcagtaaataaaaaatcaatctcattgagtaaatatatatcgtaatattttttttataataatcaaaatattgatggtatttaaatttatttattaatttaaaaatagatttcaaattaatataatagaagggaataattcaatctcattcttttttaagttatcaacattacctttttaagggtgcttatattactaagagaataacattgtaaggttaaactctcaaaataaacaaggtaatatttcgcattatcattcccttgctagcattaacccattctaaatagctcattagtaattatagaattatatttacagagtttgactgcagtgtacattgtataatcaatttcagtagtgagtcctccatgtgttagttcgtaatgtgttatggtcaaattatcgtttcaccttttaattacttctttatcttttagtattattaattcattaatagaagtataattcaaaagatcaagagagcgatatggcctctttctgtaggagccatatatcttgtagtatgataactcatattttaggattaatttttttttattttaaagaattttcagggttacttgtattgcgaatattggttctaaacttatctcaaaaggcttcagtttgacgggttaagcccataagtggatcatatttcaagaagttagtccatttctttcatctacctatcttagtctcaactttttttcaaattcaaggaaaattgtgtgattgattctagatttgttggcatactcactttccagcacaaaaactataagagatagaccaaaatagggaatgtaaatgcgttgaccactattgattctgtagccttaagcttaacatgcgctgtcaccactccctggctc

SEQ ID NO: 88242 - DNA, 535 bp, Cannabis sativa
atgatgaacaatttttaaagttgctaattattagagtaatttttgtataaaaatattcaaattttatgtgggtgagagattaaaaaaaggtaatattttaagatgatgtatgtacttttagtaactataggtattgtctcttattggagatactctaacttgtccacctgagcaagtattcttcaattttttttactattagagctgtttgatgacatagatacatttttagtattttttaatatagcatcttttacatcttctctttcttatttttttttattattttatcataaagtaagaaaatttatttatttaatatatattatataataatataatagtattttaataatttttagagatgtttacaattggatcattttagaataaaaagtgtgaaaaaataatgtgaaagaaagataaaataaaataaaatatttttaaataatgtgtaaatttttaagactcttaaagaaatattaccattggagatgttagctatatttagatctctattttttactaagtaatt

SEQ ID NO: 88243 - DNA, 628 bp, Cannabis sativa
ctttgttgttggaagctagaaatgtgaagtgcagggtggcctggagccggagtccgtctggcaatatcattgttatctcgatgccggatgtattttcatttgacgacccatcaacgaacactttccatgccagcatctgcggggctggcatatttaaactggcctccgcttcattacattctattatgaagtctgcaaggggttgcccttctatggaaatgcgcgggacgtagtgtatatcgaactggctcaattccatggcccatttaaggacacttcatgaggcttcaagcttctgcaagacttgttgaagccgatgatttgtaagtaccttcatgggatgggcttggaagtatggtcttaatttccttgaagccatcaggaggcaagaacctaatttctcgattaagggataccacgtctcggctcctatcatgttcttgccgacgtagtacaccggacgttggaccttgtcctcttcccggaccaaggctgcactgacagcgttctcagagacggccaagtataataacaagtcttctccgtgaaccggttttgacagtactagtggtttggccatgtgctcttttagttttttgaatgcctcctcgcattctttagtccactc

SEQ ID NO: 88244 - DNA, 576 bp, Cannabis sativa
tggaatccctaaatcagagctgacggccggagtggccacccacctagacttttaggaagactcatccttcaccacctttcccttgcgcttccggtccagcgtggccacaatctcctctcctcctcgacctccccatcttcgtcaatcaagatgattgggcctaaggggacactggaagaagacctcgctggggtcaccttctgggtgggtgccggatgaagagaacattccaggctgtatgtttgggcaagagtcgctaaaagatcctccattggctgggctgcttcaaaaagacaaataaacaaagtttaagaatgtccataaaaaaagtatgcacatgaaaacaaagcgataaaactagtcctaccttaacgatcaaactcaggcctagcgaagtcttgcactacaatactggcttcatcatccccaagaaagttgtcccaggggagaaaccagcaggaagacagataagttgagtgatgcagaggaatgggtgcaggaggtccggaacctatctaggaccggcctaaaaaatgacctatgttggaaaaataaaaggctttggcatgatcaccc

SEQ ID NO: 88245 - DNA, 661 bp, Cannabis sativa
tgttgtggtcttccatgaatctgtacaaaataacatggagcaatattagaattcaccaaaagtgctttgacttgaaacaaaaataataagcgagtgacttttatttgttcgacgagaaaatgttggcttactccttagacatttatttttcttttcaactgggcaagctttccaaattaacctgcaaagagagccagtcatgtaataactatagaacaattctcaacaaaataagtgaaaattattctttctttctacatcaactgcaccaaattaaacttgcaaaaggctttgacgattgtgattaaaattacctgtttcacctctgccaactaagcagtgaactccggtcattttgtcctacaaaatgcagtgcacgtacggaaaatatatcacttgaataattttccacaaattctatgcatgtactcaaaaatcaataaactatttaaatgaaaataatcatttttgctcgattaattacatggttacagtaacaatgagtggaaatacagagtggaaaaatgatgaagaggttgatgatgattacctgtatatacataaaaaaattctatttttgattgttctgaccatgtctgtgaacgaatcggaccaatcatagcaatcgtgctacatcgtaacaatccaaatatttgagaag

SEQ ID NO: 88246 - DNA, 714 bp, Cannabis sativa
gtaggaaaaaaactgctattctcaggtttctcaagaataaaattatcaaccgtatcaacagttgcaatggtaggtttctctcctgtgctggtaaagaaatccttcttaagactgttgttcagtctctaccaacttatgcgatgagtgtctttcttatccctttggagacttgtcatgaaattgagaagattatggctaatttctggtggaaaacatcgagttctaaagggcaaggtattatatggatgtcttgggatcgcatggccacacacaagaattcaggcggcctgggctttcgtcatctccatgattttaatcttgcaatgttggctaaacaaggatggcatttgttatgctctcattcttctcttgcaagctgtctatataaggctaagtactacccccacactgattttcttaatgcggagctaggcaacaatcctagctttgtttggcaaagtatctagagtgctctaagccttgtcaaactcagtgctaggagaacaactggaacaggagaatcaaccaatattttgaagcatccttagcttcttgatcccacgaacccatatgtcaattctcctgagattggtcttgctaatcaaatggtaagcttccttcttgagattcattctaaagcctgtgatactcatctagtcaatgatatatttaataaatgtgatgatgagctgatttttcgtattcctttgagtt

SEQ ID NO: 88247 - DNA, 592 bp, Cannabis sativa
aagaatcaagacactacgtactgtctctcgttgtccatgattaagtttgtttttttagattctccataagttgatatatattaatattctaattaaaattagaaatgattaataattgatatttttgtttagtgaattgagacctttcattttcctaaaaataataagagatttgcattcaaagtgcctaaaatagctttttcaactctatacatattcttcattttttttacaactatgatcaattatgtttttttttacggaattcacataaagacaacaaaaaagaacgtactaacaacataccaagaagtttaagagctttggacaaaaaaattaaaatttagtattttatttttttaaaaaaattatcaatcaatattttataaatttaatttttttaaaaaaatacttcattaattctagaatatgcaataattttaaaatcatatatatattgagactacaattttttttatatgtaagtgcattgaacatttattatatccacgttaccaaaaagaaatattatatatattagaggaattatcttatatattattttttaacttttttttaaatttacggtttg

SEQ ID NO: 88248 - DNA, 851 bp, Cannabis sativa
ttaaatgggtgggatggttaggatgaggttgaattttggtttgatttggtggacgaatgagaaaaggcataaaaccacgttccgttataaaaagcccaacaaaataataataatattttttttttgacattgggaacaaaataataatattagtaactaaaaaaatctgggcattaacaacgttaattgtaagaaaataaaacagaagttctcatcagctccgctaagttaagtggaatttgtttcaacaagtgatatttatatacaatacaaattcctttttgttttttatttttttaatttgtttggttagatcatgatattactatataatttagtgaaaaatgcaatgcctaataaaatatttccactatattctcatcaaataaatacaattatattaggataggcacttcactgtaacttaaatgattagatgctagtgttagatctaatttcgtgagttttacttaaattattaattaatttgctttctctataaatatagaataataattttactaaactaaacgtgaactccttcctctccaatatgtactttttataggaagtatttcaatttaatactaaaagaaaatagttagttatcctacacgaaacaaactagtgttttaaaaggaagaagtaatttggtgaatctctaatccaaacttgtgaactgcattgcctcataaactaataattagtagctagttttggtttgtcaacaaaaacaatgatcatttagatttttatatactaaacatcaatcaaggcactaattaacatgcagagcagttcactcgctcttttccattgccaatataataaattataaattaagcagattt

SEQ ID NO: 88249 - DNA, 727 bp, Cannabis sativa
agaaattctatatttataaaaaaaaagccctaaaagttatagattatagatatatggaaactataaaagaaaaaaaaaagaaaaagaaaattagtgaaaatatatatggcaaccaaaaattgataaactgaacaaaaaaaaaaaagcacagaataaaagtaataattaccagctcacagtataattgaaatattaagagtaaatatagtatttgatgtaataagcccaattttataagacaggagtaggactgggctaagctgacgacaaagagtgtttgttctaaaacagaattaaatgcttaagagacttttttatttggggtatttttttattcattaataaattaaattaactctaatttaatatttaattgaaatatacctctttttatatgtattgtactcaaaatatcctgatataagagtatcttgaagtgacaggggtaaaattggtacaatgtttaaaaaaagagataaaaatgatagactttaaaaagagggtaaaaataaaagaggataatataaaaagagtatagagtgtaatttttttttgggtaagttgaaaaatatcacttttattaattaataaatcaaatttatccctaatttaatatttaattgaaatatacatctttttatatgtatggtacacataagagtatcttgaagcgacacggtaaaattggtttaaaaaaagaggcaaaaataatagagtttaaaaaata

SEQ ID NO: 88250 - DNA, 757 bp, Cannabis sativa
ataaatgataattgtatttgataattaattataattattaaataaataatttttggcatttataggattgaattagaaaatatggtattattaaaagaagaatattgattgaaagaaagtgacaaaattataactagagaatgatcatttgcatggttgaccttaaaagtgatttttgctcaatattttatcttttttaatccatataattcagccataaaccctagttaaaatactatactataaaagcaacattatgctttcactcatccatttgattttcatccagttaaagaacctcaaagctaaatgtggcactttaaagcaccttttcaacactgttctaaccgatcttccattgaaaccaaattattttaagcacaaataatgtgttactcttttctggcaataaactctcctcacaatgtcaataaacaattagagtgtaaggcaagctcattccactaactacatcacccattccataattttcgccggataccaataacccaaatgagttccaatctgcaatgaagttatcaaagctaaaaatcttaataacctcattgaatagctgaaattagactctcacattcaaagtatgagtaaaaattggaagtgcaaatatatcttccattttttattctcacattcaaataatacactgagttttatcttcactttttttattcttaattaagaacaacaatcaaagctatagaaactcattctatcagttgtaccaacagacgcacca

SEQ ID NO: 88251 - DNA, 580 bp, Cannabis sativa
ccttctaaaaattttcaaccctatggcgtcggttattaattattatgctgaaaaaagcgactctaaaggcttgttttgtagtagtgattgtaattctgtaaaagtcagtcatattaataaaatttaaatgtgagaattataaatagtattatagtacgtacgtgacatgaaaataacaccatataatatatatatatatattttaatgcatcatgatgttattacgtatactttacttacgtattatacagtgattacagctccatctacactcatgtgtacgaaaatatcacactattattcctccccacaaatataaatttagctatattaattaatgcaactatatatatatagtactagtatttttactatatatatataattattattagatatcatatgccaccataatttatgtatttataatacatattattatgagctggttatatatccacgtgattcttttatatgtaattcaaatttccaatacaggcattatataaatatttttttaaacaaaaaggaaagaaagaaaatacatgcattaatatataggaattatttcacaaataca

SEQ ID NO: 88252 - DNA, 779 bp, Cannabis sativa
aagtctaatatgtgaatgtccaacttaaagccctctaattattatattattgaaacttaattttttttcatatttattttcaaatcttatagtattttaaataagggttgttcaaattttattgtatttgtgatagtttaattatttaatgatagtctaaactgtgaaaattacaaaattcttaccgcactacaatattttttacattacaagttttgctattttttagttttacggtgttagtgcagtttggaaaagggattaaaaccgcaccattatttgagaaaagaacacgtggtcactcatgcatgaggtactggcaaagaaacgagtgggaaagtgtgattcataaagggaagaatatatatagtaaaatgatgggcattttcgtcatttaccatactaaaaaagtaactacttctctagtaaggagaaaccacttccaatcagatacaatcacttctcaaccaagtcttctctaaattagtaccataataccactcctacaaaataaataaattttgagttttaacttaaatagtttagtaatttctaggcgtaggcgtgttgctttgcgattgattatccatactttaaaaaatttattatattaaattatatgagacttgatatttaattaaactaataataatattaacacgtagcgaatattagataccaatagagaaatgctaaagggcaccagtagtgtctagcaccctcctatgtgttgttcaactaagtaagatcggaagagcggttcagaaggaatgccgaga

SEQ ID NO: 88253 - DNA, 542 bp, Cannabis sativa
cctagtttattgtagtttgagtagtaatatttttaaaactagtgttgtttgctgacttcttgatttcaataggcatacatcaatctttttcacttgtttaaatttagctcttaagccactagtgacaagattgaggtcaacatgaaagttattttctctactgatgataatggattaaaccacttgattaaaattagattaataatttatgaattgtgtcgtgtgatctatatattaggatatcactgaacaaatacttacatatattatatgagcaacaaggtcaaattatataatcatggtctcttgaaaggttaagtcttaattttatttaagtgttagaaattgtccattttattttttattttgaattttaatttgcaaatggttgttagcttgcttacttcaataattttcttttttaacatttaagataaagaggtccatttgtataaaaaaatttaagaaacttattataaatcagaatttgtttttaaaattcttaagggacttgggtggactgtttctttgctctatgctct

SEQ ID NO: 88254 - DNA, 2464 bp, Cannabis sativa
atacctaacactactataagatatcgtcatatatattttattaataattttctataattttattaaaatgtaataagtaaaattttatattaaattgcaccaataataatattatatctcaccagaatcataagcaccatgagtgttagcattaatttctcttatttattacatttgtacactcattgagttgaccattattaaggctttggggggttggttcgaggaagaatgaaattctattattctttaatataattttattttgtcactctataaaccctagctaattaattatcccttattttcttttttatatatttatagctatatttaattaattgattatatacaaatattattaatacatatattttatttatatattaatggaaggagaaacggataagagattcttattaggaaagcaaggcgaaaagtagatataatgagtagtttccttaattgtttccataaatatatgttaattccaagtgtagtgaaaagaataatacactttaattagaactaattaaaattatatataaatacggctttagctttatattctaaaaccaagacactactaaaatattttatattgtttgttagggtttctcttatttttctaaatttttagccacccgcgaggttgtttttttctccgtataggcccgccgatcctcccaaagcttaattgtggcttatttggaatctgtggttttgctactacatacaattagtcttgtttttatggtatagttttgagtgttttttgtttaggttactgggattagttttgtctctgtgacatgattttattatattttattttattattggtttgtctttttgtttgtcgatgtctcgccatcaaattgttgttagtgcttggtaaaaataagttatctacgactgaaaggattggtgtaattacgtaccttatagttaaatgctcaagctaacactaaaataaagatacttttagagacaattttttagtcataacataaatctataataacctaaattttttgtcactaaatgtgaatttcagtcacaataaaaagttacttgtgattaaaacatagtatttagatacaagttttcactaatttagttttactcacatcaagtattgtgaccgaaaatacatttagtcacaacaaattgtaattttcgtgactaatatatgagtttataattagtcacaatatttttacttttagttacaagttttatattgcaactaaaagtaagattttttgtaatgataagagtggttgaataacttgctagaacatatctactatattttatcttttgagcggtgcagtaaactgaataatataagtattcttaaggatataacagtaaaattacaattttttttatctaactttatttatttttttttttttgtaaaacgatcgattcgagaatcattggaaccaaatagttggtttgttttttttaattctaattctagttgtgttttcaataaagaaatatcccgaataaattacagatcgatatgaataaaattgtttcttaaaaaaattatatataacacatcttacgtatattaattattatatgcatatacttatatgcacgtacgtacgtagtatttaataagtaattaataagttttacatatatgtttgcttctctaattcactcaatagtttataatttatatttatatttatatatataatccttctctcttttcatagattggattttcaataatattaattatttatatcacacttccaaatctaaatcggtgataggattttaattaatttttttttatatatatatatttagaaatatagatatattttcaaaatgtgtgtggttgttgttaacttcttcaattaattttgaaacttttgtcaaaataaatatttgcctatatatcgatctggtatatataatgatcatatatatatcaaagagaaaaagaaaaaagaaaatgtccaaaatatatatggatattttggtggtgaggccaacaataaatgaaagaaaagaagtgatagatcgaatcgaacacatttataattattgttatttattaattataaagagtactaactagtacgtactacttattgtacgtgtacgcctaccacttttctataataataataataataataataataataataatatgtgcacagctatatatatttgccaaattaattaaggtttttatctttattgttgtgatacaaaaatacaacaaaacaaacaaatcaccaactaataacaaaatttaataatgcagcaaaaaactaattaaagtaaaatgaacaagtacaacacataacttttacgaggttttgatgatccatgatcaacatggttagtacttatggcacgtttactatacagtaatcagaatcagaataaattaatggagaaatgtaacggaataaatgaaaaataa

SEQ ID NO: 88255 - DNA, 544 bp, Cannabis sativa
  modified_base (43)..(73): a, c, t, g, unknown or other
aaaacctttttcttttggttctaccataataataataataatnnnnnnnnnnnnnnnnnnnnnnnnnnnnnnnataataaatatttatttattaattgattatatttccataaaattgattgtaaatatttaagttctaataattataattactgactaattgtaattattgttaaaaagttatattaaaatacttaacattaaaaaaagaaaacacatttaatttaatttagtagttaactcattaattgtaataaaaatatgaaaaatatgaagcacaattcaagcctataattcgtataagaaaatatgttagcttatttaagaaaaacgggacgacttaagtaacggatgatacaaattcgagcacaacacaaaaataatagacttatcttataatattattgttgacacatcacatacccatactttttatggtctaatacaatacaacccatatttttgtacactttttacaatacaagtaaggacagaggcatgatctcaaactaaggggatccaaatgcaaaagaaaaatattaag

SEQ ID NO: 88256 - DNA, 635 bp, Cannabis sativa
tatgacgataaagacagcgcttctcggaggcaacccaagtattatttttctttagacttttgattatgttttagtatgctttagtattgttaatgttttcaatttttagattagtatcagacattattttttttaattgaatcgtgaaaagcgtgaaaaaaaaaaaatttcgacctgagcccagtagtcgcgactagcctttggcctagtcgcgacctattttccaggtcgcgaccccagtcgcgacttcctgattttccagaaaggcaagaaattttatcgtgagctagtcgcgactagccttagagcaagtcgcgacttgctcaccaaaatttctataaattcacactttccccctcattcaaccctacacaaacaaaattcaaatttcaaaccatctcagccgaccctaccctcttttcatctcaaaaattcaatttttcatctccaatcttcaatcttttcatcttttctcaaatttcttaaacccaatctaatcaaaaacccaatttcactcaacaatttacacatagcatcaaaacccacaccaaaaaaataacccaaatccaaaaatcaccattgttttcaccttcaacctcaagctttcaagaacattcaacaatggaggtggagta

SEQ ID NO: 88257 - DNA, 545 bp, Cannabis sativa
ttccacggaagctgaattcagaagtctcgccaccactgtgtctgaagtgtcctggatccaatctcttctcaaagagttacatatctcccaaccaagaatccctacaatctggtgcgacaatcaaagtaccgttctccttgctgccaatccagttctccacgcccgcaccaagcatatagaaatcgatctctattttgtgcgtgataaagtccttcaacagcaaatctgtgtcaatcatgtacctgcaatagaccaaatagctgactgtctcactaaaccaatatcgagctctaaatttcctcatctcagatccaaactcaatgttgtttctcaaacctcattgagtttgaagggggctgttaagggtgatacaacagtaggaagttaagttttggttatgtgtcaactgtctgtaactaactcatcttgagttgttagttttctgttattggtcttgtacattgtatataaatacagaggtcctctgttacatcaatacaagatttgcttctctctctatctcattctctttgtctctctctctc

SEQ ID NO: 88258 - DNA, 813 bp, Cannabis sativa
aggacagtataaatgtaaattctgccgtgtggcagtaaaattgaaaagtattatcccaaattcagtatttttgtaaaatgccctagatatatgtatagaaatatatattgaaagggcgggatacacgtactcatttatcaaccaattaaatcatataaaattaattatttcagaacggttttcgactaaattttaattaatatatttgtttaaattaaatattttataatgtagctagcttagctatatgactttttaattcgtggaatagaaaaaatatttggaaagataagaacataccagcatatgttaggttggccttcaattgactatatagtagtgcatgcgattgcgaagtgtcctttttatgccccaatgttgcatatataaatattgacatacttatatacgtttcagaccttacaacgcatgcataccctattgaaaacctctactttaatttgtagtttaatagccctattgtaatctgtaaaccactgctttaatttctaattaataatttatatatatatatatataaaagtgttataaaataatgtaaattaaatgagaagaagatgaagggagaaagagaaagtgaatgagaatttctcagttctttattctactcggataaactcttatttatacaaaaagtattgattaaaggaatgagaaactaaattaatatataataaaggaaaatacaaccaatcaataatggtgataactaatttggtgatttggacatccataaataatatttcataatactcccccttggatgttcataataattgcctcaataaaaac

SEQ ID NO: 88259 - DNA, 871 bp, Cannabis sativa
  modified_base (332)..(346): a, c, t, g, unknown or other
tatgtaaataaaatctaaaaactgtaaaaatatttaaaattttttacgtatttttgtaatttttttgttgtttttgtgtttttttttttaaataatccttacatttatgttataagtttaataaaaaaataatataataataaataatatatcttcttatgtaatttttagttttcttagagaattaagtaatttttaatgtggtgccaataataatctacaattttatagtacatttgctaataattttttaattagttttttatttctttaattagaaaaataaaaatgttttccaaaaatatagtttataaaactgtttttacttttcnnnnnnnnnnnnnnnaatcaaaattttaaaaattttaaaaacaaaaaattttttttttttttaaatagattttttcttaatcaagattttggactctaaccctaatctggatcttgggacacaaactcctgccctggccccaattccagtctcaaaccacagccccgaccctagacatggacttgaatccaatttaaataaaatcaaaaaataaaaataaaaatgaaattataggatacacttttattttccgtttttaaaattaaaaaataatagtgattatagaatatatttttattttttaaaaaacataaattttatttttatttttgtgattaaaaaattaaaaaacaaaagtataccaaacaacgccttataatgtaaaaattatctaaaaataaatctttaaaataaattataagatttatatcaaattatgaatatatcaaagcacattaaattaaaattttaatgaacgactcattcgaaatgttttaatgatttttatgatgtagaaaatctaccctcaaattaagtaca

SEQ ID NO: 88260 - DNA, 638 bp, Cannabis sativa
ggagagcatgccaccttttcccacttacggttcccaaggaatttgcccgactcaaggccaaacacaacaagtgggtcttttcaaatccggcccatccgccctcccacaaaactaccctcaatggaaccaacctgatcccattaccaacacaccaactcctaacccatcccatactctcccacccgagaccatcacaccaacatacaccgcccttcttaacgccactatgagtaatactaatgtccaaaaagcctcaccaatctacacaccgaatcatgccatcacctcccaacattccagcggctccaattccactagctcaaaatattgccacgtgcctttgcccgagaacatccctctccttgacaccagcaagagactcgaagccatgaaccttacctaccaaccgggaattgctaccccctcgggttcaaaggcctcaaggaagagaagcaagcccgattcaaaggacaagttcaaaaggcaaactgaaatggtcaacagagaacttcgccatcaaatcaagcgttcccgctccgacatcccacaagtcactgaaatctcatctggaagcgcaggcctagccaccgagcaggcctgcccgccgccatgaagcttgtcagctggaatgcacgtgg

SEQ ID NO: 88261 - DNA, 880 bp, Cannabis sativa
tatagccaaaattactacatacatacatatatatagtacatagagattgtgatttaatacatatatagtgtaaaataattataaataccttacttgacgggatctacaagtaattccatatgttaagagatcatttaaagtgctcaaccactaactaaagtatatgaccaaagattgttcttagtatttttatttattttggcattatagttatttagaaatattatatatgtaagtttttataatatatagtaatttaaaatattaaaggtataaaattaaaatattttgttacatgattattgtttttttatataagtacggagtagactttatttacggacattataaaaaaaaaaattatctttggagataatgattttttaattatataaataatttttttgtgattaaatataatatttttagacgtcacaataaaatattacttgtaattaaaatatagtatttagatgtaagttgtcattaatttattttaatcgcaataagtatattatgactaatcacacatttagtcacaataaattataatttttgtacttttagatcatggaacttttagtcacaatataagaataataatttataattaattacaatttttttatttttacttacaataaaaaaatttctaaagatttactaataatcttaaataattatgtgtatatattaaaaacttgactacaaaattatatgaaatgtcaaaatagggataaagaatatatcaaaataactattttaggagtgtacatctttatacaattatttgagaattaaatatggttttatttttatttttatttttttgtcaaggaaaaattatatggtcttccaataaattctagatacttcgtag

SEQ ID NO: 88262 - DNA, 1387 bp, Cannabis sativa
  modified_base (437)..(438): a, c, t, g, unknown or other
tttgattttagtatatcattgaaattgttgaatctcatgcaagagaaaatagatggtgagagtgcgactaagataaagaattgatagagagagagtgatcaatgatagctatggttaggaatgaagaatcgtaactgaggatgaagaaaaatcacactatacggtgggggaaaatatgtatatatatttgaacgtcttgtgtttgcttttgaaaggttgtacgtagaaatcgtaaaggttgttggtgagcgagctatttgaaatattttttaactgtttatcataaaatatgtttattttttttgttattttaataaaaaattaaataagttatttaataaactgaattgttttcgttagaataggaatgtttgatttgaaatattttaaaagccttaacaaataacagaattggaaagattgtttaattttttggnntaattattgggtttatttatttgttaacgtttaaggttaatcgtgtaagactaaataaaaaaaagaatcgttaaaccaagaatcgttaaaccaaaaattaccgttagataggcacttttaatatataaagatatatattgctcactagctatatatataattaacaacactagtaatcctttactctagctatatatataattatttgtagcttattttaaggttgggaattgacgttaaaagaacagggaagcaatttaacattcggaagttagacctaaattaaattcttataagataaagacaccttttaaaaaaatatatatatataaattttttaaacacataagagtttgtgagcacgacacatacgatcaaaatagtgatatatataaaatactgaatcagttgtcttttttatttttagtgttcaaaataatttaattataatgaatattatgaagaatataattgtagaaaaatgtgtaaattgtgtttacttatgtaggataagaaattttcatattctcattaattgaattatattgtttgattgaccacaagaatcttatatattattttataaaattataataaaaaaatattttttattatttctatttaatgttaagtattcataaaaataaattaattatttgtaaaaaaatatatttattaattagtaaatctataattttattgcattttttattaattaaaatgaacatctgtatatatttattatgtcatttatcttcgttcgttatgctatttatgcacatcatctacataaaatttatgtataacgtgtatatatattattgttaataacataaaaataactcagtttaaaagaaaaaaaaatctatctcacaaactaaacatatatttgttacgaaaattctgtttattacgcaagtgtacgtatcaagtagtatctcacgcaagt

SEQ ID NO: 88263 - DNA, 515 bp, Cannabis sativa
tctggtgggggtagcgagcaagaaaggagaaattcattagcacgggtgattagaggtttgtgattcaaagttctttgcgagtctggattttagatctattcaccatcataatcaggccatgcttgcaaagcaagcttggagagtcatgtccaatccctcttctctcttgtcttcacttttaaaggctaaatacttttaacgaaatgatttcctcactacttcaaaaggccattactcctcggctacttagaggagtctcctttgggggaagagatctccttctcaagggcctttgttgaaaagtgggcaatgtaaatatatttctgctatcaactcaaattggattcctcatttgaactcccccagtcttttgaatggtcctccctctcctacccttactatgtctatctttattgatgaagctggatgtcagaatatcactaaacttaatcttttctttcctctagatgttgtggatgccattcttcaattcccaattgatctttcttctgctg

SEQ ID NO: 88264 - DNA, 617 bp, Cannabis sativa
tccaaataaaaatagaataaccgcatgttatgtattgtgtgtagaacggtatacgttgacaattaaatctaaaaattcttgcggcctttgataaatttcgaataaatcaatgggggtaagagtttcttgttgaaagatctaaaattttaaaaaaatatataatcgcaatgtcattttttagttttttattttgtttttaaacactgttgtgaatcgctttgatttactttataatacacagacacgtcctttattatattgttttggttagatttctttttttgttttaattttaattaaagggataattaataattaaaaaaactaagaaaaaaaaagaaccaaaaattcttgaacaatgcatttttacgttacgacttaaatagttttgtgaagtcatatccgtcaaaattcgctagcaaaagacttggtttttaattagttaaatgggtcagcgtttcctaatctcattaagtcctctcggtactgctctaatttttatgattcttttttatcctattttttaattacacttgagttgcttgtttgacaaaaagtccctttatatataataatgagattgtagtgggtataatttagtggtaaaagtgtgattc

SEQ ID NO: 88265 - DNA, 850 bp, Cannabis sativa
atatatattattatttgtattaaccttagtttataatttaagattattacaatataattttttcatgaaaaaatttagattattacaatataatttaaaatttaattttaagttatcggttatttgagttataaagttattaatgttttttaaattatgatagttattttaatgattgaattagttctcgtggatttacttcagacactaattacatttgacaagatgagttatttcctatttctttataatttttttgtttgaaatattttctttatagtgactattgttagtattttttttaatgcttatttgtttatttgtagtaaaataaaatataaatttgtaataatatttaattactcattattttaattttcatcccactaatatattgtttggttatgtgcagttaaaacattattgtcccttcaagctttgagagaaatgatagcgagttttcagaacaaattacatgccgctgatgatgacaatgcattgcagtctgttacgaagattttacaactatgattacttttactatcagagttcccgctcaaatgattttttagatcattattagaagtttttacaagtttgttgcacacaaattagttgtgcatgctcttcggatgaataaataacttgtttggctagatatgaatatccatattttttttgggtgtatagtattattttgattatcctcccaagagtagtatttatttgacgaacatatgatgtatagtattcataactagcctgtatgatatttttatatttttaatgaatttattcattgcaaaaaaaaaaaaaattaataaactataccaaaattactttttcaaac

SEQ ID NO: 88266 - DNA, 828 bp, Cannabis sativa
  modified_base (503)..(503): a, c, t, g, unknown or other
ttttttaacaacgaaaaacttcatttaaaaaaaatgaaaatatcatacaaactttaagaattattaagaaatcccaataaagaaatctcaataaaaaagaaatcttatcaaattatactaattctctatccacccaaagagtatgttgagctaatctatatacagacctattagctgtcagacatatatggattaaggatacttcaaagaaactggacattaaactagttaaattctctaacagagaactaagtttattaaagaaagaaagcgtttagaaaacgtatttacaactgttaaacaatcaaactcaataaaatgtaaagaaagactacaaactgattgacaataacaaaattaaaaaaaagaaatagatacaattttctttgttccaaatcttacaaactgaaaataattacaattaaaattgcctagaaaaaccataaatgagattttatttggagagaagtttcacaatgttaccaaacacttcatcaacaccnagatatagaattatcccaaacttaaaaacagtacagtactgaaacaaaatatatgtaagaacaaatacatacaaatgggatttacatgaaagaaagtaagaaacataaatcttttttattgaaccaaaatcagaaaactattaaactttctttagccctggcccttacaaaccaaatctttctattcagattattagaacaaaatctggtatgattcagtattaacacacatattcatattgtaacgtttcaaatggtaataataatcttcgaactaaacactataaaacctaactattattaaaaagaaggaaaaaagaaaaga

SEQ ID NO: 88267 - DNA, 750 bp, Cannabis sativa
aatttaaattatatatccttcttattttattactatttttttgttttgataaaaaagaagttttcctatttttgaattggacaggggactgcaaacttactatagcgatttttaaaaaaaaaaaaattatgaaaaaatgtagtaatcatgatgatctccatttacaaactatactttgtctatttttcaaaataattcttcctaacttcaatttactttaccttaacagtgtgtttggcaggagagtttttagaagggagggagagcaatagagggagtgtggagatgagggattatatttttatgtgtttggcaagatagataaatggatggagaggagtgttggagggattaaaaaggggtaagttgaaaaatatcatttttattaatcaattaattaaatttacctctaaatttatatttaattgaaacatacctttttttatatgtattgtacccaaaatactcagacataagagagtcacatagagagtatcttgaagtgacaggggcaaaattggtaatgtttaaaaaaagaggtaaaaatgatagatttcaaaaaagaaattaaaaataagagaacaatataaaaatagtatagagtgtaatttcctcgattaaaaatcagtcagggcccaccattttgcatccttcctttattggacggattgtggaagagagggtgaaaaaaagtgggaaaattgaaaatttaccctccaaaataccattttgtttctctctctctctctc

SEQ ID NO: 88268 - DNA, 514 bp, Cannabis sativa
catcaaaccattgattcatataatcatgtaatacccaacaatttgtgcatctgttaaatcacgaaaatatttattcacccaataaatgaagaaccatgtaagcttcattataattccaagttacgaaaaacctccgtagtgcaagattcagactctgcttaactaaatgagcattacaatcatgttaatcgcttacccgcaaagccatttttttgagtttgttcatagcagagaattgcttgaggcgcaaaagcacagcagaatcaagaggtttatctgttggaatcctgtcatctacaatccaaggatggtctgaaagtaaaaaattcttactaatatactgaattaaaaatatatatatatatacgcatagatgagctttcaggaaatttcaacaatggtgaactttagaataatatacagatctttcgatattttgaattttgaaaagaaatctatacattaatttgctttttgagagatcgattcttacaaatttatgttcatccaacct

SEQ ID NO: 88269 - DNA, 546 bp, Cannabis sativa
aacaaaaaacagttttttagttttgatgtcaaacatgcactaattttttttttaatttcaaccattacaccaaatttcatatttttattattttattaatataataacaatattttaatactaaatatatatagttatttactttttcttctttgaagtattatttaattattaaaaattcttttttaaaaaatagtgtggtctacagtgttctactaaatttggtagaacagtgtagacaaagtcatttatgaggataagtttagtgtcccattgaaataaatatagtgtgaaactacactgtatttgatattttagtgtctcattggagatgaccttagtatatatagacaaggatattttatattattttatgggtctaacttaatttttaaaaaagtattgttattagtggtgtttcacattttctacatacattgtcttggtattagctagcgatatttgacccaataattaattaaactataacaatattgataagtaaaaaattagtaagcactgataatcacaactgatgtcgtttac

SEQ ID NO: 88270 - DNA, 593 bp, Cannabis sativa
gtcgccggcacttaggctttcgatttttttggtgcgtggggccgggtggtgaccgaaggtgggtcgccggagtgtggttgttatggagcagctttgtgggttttcttgttttagtgtttggagagagagagagagagagagaggggacgaaggggtactgttatggtataatttaatttttttttacgtatatataaattatattatttattatatatatatataatacctttttgagaggtcttacatacaaccttaatcaagttatgttttatttgtatagtatttttatatgaatgtatattatgttaatttatattaatctatttgtattatgtttattttatcttagttgtatttatatttatatattttctacatgcagtagtttaatagtttgtattgtaataatatatgtttttttttttacattgataatattgtttttattattgcctctaattttaaaaaactctatttttaataaacaagtaaacaataatcatcaaatgttttacttaaagcatatatttgttaatataggctttttcatttttacacttcaaaatatatatttttttttttgcattttt

SEQ ID NO: 88271 - DNA, 509 bp, Cannabis sativa
ataaatatacaccttcatttaatccctaaatatatataacaaaatataatatattaaattgggcctgatgagattctttttttgatttttttttcaacatttcattaattattttataattttaaacttatcaaccatgaaaaatgaaaaattgagtcaagtaaataaatggtttatcacacatgcaactaactgtcagtactaagttttgtattctctttctcacatacacaatttgtaatatgatccttttatatatgtaataagaatacagtcaatgattaagtgaataatagtggtatctctttatctacatttttatatctttttttgtcagtaacaaaattatcatattaatacagaaaattgtgtaggaaatgcaaccaattacagttgaataatgtctcatctaaagaagtactaatcatgtaaatttattggcctaaagtcacctattgaggatatttcaaacaatgttgaaaatcgaggattgtttttttttttttttt

SEQ ID NO: 88272 - DNA, 1625 bp, Cannabis sativa
  modified_base (713)..(713): a, c, t, g, unknown or other
  modified_base (1319)..(1321): a, c, t, g, unknown or other
atccactgggatgagacaggggagaagaaatacttaggtccagaatcagtacagcggactaatgaagcaatcaaaaagattaaggccggaatgcttacctctcagagcaggcgaaagagttatgcagatccaaaatgcagaaatgttgagtttcaagtaggggatcatgtgttcctacgagtgtctccaatgaaggggatcaagcattttgggaaaagaggtaagttatgccctacatttataggaccttttgagattctcgagatggttggacaagtggcgtatcatttagctttacctccaactctttcagcagttcacaacgtattccatgtctctatcctaaggaagtatgtgtcagaccctgctcatttgttcaattatcaaaatcttgagttgcaactggacttgtcatatgaagaacagccaggttagatttcgacatgagagctcaatatccagagtttttcaggttagatttcgaggacgaaatccttttaagggggaataattataaagaccgcttagctttaattttgaaattaatagataattaggatttatttatgaaacttgcatattagtcttgaattatttattaatgatgatttatttgaattcagaatgcatgttataagtcataaatagaattttataattttgcatgttttctgcccaacaacattgaaacacggtgtttggctattagaatnacatcttagtatttttagtatagtggggcagtatagttagacattgggcatgtcaggaatagtcaagattttagagctgactaaaatccccctaagtgatccttttatttatgattttttttagttagtgtggagaaagggcaaaatggtcatttttcctattggagttttatcattttgtgagttttaataagttgtttaaacttgatttttattaattaataagctgatattaataataaaacaaaactatttttcattaactcattttacaaaaaatatcaaaattggaaaaatggagaaaaagcctctcactgtcaactctctctcttttgaaacccctagaaccaactagggttgggtgatttttttctacatttctagcaaagttcagcaagatcatagtgtatctaagccaaggtaagctcctaccaacttcccctttggttatcttaagtttcaagttaagaattttgttgattttgggtacttcagttttgtagttactatggttgtttgaaatgtatttttgtagttagaatatgtttagatatgttgaattaagcatgttttgatggttgttttgttgattgagcaagctttgannnttagaactcaagcttggctctttaatggtcattttttattctgagctttggtagttgttttgttgcttggaatatgtctactgaggtataatatgcacgcttggaaggtttggtaaggattggaatcgattttgttgagttttggaattgtttgggttttctggctaaaccggctaaccggttttacaaggcctgtaaaatcggttatctggatatttgttgttgggttccctgaaaaattcatgttgtcgattcgtgttattttcaaagccttggttgattaattccctgctagttcagggta

SEQ ID NO: 88273 - DNA, 841 bp, Cannabis sativa
tttttttttttttttatatttagatacttataatcttaagttctattatattacatatattatcattattacacactacaaaatttgaaataattaaggttaaaatagtctagtgcatcttttattttatatacatgtaaaataaattatttgaagtatatatacttttgtattataaattatatctttttttttgtaacatttgcaaaatattttaaacctaactacgatatattgtcatataaaaaaattaagattatacctctataatatagaggtgcatgaatacaccatagaagtgcccaatattatttaatattactgatattatatatactaacgtgcatgcatttgttaaattaaatatatataatattgtatactattttgacttaatgaagcaaaatttatattcattcaatgatgatcattgagaaaagcgttttatttctttttttgagtacaaagagaaaagcgttggatgagttgaattttatatatataaatagttttattataaggtttccttattatatcattatttgatccagatccattttaatatgtatttttatacattttaatttaataaataatataaaaaaagttaattataaaaagtcatttaaatttgatgttaagaacttcaacatacaaaatatctcaaatgctctagctagtagctagtatatatattgtgataaaagtggaatataaataaccaattataagaagaaaaggaggaagacggaatcatagataaaaattaaaatgtaagataataaagagttgaaatattcttactataggtgaaatattttataggataaacacatatata

SEQ ID NO: 88274 - DNA, 630 bp, Cannabis sativa
  modified_base (593)..(602): a, c, t, g, unknown or other
aaaaagaaattaataattaaaaatacataaaatacacatgaatgtaacaagttggatagttggatatatgatttatttaatttaaataattaaataattttgaaaatttaaaagaaaaattattttcgaaaaaaaaagaaaaaaaatttaaatttaataattaatttcaaaattaaacctataaatttaaaaaaattaggttttcaacaaacctaaatatctatttcaaaatttgctcacaactatttaaatttcatgttattaaaataaaattaaatattcaataaaataaaatgataaataaatatcgtttagctaattttacaatttaatttaaaaaaataaaaaaaaatttaaaagttagcaaaatatcttgttacaattaaaatatcttgattaaaataatgttattttaaattttaaataaggtcattttattaaaattatttaaataatttaaaatataaaatatctcaccttaaatttaaaaacaaggtaaaataatcaaattataaaaaataagagaaccaactaagcaaatagatagatttttacctatttttaaggttcaaatatcactaatatcttaaatnnnnnnnnnnaaaaatattaattaatttaattctgata

SEQ ID NO: 88275 - DNA, 651 bp, Cannabis sativa
ataatcttgcgtatttaaaaattttctagtatctaaataaatttactttaaataagtaacatcaacacatcctatacagcagagaagaagttatttttaaaaatttagtttcttataagttattttagaaattagttgatatttgaaaatttgattttttagtaaagaaattaaaagattacttttgattttaattattttttctgactacggtaaaaaacaaatgcttcccatatgttaaaacgatccccttaaaaattagattgcggtgatataatttttgagctcaaataattagtgatgtaacaattttttttttttttttaactttttttaaaaaacaaaaaggagaaagagttattttttttttaatattaaacctattactttactatttaagtggaatgaaagtaaccaatgaaatcagaattttttatatttttattaattaaataaatattatttaattatttttttaactttaaaattatttaataactttttttattgaataatacttaccaaaaaaaatacattttatatgtttatttacagtttaacaaattttaaaactatttaataattttttattgagaatatattagtggaccactaatatgttgacacgtgtgaacttagtctattttaata

SEQ ID NO: 88276 - DNA, 751 bp, Cannabis sativa
gcagcagagtgtccatatctcccacacacttgacaagtgggttttggaccacctctaccacctcttcctcttccatttgaccttccacgattactgctgttactgttgtttcctcctctgcctctcgagtttcctgggttgtaatttccaccaccagcagaacctttgttagcaaggttggctgagggagagccattgtttccatgtttgctatttccagagaaggagctgagcctatcaagcttgctgtcaaagctcagcagtagatcttgaagagtttgccaagttgtcttctctctagcttcaatctgcagtacaatgggcaagtattccatgtccaaaccagaaagcacgttagaaacaaggagggattcagggtaaggatcacctgcaagagcaagaacatctgcccattgcttcttttgcttgaggtactctgtcatgttcatggagttctttctcacagtctggattttagttctatattcatccattttagcctttgaatgcgcaccaaacaatgactctaagccactccacagatcagcagaagaagagcatcccataacttcagtggcaatgctctcagtcattgacccatataaccaccccattagcaattgatcgttaacaatccactgctcaaactcgggattcatttcagaaagagttcctggttcaccttcaacaccaggtgctgaaatgtattcagctggtcttaatctggctcctgttaagtagccatcaagac

SEQ ID NO: 88277 - DNA, 507 bp, Cannabis sativa
aaataaaaaaaggactctcttggtttccttggaaaattaatgaaagagcttccatagtttttctctttgatctctttgtgaaacattgaacactgaaccagttcccttgaaacccttctatttcaactctttcaaacacacttctccaaatcactttccttgcgacaacacgtgtgaactatgactccaaattttgcaagttcctctactatggcatgcctagaaaaggaattttctttgtaataaccaaattctaacatgactcatcaattttagtgtagagattcatattagctttcatatttcaacttaataggaataataccaacaagtgacaactatcatgaaagcaaaatagtaataaagagaatgagtcatgttagaatcaaatagaatgcatatcaccataaatcgatgtactaaaattcgaatctggtgtaatggatgagaatgagaggactattctgaatgttcattgtcctttaaaatatgtcaactgaacatgtt

SEQ ID NO: 88278 - DNA, 1021 bp, Cannabis sativa
aaaaattttacaacaaaaataatataccttataattttttttttaatatactaactattttctatcatatttttctccatttgacaactttcacatataataagaagtagaaaaacgtctaccattttcatcttttaggaattcgatgtctcttacttttattagaccattttctactaataattctattaatttattatcaagagttttccaatttcctggatcataaatacaatctaaatcatttttaggatttctagttccatgctctctttaatattttcttgactttcttcatcatccatcacatcatcacatatttcattattagcccccaaattttctctatttaattgttcattagttttttcatttgaattactttcatcttttttgttagtgacaactgatttttctaaagctcctctctgagagttaattaaactttctatttttatttttttttttattttttttttaagtttttcattaccatatggatattttctactagacatacttattttaggtaggaaaaataaacttagaaaaaaccacaataattgcaatgaaaaaataaaataaaaacctaaactattgcatatatatagaaattaacaacaattaattaaaataataattaaaaaaatatatatgtgtaccttttatatatatatattttttcttgacctcttctatgcaaattgcaaaccaattgatttgaaggagaaagagtaatgagatatgagagcaacataaataataaaatatattagaatatataaaaattgtgtaaaactaaaacaatctttacaactatatataacagtttcatatttccaattcaggaaaaaaaaagataaatgatgtgtgtaaaggttggaacttttaaaatgccaaccgattaaaattttggaaaaaaaaccccataaaattaggctaaaactaacaataaataattgacttagtttttaattttggaaccatgtgtgtattaagaacacaaatttcattatcagtt

SEQ ID NO: 88279 - DNA, 1718 bp, Cannabis sativa
cagttgtatatgcctccaaggtcgccacaagactctaatcgcggtccaaaggggagaaaactggctgctcgcttacagcctaggacttggttggctagggttccatgtcctagaggtcgaccagaccccaagacatagcttaaaggtcggccaggaaccctagttccacgcataggccggccagccttgggacacagtccccatggctggccaaaccccatggaagccatccatggttggcctagcttcaaacaaagcctccttggccgaccaacatgtacatggatcaaaacacgtgaattttaagaactcaaacatgttctgtatgttcttcgtgttcttcgtgactcaaagagccaagaatcacaacaaaggttagatttagttctttttcatctaaaaataacacattgttcatcctaaggctatcatgcgaatcaaaataccaaatggattacaatctaatgtaagaatcaacgcatgttcaaaacaagaaataattttcatgcattcatatcaaaattattcaatcaactgaaagagaggaaatagaaagctaacatgcaactagattctgacgaagatgaagacgagaagtttgggtcgttgaaatatcgcaaaatcccaaggagattgaagcctagagtttcatccacttagagaggaggagggcctttttcaagagaaaaattctagtgagaaaaagtaaaagtgaaaaataaaagtggaaaaaaggattttcccccaaaacttacttatgtacacgtgggcccccctttttctcacttacttcaccaactccccataaaggcacataaaggagttattttttattacaccaagaccaaacaatcaagacaaaatgcttcaacatgcactctactcaaaagtaatcgtagtcctgacaacatcaatcttgctggtaaagtttctatccgtacagacatctacacaaggacttgggggacaaatattatcaaattttttgtcctcttgacgtggcatacttacgtggacagaacctatgccacgtggtagtacaactcactaaaagaaagtccaagtcagcatccaaaccaacgaagaccccatcactcaaacgaggatcaagtgacaatccaactcgctctcaggagctagctagccacccctagccggccctatgaccggtcaagctaggaaatagcttcatggctggccagcctggctagcacaaggccatgggcggccaaggattgctcagtgggtcccacaggacacacttacacgtgggcatcataagtgggctacgaattgggacccaaaagcccaacatatatgctgagaagtatctagaatctaggggcattttggtcttatgtaaatatctagctaactatcctattttcaaggaatttaagttgtaaacctttgatttaggcctcctctataaaggccttaacctatagctgaaaacgtaagttgcttaagcctcctataagctagaaacctcatattctctaagtgtcaactctctctatctctccctcactctttcacatagcatagggttgtacaacactctaggatgccgagcactcgagtctgccagactttgatccgtacattgtaatcttaaagggctctatagcagatcccacctatagcgatctggatagtaattctctcagtataatacaactaaaagagagtaggtcattactcgctatcacaagggg

SEQ ID NO: 88280 - DNA, 619 bp, Cannabis sativa
aatttaacaacaataatatttaaagaacagccattgcaacagtaacataaaaaaaatcaaaacaccaagccataccataatcttcttcacttcatatgcatgacacacatcatccaccttttgatttataacagccatcacagattctgaaaaaccatcatcggtacccgcactaaccttctcatcaattccctcaactccacctacattaccaccatgagaacacaaagcttcatcctccaccattgcaacaatctcattttgtcctaataacgaacccattatgtcaaaatttggcatatcctaacaacaaaagcaaatcaaagcaacaaacaaattagttaacaacttaagagaataaaaatacaataattacacaaaactgttctataaaaaaattaataaacaaaattaacattttccaaagaagataaaccagcaaaatcttgactatcaacttctttcacagacatctcatatatgtttttaatttcctgtacaatataatcagaaaagaaacaattaagtagctaaaattataacagagaatattgaataataataaaaagaaactagaccttataaacatcactgtcaccatgattaatgctcaaattta

SEQ ID NO: 88281 - DNA, 628 bp, Cannabis sativa
  modified_base (45)..(46): a, c, t, g, unknown or other
ttttgtgtatatatatgtatgtgtatataaatatatatatgtatnnatatgtatgtatatatatgtatgtatatatagatgtatgtatatatatttatgtgtatatttatgtacttaaatatatataactatatgtatatatatgtatttaaatatatatgtttacttatatatatgtatgtatatatatgtacgtatatataaatatatgtatgtatatgtacatcaataaatatatatgtatactagtgtagaattgtatttattatttttatattttaagctttttttagtaaatatgttttaggtgttgctttacttgttgcttgaaaaaattcacttcttgttatagttgaaggttaatatgtttttataatatgttaataaaaaatagttttaatattatattcaacaaatttatagttttggtgtacttggtcatacaccatagaataacgttgttctaaactttatttgccaagtataccaagttatggatttacctgaaaatatctattagtaaagtttaaatattttatatattcatccctagtgaagtaagttttgtaaaaataaacaacattcagatgggtggcaaatattattatgtttgtaatttttttttttt

SEQ ID NO: 88282 - DNA, 737 bp, Cannabis sativa
tatgattagttgctgctgatgatgatccatagtgctgatgatgattagaagtattataagtttgagctaattgagctttggcttgaatcagttgtgtttgaagacatgtcacctatatatataatcatcataatatatcaattaatatgtaacataaagcatcatcatattatacatataatgtaaaaaactaggccaaaaatgcaaataaatacataaataatttttccaaaataggagaaaatatataatgggggataaataattgtggaaaaaattatttgagaagataaattgttaataactatatatgcatatttatatttagaaatataattaaggatctatatataagagatatttatatatgtcttttatttgtgattttgtaattgccactataattttgacaagtaatcatttttctcttttataagataatcaacaaatcctggtgagaaatatgattgttatctcaagattaattgataattagtataaaactcttgagattcaattttttttttttttttaaaaaaataaattttattaaagaatgtctgcaaacaaaatcgactataactcaacaagaacaattctcccacatcaaaactataagctatcttataacgataaataaatatcgacataaatatgtaataattttgtacaatattgttttaaattgcatgcataatttgttttaataattaattaatgaattaattacctgttgt

SEQ ID NO: 88283 - DNA, 617 bp, Cannabis sativa
tacattattagcatattttttttccaaatgtaagtgattaaagatgatgcatacaccaatataaccaaacggataagaatgggatctaattaatgatcaatattcaatcaagcctaatgtgaaacaaaaagctacatactataacagttaatctcttattttgacagtctaattgtacctttcattctttttgaaatggtgcaattaaaagataacaccaaataatagagtgtttaggtaatacgtgggactcacctcacatggtgtatgaccccacaatcatcatgattaagagattaaatatatatatggaatactcttggagtattttagtttatcaacattggaaagttattgatttccaaattatattgtattatatttatttagtctggtcaggagtttccaaataaaaaatactaacttccatgttctaaaaagaaggattttagcttatttaaaagaagaaaagggaggattttaacatgattccatgaacaaattcatttgtattttcttttgttatatactaactaaggatttaattggtatataataattgtaccaaaaaaataattatcagcagacatccaaagaaagaagttaaaaaaggaaaa

SEQ ID NO: 88284 - DNA, 903 bp, Cannabis sativa
agctttatatattagcacaaaaaatataaatatattttttaatatacatataattattgtatgttgttattaaaataactctataaaataagtttatatagaatatatacctaccatacagtaacttttatatatataattacaaaataatttttagtaatatgaaattagttgacatattaaattttgtttaagctattggttacttatttttttcattgttaaaatataaaagagactatgaggttactcttagttctaaaaattttatttagtaaaaaaatctatgattctcatatatcaaaagaatcatctcgaaaaaatagatcataatagtatcacttttgagctcaaacagtataacttaaattttatttttcttaagtttttcttatacgttattttcaaaatctatcaaaattattctataaaagagataatacaatttagtaactaaaacgttacctacttaatattagtttgaaaaatatatgcttcctacatatcaaaatgatcacttttaagagtagatcataatgtttcaatttgcaaagtaaacttatgtagcatacaatttagtaatttttaaatattaaataacaaatatttattttaataaccaataaaattagttagtatattttattttgtttaaacttagattttagttttttttggccaattaaactgaaaaaaaactaaaatgtaatttttaatttttattatcttttttagtaccagtaatgaaatatatgctttccacattaaaatgattacattgagaaggaggtcgtagtgatacaactcttgagaccaaatgattattagtgtattagaaaagatttttctttttttaaaaaaagagagagaatatttgataagtatcccatctttttttttttt

SEQ ID NO: 88285 - DNA, 762 bp, Cannabis sativa
cactaacatatgcaataaagaggaaacgtaatatcatcatcctttttccttctaattttttcatctaacaaagaaaaaaaaaagaattggaaaaagaggattgggagactagaatgagctataatatataatgatcattgcatgtatgaatatataagagttaatgaaacagtcttgccatatgaaataattacatatatatttatataaatatatatagattcgatgttttttgtcattatgtaaatgtaataatttaatgtatagctgtaaatatttttccgggctactaattaaatttgttaactttcattttataatttattgaaatcataaaacatttgtatacttagactttaattagtcatcactagttttatcgtggttaagtgaagataataaaaaattgagaattgttaaaagacattaatagtgcctagtactttctttcgtgcgtgttattctgctattttgtataattaagtattaaatctcatataacaaaataaattttaattaatttatatctctaatttataaagtgtgaactataaaaagtattaacaacaactgatactcaaaagcaatattctaaaaaattatacatgccccccacataatattaaaagagtgtaatcattaatcaagttaataccctctaacatatatctatagacctatatatatagatagctcctccgctgttttctaagtgccaaagcactaactgataatgtaccatgctccgagcacaaaaacttc

SEQ ID NO: 88286 - DNA, 772 bp, Cannabis sativa
gtaccaggttatgtactcataagtttgctataagtggcaagtgaaaattcaatcttcatggtagacactctcaaaagccacagtgttgctataagcatgctaaattttgcttgagctatatctttcacgcctttctatatacgtctaattcttctgtactttctcttttagattagtctaatagtgaagaagtgcttttcctaggtgaacaagttgacctatgaggctaaagccctaaaagcttaatgtgataattatgagcaattgagagaaaagccactcaaagctttgaattatgataaattttgaggtgacgctatagtcaaacaaagggttgaggattctataaatgacacggtttctagttataaagcttcttccaaataggagaagattcgtgcagatagatataaagaatcctgcaatcatgcaagttcacttgtctctggatttgaggaaaatcttattgatgcttagaagaacgtcaaagatgtggagcaaaagttgaacattacttctcaagactacaacactcaaagtgaagctgttaacaagaaaatcattgcatcagtcaacttggagaagcaactgaagcaccatcaagacctcaagcttacgacaaaaaattctgaatagacggtcttgagtagaaatgtgcctcatagagatggagaaccaagaggatttgaagaagtctctggttgtgacctttttccatctttggaaaatgaataaggacctgctggttatattggataaagatgacagagta

SEQ ID NO: 88287 - DNA, 4224 bp, Cannabis sativa
agcgatggggctccttatgtcttctccgggaggatggtcccggatgctgctttattacatatggacttagcaaatagtttggatgataagttgattgatccacgtgtacttgtctggttggtccacatatattaggcaaaatcaggggcaacagctactaatttatcttaaggagtttttttgcggctgaactctctcaactatcattctcactgcacttaaccttccaagctcaaatattagtggtaaaaccttccgaactacccaactgttagtaaatttaaggtattatctatttttcacaattaactgacaacattgattgtttatgtgtgcactcttgtacatgtgacacgttcatattgatacacctaataaaattatttaaatattataattttttaaaaaatttataatattttatttatttttttatttttacaattttatttaattttaaaatgaatttaaaaataattttaaattaataatattatatgtatcaatataaacttgtcacgtgtacaagaatttgtatataagtaattcatggtgataattaactagatgatactttaaatttgttaacaatttaatagtttagaaaattttactactaatatttaagcttaaaaagttaaatgcaagggaagatttaacatacaaaaacacaatcctaaatataagagtaactaacttttaaaaaatagttggttttctattctaagcaaaatgttttggtttgtggaacataaccgaaaagcccgcgaaaacattcccaccaccattcatccatggaaaattagggttagggatttcgttctctctctctcttccttggtaatggccatttttctgtggaactgaaaccccggaaggagaaccctctgttatctatttcctttttgttatctaagattcagatagacagacagatccatggtgatggatgaggagagaggagatgaaattggagagcaagaggaattgaatgtggttgaagaattggtgggtgtggtcgaaatggtcgcccaatttggagattatagaaggacccagagaaaagaatgctacaatctcgtgagacgtatgaagcttttgttgcctcttttcgaagagttacgagacctggatgggtcgatctcagataaggatattgcttgcttgtgtaatttgaagaagacgcttgttttggctaagaaattattgaagacttgtaatgaagggagcaagctttacctggtaataaatgggattttttttataagaacaagaagaagaaaataaaataatggaggtttctactttttgaatttgcattaacttgtttccttttccaggcgcttgaaagtgaggcaatcatggtaaggtttcacaccatctttgataaactatcgcaggctttggatgatttgcattatgacgatcttccaatctcagaagaagttagagaacaggtatgtatatatatatatttatagctttgaatgatttgcattattattgattttgattgttttatcagttcccaaccttacagtgtgagatggcattcatgtctatatgtatgtgcgtagatatacattattatgccaattggggaaaattggttttaggtgttgaaacgaggaagattagttagagatgattagccaattgtcatgttttttttttttttttgagtaagtttctgtttggatattcaggttgagctgatgagtttgtgaaaagccattttctgagaaatttttcctattactttgatcatatttagaggtcaattgaggagatttagtactgggtattgaaatgaggaatgaagattagagctgattagcccattgttatgtttgttttgagtaagtttttgtttggatattcaggttgagctgatgagtttgcaactcaaacgggcaaagaagcgaacggatacacaggatatagaattggcaatggatatgatggtggtattttcgagaaaggatgaccgaaatgctgatagagccatagtagaaagacttgggaaaaagattgagttgcataccgttgaggaccttaagctcgaaacaatagctgtaaggaacctcatcaaagagaaaggacacaatgcagagagtactcaacatctgattgatcttcttaacaaattcaaacaagttgcaggtatggaagaaatcaatattcttgatgaaccagtcatgcctaaaatgttggccaagtgcccgtccttgatgatcccacatgaatttctttgtccaatcacactagaaatcatgacagatcctgtcattgttgccagtggacaggtgatctcacaactagtaatctcattcacacttgctagggcagaaactatgatattaagagcacagagtagcaagttcttttcttaggtcattttcatggaagttcattagcttcttttacgttttagatcatgattcgaaagtatggttggtctcccaagctacacataagataggtggagaactataatagttgaaaaagttttgtcaagttcttttcttaggacattttaatggaagtttactagctcctatttaatttttagagtacattagttatgtagagtaaaagaaagaactaactttttggtttcttcttcttgttcttcttttgatggtttattctagtcatatgaaagagaaagcatacagaaatggttcgattctaatcacaggacttgtcccaaaaccaggcaaactcttcctcatctgacacttgcgtcaaattatgctcttaaaaacataatcttgcagtggagtgagaagaacaattttaaacttccctcaaaggataatccaggagaccatgaaagctcctcagctgatctcaaagaggagatcttgtcccttgttgaaggactatcttccagccatttagaaacgcagcgaaaggcggttaagaaggttcggttgctctccaaagagaaccctgagaacagaattttgattgcccacaatggaggaatcccaccattagtacagctcctatcctatccagattcaaagattcaagagcatgcagtaacagctttgttgaatttatcgattgatgaatctaacaagaagctcatagctagagaagaagccataccagctatcatagaggtgttgcagaagggaagtattgaggccagagagaactctgcagcagcactatttagcttgtcaatactggatgacaacaaaatgattgtggggttatcaaatgggatcccacctttggtggaattgcttcaaaatgggacaattagaggtaagaaagatgcagccactgctctttttaacttatcacttaatcaagctaacaagaccagggccattagtgctggcattgtagcacctttgctccagttactgaatgacagaaacttgggcatgattgatgaggctctgtccattttcctactcattgccgcacacccagatgggcggcaagagattggacagctatccttcattgaaacacttgtggagtttattagagaaggaactcccaagaacaaggagtgtgcagcctcagttcttcttgagttggcatcaaacaactcatcttttatattggctgctctgcagtttggagtgtacgagtatttagatgatatggcaaagaatggaaccaacagagcacagaggaaagcaaatgctctattgcagctgatgagtaagagtgagcaaattccataatattccatagaaaatgcattacttaatgattttgtttgggttggtctgtatgtagaatttacttctcaaacttcttaatctcgaccttcagccagtgcatgtgtaatcttatgacttacattagttcacactccaaaggcaatgttagtgatattttttttgggaaaccttagagttattcttttgctttctttatcatatatattatataatatagggtcacttaactatatcaatttacaaacaatatttacatagcagtgtgaaacatggtgtaaaaagtaacttgataattattttttagcagacctttttaaaattttatctataaaatgtggatattacatatatttaagtaacttgataatcattttttagcacagaaaatttaatttttatctatgaaatatggatatttacatgtatctgttagaatttggattggaaatgggtaaagtacataagattttatctcaaaaccaattaataataagagtagtccattcattttata

SEQ ID NO: 88288 - DNA, 577 bp, Cannabis sativa
tgacggtgactacactattatatttgatgtgttattattaaaccaaactgaccttacaaaattaaaactatccatataataactttacaaaactaaaactagtcacgttaaccttacaaaattaaaactagtcatactgaccttacaaaattaaaattagccatactggtcttacaaaaccaaaaactagccatactagccttacaaaaccaaaactagtcatactggccttacaaaacaaaaactagctacattggccgtataaagaaaactagccacattggccatataaaaaaagaagccatattggccttacaaattcaataaaaacaaaccatttacaaaactagacatattgccttacaaaaccaaaaagcacattagccataaaaactaaaaaaccatattatatagtccgcctctaataaccataatgttgtagtgcatttttcttttattttcatttatagtttaattttcatcttaacaaaatttcattaattagttttaatttgttaatcttatacttagatttgatgtggagggttttatgtgatagggtaaagttgacttggca

SEQ ID NO: 88289 - DNA, 597 bp, Cannabis sativa
tggtacttttattgagagccacaacttgagttccccaactacaattcaatttctttattgtcaactttgttttgaaaggaatttgtaagttaaagcaagcaatcatccatgaacaagcaaagcaacactagcagtcctggtagtcaggctattacttagcaagcagcaggcactgagattccccataaggaagcaaactacgagtgagtgtccaaaacgattcaaactcaggaacgtggatctgtaagatctttgactgatatggagtggtcaccctttaggtaaacgagctacgagcaagcatctgaaatgactcaaacttaagatctcaaacctataggtccaccacacagcttgctcaaagaagaagagctttccaactttcttagctgtcccaatcgttaaattccgagaggggtcctgaatgacacaacaagattcaaaaaaacaacaacaagttagtgttattttctaaaaaaatcattcactgaaaaataaattgaatctaaattcaggaataaagagaatatttttcagcctaatatctttgttaagctgaaccacaccagaggcggtgactttaatttgttggccatt

SEQ ID NO: 88290 - DNA, 937 bp, Cannabis sativa
ggtgcacaataagattatgaatagcaacaagagcaataagcacacgaatatatgtaattctagtatcaagtgaatatgtatcaaagaaatctacattttttctttgtctaaatcctttggccacaagatgtgccttgtacttttcaacagtaccaccggatctcaatttcattttaagaatcaacttagtggtaacataactaaatgctaagtttcgtttgactcaagagagtccattgcatcattaatatcttcatttcataaatcaacatctagtgaagtcaaagcttcttggaggtaagaaggatcctcttctacagtatatgcaaaaaaatcagaaccaaaatctttagctactctacctcttttacttcttctagattcaatttatatacactcctcatatctttaataacagacatgttactaaatgatgtacccccactatttcccaatttaaatagaaatctatgtttgtaaaactcagcattattagattccaaaataacatgcacatttaaatcataaaatctatatgctttactattaacaacatatccaataaacacacattcatatggtctattagccaatttgattctcttaggatcaggaattctaacatatgccaaacaatcccaaattttaaaatatgagatattgggttgtttatttttcaaactttcatatggaaaaatttttcttttagatttaggaactctattaagcacataacacacagttaataaaatttctcctcaccaatgagaagtagcactagaattcaataaaatagcaacaatatattcaataagaattctattttttctttcagctttgccattcattttaggtgaataaggtgtagtcttatcgtgtatgattccatgtgagttatacgattcaacaaaattagtagaatcatattcagtgcatc

SEQ ID NO: 88291 - DNA, 1033 bp, Cannabis sativa
  modified_base (991)..(1001): a, c, t, g, unknown or other
tgacacacgtgtctgtgcatggaaggatgagtaagtggtatttttgtaataaaacaaagatggtaagtaaaaaagttgatgtaggcgtgtaggggtaaaaatgtaataaaatgtgcaaaaaaaaattttggtgtaaaaatttcaatagaaaatactgtaaattttctttttttctaaatttataaatatctaataactaaattttttaaaaaattcttaaaaaaattcatatatataacacggcaaccttatactatatacatatatatagtttttcattctcattaactaaaagttttattttcattcactacacttattcttctccaatttctctctataatttgattgacattttaatttttgggaacaagaaaactctttgataacaaaatatatatatatgaggtatatgtaatatatatttatgtatttatttatttcaaattgtaaatcttttattactaccttgagaatatttattttatgtacatatatttacaagtgaaatatttatatattagattctccaaaatttaaacacatcatatcacttatatatatactttgctatagctttcttgatttataattatgtatcaagataaataacataattatgtgcaagtatatatgtattgcgatgagaatttttaattaaatgtgttttctttacacataattaaatgtatttttaatttgacattagttgaaactaactatattgagagagatcaaaaaattagtccatcaatctaaaaaaataagtactcatcattaattttttttaaggaacaattgctaattgttctcccttaattatgttgataataatatttatgtatctatttctttgtttgttttatgttttctttttctgtcattaaagcttaagaaaaacttgcactaaatgattctcatgattttctcttaattttatgattctatttaggaataattacataatgcaccattttttgtaaaatatttnnnnnnnnnnnttcaaagaatgtttttttttttacatttttac

SEQ ID NO: 88292 - DNA, 645 bp, Cannabis sativa
  modified_base (63)..(69): a, c, t, g, unknown or other
aagaaaagttgtaggaagtttaatgcatgaaatttttacgtggttggggcattaacgagcctnnnnnnncgagtctttgttattaatgagagtatttattagaaagaatgttcttggtgaacttcactcctgttttctctcttatattcctttttcacccagaaattcccgacccctttctcagtatgtttgtggggtatttataatatttttctggggtgatccctaggaatgaaccacttgtctttctgtgcaggcttaatagaggcacatattccgaacagatacaaaataagaaatacatgacctataccgtaggtatcttaggggttaggtggatataatcttttattccctcttgattgatgtgattgctcataaagtaaccgtcactagccctattaatcatagcgtaatagctgaaaaagaggggttatgtcatctgtcatatcgtttatggtggtttcaatacgtcttcccccatgcggcattaaatgtgaggtgatcgttcaatagagtccagtacctccttgaactgccttagtatgtctctggcctccgggagcataaagatccttctcatgtctcctccgggagacaccttcccagagacactcctctgttgtctaatacttagttgatttc

SEQ ID NO: 88293 - DNA, 806 bp, Cannabis sativa
gatatggactaaaataacgacaatttggctgaaattaaactctagggtcgaattcaacttatggcctttagagttagatttttgccactttatttcaactaatgaaactaaagtgtcttttccaatttttagcacttttatcatctaattgtttaaatacgaattttattttgataattataaataattaccaaataaatttaaatatatttattaattagacccgcaaaaaatactaattaacaaataaatccatatatctcttttcttttcaaaattgcccaaacttggtaaaaattctcgaataagatatagtctattttcgaattctaattgacttattaaattaattagttgagtctacaagatgattttattccaaacaatgtgggaccatgggcctatgtaaccaagctcctaataagtagattcaaaatttatcaatcgagtatattttccatcttattaattcctcctgattccactatagattctatttagcgagattttcagaaaacaaaatataagaaattagaactaaagaaataaataattcaaagagagaaattgaacaacacttagaattttttacgtagttggggcattagtgagtgttagtccacgagtcgatgttattatgtattttagctagaaaagcctttgggaatacaagcagtacatgttctttattttttcctgagtaaatattgcaagagaatttaacccttaatccgaagaaattattttgtatatatagtgtttacaagaattatacttggttttttgttcaaaaaaaaaaaattata

SEQ ID NO: 88294 - DNA, 1161 bp, Cannabis sativa
ctaattagataaccgacggtaaaaattaaaattgaaaaaaaatatatatatattagcgtcgttttaaaagcctcgctaacgtgttctctatcatttttaagctgacactaaacatgttccaagagtgacaatacctcttattgttcacttactcaaatttcttagacccaattcatttcgtgaacccttagtgtgcgattgagctggtcgaagacctctggcgattctcgtccgcctctgcgccaaaccttcaaatccctccgccactccgtctcggtcggtcctctcttctccgccttctctatctctccccagattcctctctcctctgccccttctttctttctcattccctttcagtcagacaacctccttcttctccaacggtggcgacaactctttcgttcttccccatcatcttctccttaggtgagaatcatcttcttctatcatcattctcagtatttttgtttgctacgtgtaagttttaatctatattgtgtataatttgtgtattttataatacctaaataggctaaatcaaattttatttggggcttagggattgatatttcttggtctatttctatatatatatcaaccgacccgttcttcccatttcctggtaagtaaaaatatgtttatattttggtgatttaagagtgtgtattttttttaccagttatagtttatatgttgtgtatcttattttgttttgttttgtgcttagtgttttcctctcaaactaagatagcaattgtagtaattcaaaggaataaggccttgtatcggctaaattagtaatttacaaatgtcaacaaagttaaattattttggggatgcatacttgagcaaaaattgttaatcttgcctaactttttgactaaaattttgtgaaacaagtaagataagatatattgaaattcagcaattagaagatttagtttttctcatctgttcatttgtagtaagattatttaatattctgttgagaaaatgtagtgtttgaaatgtagtttgctgtttgtagagttgtatgcattttgttttaccagttatagttggttgatatattgtgtatttttttttttttttgaaatagagtttaagaagatcaacactaagcttctttttaaaaccactagttgaaattttcatcac

SEQ ID NO: 88295 - DNA, 1399 bp, Cannabis sativa
aataatttacatcaattggggtatttttattgtaaatattatttagcaaatatgtacatataaaattatttatgataaaaaaaaaatcatatcatatagttgttcgcttattttataatttacttaatttataacaaaaatatttttaaataatatatatcattatacactaaaattactaaataatgtctatcaattaaaagataaaagttaaaattagaattatgctaataatgtatatcaatatgagtgtttttataacttaataattttaaacatgtgttagctcactttataatataatcattgtgttaaccaagtataatctaatattaaaagtaattattgtaaattattataaattattttttctcattatttcattattttcttttatacatgtcaacttatactgcatgtataaatatttacaagtaaattatttgtacttgaataaacgatttttagcttttatatatagcatgttagctctgataccattcttcatatttcatattattttgtagatcttatttattttggttatattagggtgcagatttcaaaatatatttattcaattgagttttgtactttgtttacatcgagtgcatactccaatctgaaatgcatttattgaattgagttttaaaattgatacactttaggacaatactaaatataacccaagtgtacattacatgcattatttatatcattagtataataattaactgaaacataaatcttttattaaaaatttatttaatatttttttttaatttgattttgctatatgaaaatttacttatactaaaattgcattgttataaaattttattttagagtagtacaatgaaattcctatattttaacattaatgtaattttacttttgaaaaaaaaaaataatgtaatttgttttaattttaaaaaatatattttcttttaaaaaaggtttttttttttattatttttacacttaaaaataatttttttatatatatatttttacgaaaattcacatagaagttcatatagaaactaacagagtaacctaaattgcaactgaaatccacacagcaacccacatagaaactacaggagcaaccgccgaaacaaccaaaactgtaaatttaaaaaaaataataaaaaatagtatataaggtaattctaaaaaaaatgtatgtatataggccaattactatataagtaaattttaataggccaattactcataaagagtaaattttttaatataagtaaattttaataggctaattactcataaagactaatttgcggcatgaatacctaaatttaacttttagttgtaaataaatacttaagtttaatttttggcggtattaatatctaagttatatttctggaattctgta

SEQ ID NO: 88296 - DNA, 504 bp, Cannabis sativa
accgaatatgaggataaaccttttcaccacaaatcaaagccctcgatcttccgcacaagttcaaaatgcccacatggaagatctatacgggcaaagaagattcactctctcacatcaagtactttgagatgcaaatagatttacaagctgtaaaaggtgatgtacaatgtagaatttttttcaactaccttggtggaggccacctagtagtggtacttcaagttattccagggaagttcagttcatggaactcctttatggcggagtttcacgcacagttctcctctttcaagtagctcccaggtcagttagagcacctagttaaagtaaaacagataccaggagagcccttaaaggactacattagtagatttatgaccaatgctacaaaagtgaagagactggccattgaaggaagagtttcaagaatctccttgatgggctcctctttcttagatttttttaatctacttggaaaaggtggaggagtgacataagttggta

SEQ ID NO: 88297 - DNA, 765 bp, Cannabis sativa
gaaatgccctaatacagtgagagattacaggcctattgcatgctgcaatgtgatatacaaggcagccaccaaattgatttgctcgagactcaattgtttactacctcatctagtagctgacaatcaaggaggcttcattcaagggagatttattgcacacaatgtgatgatttgcgaggatctgatacggtattatggaaggaagttgacaaagcctagttgtgttatcaagcttgatttgcaaaaagcttatgacacaataggaagttgaagaaatgctgcatggtttaaagttccctactcagttcattcagcttgtgatgttgtgcattcgaactcctagattttcactgatgataaatggatcctcacatgggtactttgaagctaaaagaggtctgagacagggagatcccatgtctcccttactctttgtactgggtatggaatatttaacaagaatcatggggaaaattgggcagaaaacagatttcatctttcatcatatatgtaaagagttgaaattgaatcatctcatgtttgcggatgatgttctactattttgcaggcagagctgttctaattaactcagtactcttggaaattcatacatattggagccaggttatgcttcttccaaagaaggtgatcaaagagattgaaagtatttgcaaagctttcttatggaagggtcaacatatgatgataggagcagggcaaattgcttgggaaaatgtctgtcaatccaaagttgctggtgggatt

SEQ ID NO: 88298 - DNA, 575 bp, Cannabis sativa
ttattttccgtctttcccttcttatatccatcctaagatcttagtagtcggacctaaatccttcattttaaactccgtctttagctggagcttcaagtgcttgatctattgtacaatcttgctggcgatcagaatatcatctacatacagcaatagatacaaagtatctccatttctctctcagcaatatatacaaggatcaagcttacttctttttagacatatcttggtcacataatcatcaaatctcatattccactgtctcagagattgtttcaagctatatagagactttcacaacaaacacacccagtgttcctttccagtctcttcaaatccttcaggttattttattagaattctttcatcctgatgtccatataagaaggcagtcttgacatctaattgttctagtttgaggtcttaacacacaacaagtgccaatagatttctaatcgatctgtgcctaacaatcgaagaaaaaatctcattatgatcgactccttcagtctgagagaatcccttcgcaaccaaccttgctttatactgcacctcttgtacacctagaatgcctt

SEQ ID NO: 88299 - DNA, 1605 bp, Cannabis sativa
tgatattgaataaaatggattacattgaaatgaagttttagttagggcaaaaaacttaacatgtttgtcaaaagcaagatttatagatgctcgagtatcttgctggttatagtgaaaagtattattgtggccttgtatttgccccaatgcgacttgcaaattctgtagtttggtgtcttcatcaattggcctttgaacatttgtaatagatgggattccagtattgggggtagtttgctcggtctgaatactggtggttttaattttttgcagcccagaataaacccagccagagcggtagtcactattgacctacagtttgtgggcctgttggtggctgaggattagtcagagcggggttcatctcagctggatctctagggtttgtatgcatctgcatgttaggattcgtagccagtggatcagtaacttcggtttgatttcccatccatgtttgtacaaccattttgtgtcctaaaaaaaacttaaaacaaaaacttgtgtctcaatgaaagcactaaaattttgatctcacttttagctaatgacaatgagtcaaataaaagcgattaagaataattgaatagcggaatataaataatataaagtaaagaaaacatgaaatttatagagattcgacctcttattgatggtaatagcctaccccctttagttgtattgacttgtgagaagatgaacaaaaatgttttgatctctctcaaaagctcttacaatgatctctgtgtgtttcactcttgaatcaagatttctctctttgagtgttctctctctgaataaaattcgtgcccctgaatagtaagatgagtccactatttataaggattaattacatcaaattgatgttcctaaatcaataaaaaataaaatagaaaatgagtttatttttttttataattatgataagcaaaaaggaaactaggcggttgcccttcttctctaatgatacaaatctatcacgttaatttagggatagtgtcgtgacttgtaagcttaaggatatataagatatatctttaaaattgtccaactcgcactccctggtcgatacatacgagccatctgcttgatggaagttggtcggatgtctatgcgtattttgctcagatgttgcaactctatctgtgagcttgagtatcaatcttctctatgcgactcattatgagtaggattgcccgtctaggtaataaaatgtgttctacatgtcacctaatcgatgccacatcgttgtgtaaaaatttggatgataataaataaacttgattttttatcaaaaaatctttgtttgtttaaagtatttaataaatttttaataattttggtttgattttttaggatgcgtgtttataaataaaggaaaatttgaatttccatgcttaaataacccatatattattcccctaaactaatactatatataattaattttatatgacactttttgtatttttcccataataccctccccacctacatctacccactccaacctttttctcatcaattcaacaaacattccacccgaaagcttccacaaccaccaaaaaaattttcttctcttcactcatcactaaaagctacaacctt

SEQ ID NO: 88300 - DNA, 1092 bp, Cannabis sativa
atgtcactaaaaatcactcttaactctttagtgacccacatttttgtgtgtgtcactaaatcatgtcactaaaaggctaaattgtagtagtgttagggaagttttataccatatcattattatttagttttaataataattaatatatttatataaatgagagtttaaaagtagtgatgtggcatttcatattttttttatagtacttttattattttatgagagcttcaagtttttctaatgaaaaaaaatctattgactttgtaaaaaattccacattgtttagaaagtattgttgttttctatatctaaactaaaaataagcttttctttgccactttcattagtccaatcattattatttgctatagtgtaaaaaatattatagcaaatagaggagtgctaccgtcaacctcctgttacaacctcttagtcatcttagtcaacagtcaacctccacgcctgaaaatacataaaatacatatcggaatattttttttcaattttttttttcacgcgggtgttcgttatgcttacaacatcatccctgtaaatctttaaaaaatttcgaatagtttacagtgccgaaaatacgtttgaagttttttaacgggtaaactggaatatcaagaactcagtttttagtactataaactattcggaatttttcaaaaatttacatggatgatattgtaactataacgaatactgctatgaaaaagaaattgaaaaaaatatttccgcatgtgatttcggacgtggaggttgactgagaggttgtaataggaggttgtaattagcattcctctagcaaataaatatcttcttagtatgttgttttttttactaattaataaaattagtcttatccaattagctatatatttttggttcttttaatattatatattttattatttatatattttttattcatataatatacttgttgaccgaggttttcggcaaccagttaaatattatatgggaagagctgtaggaagtttaatacatgagatttctacgtggttggggcattaatgatagtccacgagtctttttttttttttattaattagagtatttattaca

SEQ ID NO: 88301 - DNA, 998 bp, Cannabis sativa
  modified_base (617)..(625): a, c, t, g, unknown or other
  modified_base (921)..(922): a, c, t, g, unknown or other
tacaaacacctcagccaagtaacaattaagataagccaacctagaaactacatgtagacgggtcaactaaaatcagttatctggtgcaggaattgcccttgtcacgccttgggggcaacacttgcacgctacactcaagattggatttaaagcatctaataacgaagcggagtatgaagctctaattgctggcctaaaactagcccgggagatgaaagccgaacacattgaaatctgcagtgattcacagttgtggtaaataatgtattcggagaatacgaggctcggggagaaaagatgatagcatatatgagcaaaatacatgacttgctcccacaattcaaaagttacggtctcaaacaaattccaagggaagaaaacacaactgcagacgcgttagctcgattcgcaagcagcaatgtaactgacaagtcgaacttggttcctatccaattcctcgaagaaccaagcatcactggcaccgaagaaatcgaaatgattaatacttccccaaactggatgacaccaatagtagcctacctggactttgggaaactcccaaataatcagaatgaagctcaaaaaatgagaaggaaagttgcacggtatatcatagnnnnnnnnnttatgtacagaagaggattctcaatgccattgttcagatgtgttactcaagaagaagctgcacgactcctatctgaggtgcacgacggattctgtggaaatcatgccgttgggaaaagtttatctaagaaaattctaaggcaatgttatttctggccaacgacgattgaagattcaaaagcctatgctaagaaatgtgacaaatgccagagatgaaaaaaattaggtaagtatgatgaaaaaaatgaaattttttctagtaccctcgtattagaatggggaacatttaagaaaatnntaccaataaagtaccaggtcggacgaccacactaagtactgaaagaacatttacttttaagtgaatggcttgctgg

SEQ ID NO: 88302 - DNA, 748 bp, Cannabis sativa
  modified_base (508)..(527): a, c, t, g, unknown or other
  modified_base (596)..(597): a, c, t, g, unknown or other
  modified_base (693)..(699): a, c, t, g, unknown or other
tactaagagatatagtagagagaggtaaagtgatggtcttgaagatcacgttgaaacataacttggcagatccattcataaagatactactaataaaatctttaatgggtcatataatatgggatggattaagggagattcccacccaatttttacttttagggcaagtgggagattattaggatttatgccgtgaaaatcctttaaagacatttctgttaattaataaagacttgaacattttgatttatgtatgaatgtcaaactatttatatttattattgaataatttttattaaacattgaaaactttcttattcatatatgaggttgtgacttgtagctatataaagaactaagacgacttagctatgaataaaatattcagccacacattaaagtttgggaatctttgatcaatggttgctagtacagttcactgatacctattcttcagtgcaagtaatttcaatttgaattatgtatgtagtatgacatcaaagtgaannnnnnnnnnnnnnnnnnnnttatatatgacaaggactgatatgaatgaatttgtttttatctaatatgtcatttactataaagacctnnttcatatcataatgatgatcaatattagatcaaccaaaatcttgagagatcttgaactctttttcatgtttttagtttctttgattcactcgttannnnnnnttagagaagatgattcttacaaatcctattttgggaatctaataatgtg

SEQ ID NO: 88303 - DNA, 542 bp, Cannabis sativa
aattatgtctcttgatccaacttaacgcttcacgaatgccaattgcttcagctacctcgggtgtaaccgaaccagaaaagagcgccatcttcccctcaactagcataccaaaatgatctcttgccactaagccacagccataactgttaccaccgtcaaagagagcagcgtcaacatttaccttgatagaatttacactgggtgcagtccaatgctcagcaccgtcgtccgctctaaggcctgaccaagacgtctcaattcgagaattttgagcattcttccattgttcaaggtaacccgttgcttgctttacaatactagctgcgataacacttttctgttgccatacaacatcatttcgggcgttccaaatggcccaacaaaggaccgggagaagcagctttttttctgcgtcaacaacatcaaaaacagcagtaaaccagaccagaaaattttctggtgcggctgctgcaacatatgtgccaataccaactctgtcccacacttgtttcactctcgtacaagtaatgagtgcatggaca

SEQ ID NO: 88304 - DNA, 1480 bp, Cannabis sativa
actcttatttataatcaaaaatgtttttatatggttttcagggcataaatcctaacaatctcccaattgtcctaaaagtaaattgggcatctcccttaatcccatataagttatatgacccataaatattttgctagtattgtcttcgtgaatgcatctgcgaggttatgttccaacgcaatcttcaagactctcacatcacatctctctactatatttcttagtagatgatactttctctcaacatacttgtgtaacaccttgattcttaaggatgccacatgtgtgcttttacaaattagtttataataataaactaatgattttacaaaaattatgatttaattcaaatttaataaataattaaaacataaaatttattttagcgttatacaaaatattaaggttgaggatccccttaaaaatatttacaagaattttgttaaaagtttacaaccaacacttatatttttagagatgccacaaaccaaaaccctgattacatgacatcgccggtcggataagtagatatgtacatttgtcgagaaagacctctgactcatcctttctttaactgcaccacaaagcactcatgagtcacaaagactcaacaagaaaagcaaaagcataacaagttcaaatataaccaaacataatcatgaaaccataatcaaatatcaaccatccagataaacccatataatagcagacaactaacatagataatctcaagtatataagcatccaatattacacatgtatttgtctaataagacaagttattatcgttactttataaagtaaccattctcattgttgcctaataaagcaaccctgataagcctagtcaggcatccaatttcactgtcattacctgatgaggtaaccaacaagtaagaaacataacaatagtttcaatatagagtaatgactctttctttcaaaatgttaattactgtatcttatactcgataattatcgattcgcagatgagaataatcatatcatatcttgacatgatatgtggtacgaatgtacttttcttacttcaagtccaaattctgcatgctggttaactcaagtgaaaaatacccgatgatcccgagcatattatgtcacaacaatgataatctgataaacaactcatttcaattcattctaggacttaaactcaaaacaagaagttcatctatcgataaatagcgtagaaataccttaattaatcgataatacacaaaaatataattgctagaagatcactaaaagcagctcattatttcttgggtttttattgggaaaaatgatccaccatttttacagtattgtaaaaacggttaactgtttcttttctgcaggaatactcagactcaggtttttcaaaactaacctctcctaaacctatccaatctcaacaaaactttccagaatatcttaaaatcacatttatgacatatatatgaacttagaaatcacaaagaca

SEQ ID NO: 88305 - DNA, 2143 bp, Cannabis sativa
  modified_base (1654)..(1677): a, c, t, g, unknown or other
  modified_base (1731)..(1732): a, c, t, g, unknown or other
  modified_base (1760)..(1768): a, c, t, g, unknown or other
tattcaagcttaaatcaagataaaatcaatctaaatatgaaaaagataggttggacaagaacttggggtttacacaaatgacccttcaatcaaaattggatctctcctaaccgacataatagtcaacattatattgtatttaccccatgttatcccaaagttcacacagctgttgtggccctttcacgtggcatgattcagccatcttagtaacctggcaagttcatgatcacacaaacatcctccaccatgaataagaagaaacacgtgatgctgtgagcgatgctttcgtccagtaaagacgcgaattctaagagttgatggattagcaggccgtgatcctccaagaccatcaggcggagctcaacctccgaaattaagaagcaaataaactgattagacggttcaatgaaagagttgtgtccaaagtggaagagccatcactcataagggatccccttcgggggaaaaggtccttatgtctcggaagaaaaccaacgccctagggatcataggcagacctcacggccagtgggggcaaccacatcccaaattaggtcgactcacaattagtccaatgatgatcaaattcagcccgaaagggcatatggcaggactgaacgatttcaagccctgcccagagatgaagagaggagggaagacattccaccaaggcaatccctagtgttattttatttaatgcgatttcatttagccaaattaattcatcacaatcctttttatttttttttttattacgatcttcttcttaaatcatcagttgacgaaaatcgtatcaatagataccaattaaaaaaaatatatttttagatcatattaatttgactaaatttttctgagtactacaaatatttttattttaaattaatattctccttgcatattatatttataaccaaactactatttttatttcaattagtatattcactcaagttacctttctattccataaaaattagaaaaatttatataaccaaaaatttgaagaaatttacaaaaatatataaacatagaaatgtttttaatttattctttaaatttttttatttacaaaaatatttcttcagtaaaaataatgaactatttttttagttgatttatagtttagttatagttgtattgtagttatcatgcaattttttttattgttttatatagttgatttatagttgtcatgaggttaattttacgttgttttttagttgccttttttttttgaacaaaatgtatttttgtacttttaaaactttacaagagtatttttttaattacaaattttacactgtaaaattataaataaaccataaaaaaatatatttttaaaaattcctcttaaaataattacatttatattataaattaaataaatagttatgatgtttctcaacaatatttttaggaaagagtaataaaagataataaacataactaaataaaatattaaaatatatatttttttaaaaaaaataaatattcaaatatcttgtagcagtattgtattaatttttttttatttagccttcacttatattccataattttttagaaaaaagattctattttggaacctagtttaatgacaaaaataaataattaatgataaaagttaggggctttttcatttttacannnnnnnnnnnnnnnnnnnnnnnnttttttgtatttttacaaaattcttgcaactagcgctgcaacctaaattacaannaaaaatcgtatagaaactcctattgcannnnnnnnngcaaccactttagaaacccaaaccttaaatttgaaaaaaagaattaaaaaaatagtatatgaagtagttcccctaaaagttattattttattaagtagaagaaactatatatacaagaaaagaaagaaagaaaaaaggacttcgtaagtaagactttttagtttgtgtgctacgtgtcttaaagtgccacaatgacaagcgatttaaatttctcaaaaaaaataaataaataaataaaacaaaaagaaacatgctctattttcaaaatttaaagtaccgtttggtaatattattttttctaaatttttaagtaaaattttgtttttaaaaaataaaaatacgttgggtaatcacttttgttttttaattttaaaa

SEQ ID NO: 88306 - DNA, 1540 bp, Cannabis sativa
aaatcttctattgtaattctctagacgatgcttccttcagctctcaatgaaagcaccaaaatattgatcaaggttttctgcaaccaaatatctaatgtaataatgagagcttagggataattgatgcgtgtagtttttatgtggttcgggcattaatgagtcgtagtccacgagtctctgttattaataagtgggtgtttcttatagagaatgttttgtctcttttttttttatccccccacccatttaatgtgaagtgaccgttcacctccaacttcactagcccagagaaactcgagacaacaataattataaaccctaattatttaccattaggcttatcgggatataacacagagttaactttcttgtaatcaacaaagttttcaagagtaggacacatatgatatgtgcatccagattcaagaatccattctccaatgattctttgatctgaaaccatatacaggtctccattagatgaaaattgatctgtatcttccacatttgaagctgaatcatgcttcttttccctttcttctttgagtttattcttaaactcaatacagaatctcttgatgtgtccaacttttccacaaaagtaacattttctgtctttgtgatatttccctctggatttggatctcgactaaaatctgtgatgactcttagattgatcccgcctctgttatgctctcttcctcgagctagtgctccatggacatcatcaagggtgagagtatcccttccatacatgatcacaagtttatgctcctggtatactactgttatagatcgaaggagaatgacagcttggctctcctcatctactgtgtacttcatgtttgccaaacctataatgatttgattaaagcatcaagattatcatctagagacaaattagaaatcttttcaaaaccatataaagattccaaaaaattaatcttgttagttagagatggtttcatgtagatttcttcaagtttattccacgattctcgagctgtcttcatgctctggaccttccttgtatctgtgttagacagatacattatgatagtataataggacaattcttccataccattgagttcttcttgatttaacttcttagtcaattcttcttttggttttaaagcctttgcaaccttttgacgaataagtatttccttcaagctttctctcgaaaaggccaaaatcccttattccattgaacgtcacgagttcaaaccatgctattggaatcatgatcgtgcagatgaattcttgattggaccttgaactttcctttctcaatgcaaatcataaaccaaagctctgatttgttgtaaattcaaattgacaacaccaacaataagctgcaacacaatcaaggaatttactagcagcaaattaatcaaacacacacaaatcacaaataactagaacaaaattcaagagagtaagaagacatagcggtgtccacaaagtatctaatccaatccaatccaatccgcaaaatgcggatatttgttattgtgcggattggattggattgaaa

SEQ ID NO: 88307 - DNA, 507 bp, Cannabis sativa
ttggtaatagcatctgttattttattttaatttttcttttcataaatgtactattattttaatattgacattcaacatcttaaaattgtaaatggattcattatttcaaaaagaaaaaatattgatttaatcaatcaatatccttgtatataccacttttgttaatgaaatgagaaatggaaaaagacaataaatccgttataaaacggcaggaaaataaataaataaatagaaaagatgaaagttggaagtaaactcgtggtgacttaacaaaaaaaaaaataaaaaatgaagtaaactcgtggtggtgccttttgactaaaaagtaaataaatacattcttttcctttcttcctccactttcaaaaaagcaaaaaaccctaattatatgaagcattattatggatactaaaatgtctaacactattataaattgtatactcattttttattttttatttttatttttattttattactttttaatttatactcagttttataagt

SEQ ID NO: 88308 - DNA, 977 bp, Cannabis sativa
taattttggtttattgaatataggaagtgcctgctgaatttgtaagaaggcacatgaaatcttgcccagagaagattcaactacaagttagcaatgatcagaagaagatatgggatgttaggtgctattatgcgcacaaagattgtacttttgtgaagagactaggcaaagggtggagtttgttctcgtccactcaaaagttgaaacaaggagatgtttgtgtgtttgagttgatttgtaatatcagtggtgtcatcttaagggtttggatttatcgtgcatgaaattgataccactaaatctttttattagtaacttttgttggaagattttaattggtttcttcacaaactcatatatggcttgcccttttttgaacaatgggtttaaattatgcatttgtggtataaatatatatatagtttgaacacgatttggttggttagatgtattgtctttgttcaaagatgatgttgttctctgttagccattgtcgttaaaattgtcaaagttgttgttgtctttcaatgatggtcaaggtcgtaataaaggtaatttttagatagctcttgtttattaatttgtgacaagtgtagtaacttatgtttttatatataacttaatattataccaaatatttcatgtgggatacttttcataatattcttgatggtgggacatgatcaccatgatgcagaataagattgataagtaatttatatttttatatataactcaatattttatcatttactttatatgaaacaatatctacaatagtcataacgtaagtttaagtactaagaatattgatgatgataatgattagcatgaaatgattgttacggaaagatttggtttttgttttgattttggttaataggcagtgctcgcaaaatttgtaataaaaagacatgaaatttatttattttctttttaaaaaatagtttagctcattataaaactatacacaagat

SEQ ID NO: 88309 - DNA, 810 bp, Cannabis sativa
ccgggaggcatatctatagtaaccttttgctttataaagacttagctttttagatgaaaagctaaaccctttccatccatgtgccactgtacggttggtccacgtatattaggaaaaatcagaagcaacatatataaaaaaaagtaataagtgtaaattttaaaataatttcagttgatttattctattgagatgtaaataaattcttggagtatatatataaagttttttagtttattttagttctcccattttaaattgaacaaaattaattatcactatatatttttgtctaacattaacaaattattaatatgatatatacaataaaattaattttaactcaatatataaatatgttagaacttattttcgtttataaataatgactaaaaatttaattagttcaataaatattaatttattattagaacattataatgaaaataatttgattattttctttaattagctcaattaacacaatatataattgtgaataaaaaataaaaacttaaaattatatatcttcaggaaaatagttctaatctattagtaaatcaaaaataataaattattaaattcaacataaaaaaagaataaaatcattaattaattgaaaataatttacataacgaaaattaaagtattcataaaaatataataaaatttattaatcaaagaaaaaatgaaaagaaaaacaataatatatatactagcaccattataatattagtaactttaaatttaaaagagtatcaatataaaacattaagaaaaaaattacatgtactcgtgttataactctcc

SEQ ID NO: 88310 - DNA, 599 bp, Cannabis sativa
aaaggtggctgctgtccgaatagtgaagaaagaactttctccccttcatgccgagcttactgccatagcagacgggatcaaggctgggttgcagcagaagcttccttcttttgatgttgaaactgattgcttgcaggccgttaatttggtgttgaaagatgatgggggctgtagggatgttgatggacttattactcaaattaggtgtcttttgcaagatgtaagggttcatggaatatcttttgtttatagggaagcaaatcaagttgctcatgtattagccaatgaagctttgattaacaaagctagtgcaatgtgggttggggttgtacccccttgtgcgagacaagcggttctgcttgactcgcctaatcctatgtaatgtttgttgcatgaatgaattccatttcaaaaaaaaaaaaaaagtaattaaatatttgttgagattgaggggggcatggccactccaacccaagcaatacctccgcccctagacacattggtacggtgttggtagcaatgctattgaaattatgaagaaaaggttaagaaattcacgtggaagaaactgcatatatgatgtcatatgctaacatgca

SEQ ID NO: 88311 - DNA, 1381 bp, Cannabis sativa
atacttatgtttataagttattcaaaaatgtgttttaaaaagtgaaactataactaaatataacattatgtataaacagtatgtttatattttatattgataatatttttaaattattaatttaatatatttaatacacaattttataaataaaatatgtatgtttattatttatttatgtaagacttaagaaaaatttattacgttatatagactatatagaaaattaaaattatgtttaggtgtctaatataaatgtataattaaatgtaaataagttattttgtattatatatgtaataaaattatataatgtatgcaaaactataaattttctaacctacttataatatatccatacagtctgactctcgtctaactctcttgaatacgtcctcatgctccaccataatggaagtattagggtttataccttaaaaacaaatatttaatgaataatatactagagaatatatgaaatacataatagggtttatgctctgaaaaacttgtaaagatatttttgtttataaataaaagttgaacattttgatgtatgctcgaatattaaatttcgatatttaatattgaataatttatatataaatataaaaaaaaaatttattcatacatgaggttgtgacttatattttacggagaattaagatcacttagccataaataaaatagacaacaacatattgaagttatagaatctttttgagtaaagaaatacttgagactcttctagtcgatgtaaacctcacacttctctctatatagaaagtgatgccccattttcaatgcaaaaactaccatcacaagctccaaatcacgggttgggtattgttgctcatattccttcaactgacgaggagcatatacaatgaccctgtcagcttgcatcagaatacaccctagactagagtcttgggcatcacaatatactaccaacttttcccaacctgaagtcacagctaacactgaagttgtattcaaccgttgtttctttgtcaatggtgtggagatcttggaaagtccttccaaaaaatggcgataatacccaactaaatttagaaagcttctaacttttttaactgtctttagtctcgtcgagtctctcactgactcaatcttctctagatctccactaacttcaactttattaacaaaataaccaaaactcatacttcttaaacttagcataaacttgtatttcctaagtcattgtagtaaatataatatgtttttgtttccaactgagagtataaaagaatatcatcgataattgttatattacaaaaatcaagaaaatccttgaacactcaatttcaagaaattcatggaaactgctggagcatggattaatccaaaagaccta

SEQ ID NO: 88312 - DNA, 743 bp, Cannabis sativa
attagagcaaaacattgtatatatagctgcagtgaaaattattacgcatgctaattgatatggatgcttttattattgctattaatattaatatatgtcatcatatattatctctgaagttgtttagatgaagagtggtgtaccctatatacttcgctatttacagtatttgctttgtgcatttttagagagttagtcccaaatttgtgcatttttagagagttagtcccaaattactaatacgtggaaataaattattaccagatgaaagagctattcctcctaaaaagccaattgattttgagatggaatctgattcactgtattcccaaattctaacatggtatcaaagcccgttgtgaacccaaagtgtcactggtccgaaaaagtcgtttgtgatccgttgtgagccaaagtgctgccggtccaaaaaaaaatactttcgctgtctctctttaaccttcatttgagatcttttggccaatgtgtgccaatttccagtattgggtctttgacctgttttaaaatctacaaatttcgcgacgtgtacatccacaaattttccgatatttggccttgtgggattctttcaaatgtcaagttcagtcctgtggtctcttaaagattgtttgttatacctacactttccaagcccgaacgtgaggaggctgtattagagttagtctcacattgctaatctgtggaaataaattatcacaagatgaatgaactactcctctcat

SEQ ID NO: 88313 - DNA, 922 bp, Cannabis sativa
ccctagttacaaatcgaattcccaagcacccattaagtagattagaagacaaaatttcattaataggttgaccccaatcggctctgggagcgtttttggaattgatttggtgaacagcagtgatgttgtctgaattggctatgaaaggtttagattttgtatcttgaacaagcttgatacccatcttcaaggccaaacattctgccatcagaactgaagtataaccgggatagaaacaaacgttggctgcaatcaaattgcctttttcgttcctaatgacagcagcagtagcaaatccttcataatccatcttcaaagcagcatcacagttcaaagaaaaagtgccaggagggggagcctgccaagagtacctctccttttccttctttgtcttctgctcctttgctgttaaaaccagggtatgatcaacaacatccaaagcccacgggatccaagacttcaatggggtcttgttgttttgaaaaattttcttgtttctgtggttccaaaccatcctacttatccccaaaaaagtctcaaactcttgtttagtgcacttcttcctcataaaaattatttgcgactgtggcttatacgtcagttttgtagatcgacgtaaaatctttatatgtcacttaagacaaaaatactcatttttgtagtagtggtattaatgtagtcaaagttgccttatttgtttatggaaattttgctaaaaagttgtacaggttcactatacctgattaaacggactaactgtttgtttaaatagatttttgagtttgttgtcatcatttatttgtttttgttgccattttaatcttgatttttattaaaagaggaagtttatttgagctgatcgtgtagggtttattggatcctatttttgtggtgttgaccgagattttcggcaactaataaa

SEQ ID NO: 88314 - DNA, 2312 bp, Cannabis sativa
  modified_base (341)..(341): a, c, t, g, unknown or other
ttaaataactataacgtatatgacagaaaaaatttgactaaaaaattatttcaagtgctaaaacagataaggatatatcaatatatccattttgaaagagtgcattgtagaattcccctaaaaaatataatttaccaactaaatttttttcaaactagcccttaaacttaaactgaactaaaatcgacatttaaaaaaaaatatattattatttattttcgatttgatatatataataaagtgtaaataatagtgaaaaaaaaaaaaaaagtagaatctcagcttacgagtgattaggcttacgcaattcgctcgagtgaaaaagagagagagagagaganagagagagagagagagaggcagatttgaggtcaggtctgagtgagaggaggacgagacgagaccttcttttctttttctcttttattcctaatttccctccaaaccaaatcaccaatccctaatatcaattacaaatatggtactctcacttttttcttttctgattttctctcaaagtctgcaacttttggtttttgatttttgattgtttttttttttcagttgttcttctcctactttaaggagttggtgggtagagaagtcactgtggagctcaagaacgatctcgccattaaaggaactcttcactcagtcgatcagtaccttaacatcaagctcgagaacactagggttgtcgatcaagacaagtaccctcacatggtatttattttcttttcttcttctgaattttagggtttagggttttgcgttctttgtgcctttcctaacgaataaactgtcaagtcatacccttttgactgctctcaccttgactttgataaacaataacgtgaaaatttaatgtttctgctcccgaaagcttgctttagctagctccatgtggagaaatattgagcttcgttgaacttagatatagactcagaaatgcgatattaattaccaacacacctttggttttgaatgtgttttatgcaagtgtatattttgctatgctctcttgagtggtttatcttattaaatcattgcagggttattccattttttcttagttgtattgcatcacaaattatagagtccatgggcactttgatgtgtaatgaaaactgtattttgttgacattgtcttatactatactagagaaagtgtaatcttgggttcatttagatagactaggccttcaagtccctaaaaaatcaagtgtctgactatcagcggtgcgaggcagggagaaaagaacatatgattcgtagttttcttttagaaaaaaagcttctttttttttttcaatttgtttattttataatgtagttcatgtaaaaaatgaatctagcttagtctaatatggtttagatattttgttagtagcttttcagtcatgtaaagacttgcatagtgttttgctatgcattattctgtagcaatatagtttcacaagaattttgggcttaattatctaagtagattagctagcgtggtaactttggttctactaatatttttattctatctttcgttgttttacgcatttctggattgtaaaaagtttggttgcaataacctttataatgatcttacatctgaattgaattctcttatgtatggtggcagtgtacctttccaatttaacagactatttttatttatggtttcagctttcagtgaggaattgtttcattagaggttcagttgtgagatatgttcaactaccccctgaaggagttgatgtcgaattacttcatgatgccaccagaagggaagcacgaggcggctaaacctcaatgataattcagtttagactctgtttgtcagacctttgtagggttaagcatatttttggaaaattgaactcaaaaactagaacttctcgatatatatgttatttttatctcaatcatttcttgtatttaactgtgagtaactaccttgatgaccagagtggttcttcctttttgactgcttcctaccctacttcataactggggatgtgtcattgcagttttgatgctctgtcacgtgtacggtgatcgcatcaccaattgatcaatatgactcacttttttacctctctattattctttttttttttttggaagttagatttaagaccattgctttatggtggttgctagaccattgctttatgtgtatgttgcatcaaattattgtagtccagtattaagtattaggctaattagtaatttttttccccgaactttgacatatactaaatcatgctccttgaactttttttgccgttgaaaatttcctttgaactattgagattgtt

SEQ ID NO: 88315 - DNA, 555 bp, Cannabis sativa
  modified_base (125)..(130): a, c, t, g, unknown or other
atcatcattaatttgtcaagtgttatgtaatatatatgtttgtctgaaaattacatatatatgtggatttgaaaatcagcagcattaataagtaaaatttgtaaaatcaaaaaaaaaaaaaaaannnnnnaagtaaaatttgtgtatatatatttttgtgtgttttagagaacatggttaaagttcagtagttcaccttaaaaaataaaatagataaacataccactatcagatttacaaaaatatgcaatccaaagtacccaatttcataaatatccgtactaatcacgcagattccaatttcagcatatactactatgtaatgtaacaaataaagttttataaataccaatatgagatatacaaatttcataagaaaatgccaagtttaccacagactaataaaatataaaatgatgttgttaaaaagataaaaggaaatgttcatttgtgatgaaaataaaaagagtaatttggggcaaaaccccctcaactatcaatttacttgcaaaaaatcatccaaccttatattttggtgggaaaaccctccaaagt

SEQ ID NO: 88316 - DNA, 548 bp, Cannabis sativa
  modified_base (49)..(49): a, c, t, g, unknown or other
attttaaataaaaattgagaacaaaactaatttaatggacaaaaagagncagataactctattttcatagagttatcacacctcaaacttaaaactttgtttgttctcaagcaaaaaagaaaaataaacaaaataaagcaagaggcaataggacactaaaattggtaatctccacatttcccttaaaggttgattaataaacatagcttagagaaaaaatataaagattgtccaatgattgtgaaaaattcaagaacaagtttcatatcaattttgattactctaagtgtgtgtgtgaaatgcatttttttaaaatattacttgcaatttagatcaatttatgcaaatatgaattaagaacaaaatctttaaagtaacaaaatctcataggtttgtttttcatctctctttccactaatgtagacaaacaaaaccaaagatcaaaatgactttttcaagcttgtaatgtaaggcttaagtgaaagtagttaacagaagtcatttttggctcaaatcacctaaaagcaccttaatttttctaagaccaa

SEQ ID NO: 88317 - DNA, 954 bp, Cannabis sativa
tactctcaaggtcgaccctaaatatactgtaacaacagtatatatatttataaatacataattttgtttaaaacaatatatacatatttatcatgtttattattttttcaattttttttttatagatgcgtataaaaaaattatagtataattaaatttagtagaaaaatatctataagctccaatttattaataagttctatacaattagagaaaattaaaatcatatacataatattatttattataattattttatgtactaattataatactcgaaattcgacaagtaaatcagaagaagacacgtgtcgagctgggaagaatggagaacttacacgcaatcgtaattacatttgacgtggaataactcgttaaaagcataattaacagagtatatttataacttagttgactgaatagtcttatacgagaaactattgatttgtgtctcaacgagaaaccatgtaattgcaagtgtgcaagacgaggcattaatctcattgtgtggaagagatataatgacaatagaaatacttagcgtatagcacacggtatacaaactaagtataagcagaggggtgaatcaaggtgataaatagcgaggcgttgatctccctgtaagagggcatgcatgcgagaaagatcatctcgacaccagaaactgtagttgtcagaattaaagtaaaagaattatcaacctcaggaagacatatgacgagctccagctcgccatcaaaattaactcagctccattcccagcgtggtatcccaatgggataaggctcaccatatatctttaatatgcgtccattttggcccaagaaaagcgggatattcacaattgtgtgaaatttaaatattaactgcatttacttagcgtgatttgtaatcaaattccatgattttaggggatgatcatcgtaaaacgattacagtcaactttgtaattaa

SEQ ID NO: 88318 - DNA, 525 bp, Cannabis sativa
  modified_base (296)..(298): a, c, t, g, unknown or other
  modified_base (338)..(344): a, c, t, g, unknown or other
atggtgtcattagtactctatattgtaaatcatatatattatcttgtgggcataggttaattttgtacacatattgtacaagtactatcaatcacatgcgcgcttctttgggaagatatatagggatactattttgtatctaagttaccaattagactctctattttgttaaatgacaaatggactatacatttttcaaattggtaaaaaaataaaccttaagcttaatttttgataactttctttataatataaccaacttgaagacaattcttaacacgaacagatacagaaannntaaacagttttgtcataatacttttaaatcagattattannnnnnnttattttgacaaaaaattagttcgagttcctatttgtaccattttggaaaatacatggtccattttatcatttaacaaaacagagggtccaaataataatttttataaaatacggagtcaaaaataatatttacccaagatatatattctataatcttacttaggcaaaaaaaaaaaaaaa

SEQ ID NO: 88319 - DNA, 1073 bp, Cannabis sativa
aatcaaggggtatttataggctaagtcgcgagtatggacaggcccgtgacttgcccaagatttcatctaaaatggtaaattacgtgcaatttagagttgaccgaatgatcccatgggaaacattatgcccgggtgtcctgcagctggataatggggaccattttgtacctcttagacacatgtcgctcaaaggttcaatccttaaaagtagaggccacatgtcgctcaaagcttcttcctttacaagtaagagtctgtaatatccgtctggcaaaacgtggtggtggtggtgcgcacactaccatgcaaacatgtaggagacaagatctgatcttcatatagaaaaagcataaccgtcactttagtgacctagcgagcataaaaggtcaatgtccacgacactctaaggtggttgacgtttgcgttaaacctttcaagcactcgtttgggtaccaccttagtaagcttccccattagacccctcgggtctaggagaaaccattctcctcctgagtctgggaagacgaggtaggattacgtacgcttctgtgtatttttctatcccgaataattcgcagttccagaaagcctctctgtgacaaagtagtatcaaaggacttcgattaaggaaggattaaattatccctcctcattaaatgccacatgtcatactttgtagaaacgtagataatcatgatcgacaccaagtctccttagaaggtcaacccccaccaacctctaagctatctcacctatctaccacttgtctgtcaatttctcgacaaaagctggtatcgactgtctccttggcaacaaaatagtagcatgcaaattttacaacacatagttaacttcactaagaaggcctcctctgttgtgctaacaactaaggggatgaggaagacctcccttgctatgctaacagtcgaggggaagtagaagacctcctctactattgagacagccaaacggacgaagaaggcctattccattgtgaatacaggagatgggacgtgaagacctctaagtttaagaccaaggataaaattgagatcgcacctacaatcactcta

SEQ ID NO: 88320 - DNA, 1464 bp, Cannabis sativa
ttgcctggtcctggtcacatgagtcacatgaggaccatgaggacagaggacatggcatggtcggtatggtcggtatcgatccttctataatttcacacgccctaaacatcgattcaaacttccgacccatttatttagcaagcaaaaaagaagattgttggacaaagaacgggcacaagcattaaaacaagaggtagaaaagttgcacaataacaacttcataattgaggctttctacccggcctgggtatctaatcccttactggtacccaatcccaataaaaaatggtgagtgtgtattgacttcaccgacctcaacaaggcatgccccaaagactgctttccacttccaagaatagatcagctcgtggatgcaacagttgggcacaagatcctaagctatatggacgcctatttagggtataatcaaatcaaaatgcatccaccagaccaagaacatacaagttttcaaacagatatgagtctatagtgttataaggtcatgccatttggtctaaagaatgctggagctacatactaaagattggtcaacaaaatgttcaaagaccagatcgaacgaaatatgaaagtatacatggatgacatgctcgtcaaatctaggaaggttggggggcatatagatgacctggatgaatgcttaaaagtcctcaggaaatacaacatgaaactcaatcccttaaggtgcttcttcggggtcaacgcgggtaagtttcttggttttattgtcactgctcaaggtattgaagccaatccagaaagcccacctagatatgaaattgcctacaaaaaccaaagaattccaaagcttaactggtcggatagccgcactcagtagatttgtttcaaagtcaacagacaagtgtgttcctttcttcaacatcctgcgaggaaacaaaaaatttgaatggacggaggaatgcgagaatgcctttcaagagctaaaaaggaaacttgcaaaacctcctatactttcaaaacctctagatggagaagaactagggatatacttggttgttacagaacatgctataagtgtcgtgctgattagagaagagacaatatccagcacccgatctactacatcaacaaaagactggttgaggccgaaggatgatatccgatgatagaaaagcttacttactgcctaatcttagcaacaaggaagttaaggtgtacacaccaaccattatgccaagtattacgaaaacctaatgcctctggacggttactcaaatgggcggtggaattgggccagcaggaaataatcttccaaccctgaatagtaatcgaaggacaggctttagaggattttgtagttaagtgtaaaggcaaagaagaaagtatttcaaaaacaactcaaagccagtacaagaacctcagccaagcaatattaaagacaaacctaactagaaattacatgtagatgggtcggccacagaccaa

SEQ ID NO: 88321 - DNA, 809 bp, Cannabis sativa
attgaagtgaagattataaataccaataccagtgctcgtgttactgcccctcctccaaatgagacaactatttcaacaattgttgagatggggttttctaggtctagagctgaagaagctttaagacaagttggatcaaatagtgtagagttggcaatggagtggctattctcccacccagaagaggtccaagaagatgatgaacttgcacgtgcacttgccatgtctcttgggaactctgatacggacactaaggaagctgatacagatgattgtgttcctcagctagaagaggagatggtccagctaccccctgttgaagaattattatctacatgcacaaagcttttgcaaatgaaggaacctctagcttttccagttcgagatctgctggcaatgatgtgttcccaaaatgatggtcaatataggtcaaatattgtatcatttgttgtggacaaagtaaaggagtgtagtttgactgctgaggttggaaatggcaccatgttatctgcacttttccatgttcttgctttaatttttcaagatgatgtggcagcacgagaaattgcctcaaagagtggtttggtaaaagttgcctcagatctgctttctcaatgggaatctggtactgatttagattgtaggttgaagtgtcaagtaccaaagtgggttacaacagcttttctttctattgatcggctgttgcaggttgatcaaaaattgaattctgaaattccagagcagttgaaaaaggatggtattagcggtcagcaggggtccattagcattgatgaggataagcagaacaa

SEQ ID NO: 88322 - DNA, 830 bp, Cannabis sativa
cttttacattcctccacacacactcactgtgatcttggacttctctctctaaactgaatataaagtataagcttggaaattagagatcagaacttagaactcaaaattcatttgaaagagtagagacactcctatttataattgttggtggggttctctttaaattggtattaaagctaactgttataaataacaataatttcttcagattcatctgatgagcatatatatgaacctactaatttgacaatttaagtgagtttaatcccaacacatgttatgaccaatattgttggatatgaaatatgtatcttttatgacatgatatcacgaccaacaaaaaatgtgaaaaaccttccatgacatattttagaggttaacctaaaactaaaaaaatataaatagaacaaaataatgacactatgaagcattcaagtatgtttatgccatatataggtacttaggtagaagcaattaagcctaaaacatgtggatgggtttggactttggagatagagaaatgacaactagttcatcatgtcttttagttttaactctttaatactagaaaagcaacttgtgtgaccctatgtaaaaaaaaccaactaagtaataactactcaattactattgaccatctgtccaattttgggagtatcgatctgtccaattttaacagttccctgctttctccttgagcagatggctgtttgtttgctttagtttagttttagcttctttgtttagtctatttcttagcttgattagttttagacctttgtttttctatgttctggtatgttccactgggactttgctgtgttcttggc

SEQ ID NO: 88323 - DNA, 706 bp, Cannabis sativa
agttattgcctaaaggtaagccttgtctacgttgaatttgtactgaactgaattattccacttggattgtatgcttgtaattggaacttggcccatttaactttggaaagaaaggtcatcaaatcacaaagttgaaccaattataatttattgttccttatgacatggagaaaaagaagagttgggcttggtccaatttattggattccatattttttcatctttcccaacttatgcactaaatctgataatagacacaaaattagattaagaaatatttttaagttaattaattttgcacttaaaatcataaaaataaataatttaattctaattattcacccaattacctttaataatatgtaatttttacacactaatcctcgagcctttagatggaattgaagatatcagagaaatatctgaactacgaaaggtggcatatctgcaaagggttgcaaaacaatacaattccaatgccctatactttggggtgacaatttaggtgctagctcacttgcttcgaatctagtgtatcatgcccgctctaaacatatcaaaatcgatctacattttttaagagacaaggtcttggaaaacaagttagatgttgatatgtggacacaaattttcaaatagcaaatgttcttacaaagcctctgacagtcagccacttcacctagacaagttaacacttagttgtcta

SEQ ID NO: 88324 - DNA, 518 bp, Cannabis sativa
tatgaagaaaaaagaataaattttgatatatattgcatagaaatttaattatattaaataaatatttttaaaaaaaggactatttacaaaaatatggtaaaaataatcaaagtcttgatatatatatatttatatatatagcatgcaaacttaattatactaaatatgacatttttcataacaaacttaaaattatgagaaaaattattataaataaaaatgaatgccataaaaaactgtaaaattgtaatttctatttttatcatataaaataactagttatttacaaaaacactgcaactataaaaatttatttaaaaaaaatatccaaaagctaaaataatatagcaatataattttggtaagacaataataaaataatttctttcgtagaatcaaaaatatattcttaatgaaaaatctggctatacaaataccaaaactcatataaattttacatatttctaataatcttaaaatcagttacaaacatctcagaaattccaatactagaccat

SEQ ID NO: 88325 - DNA, 755 bp, Cannabis sativa
ccaatctctgacccgaacccgaactcggacccggaaccgagtctcggacccagacttggacccgaacccaaactcgaactcggactcgaacccgaacccaagactcggacccggactcagacttggaccctaacccaaactcgatcgaacccgaactcggactcagactcggacttggaccctaacccaaactcagacccgaactcggactcagacttggactcggacctgagtctaaacctcgacccggacctgggacctgggacctgggacccggacctgggacctggaacatagattattgttatatattgtgtattgtttttattatatttgtgattaatttcttttttgtatgtgcgtgtgggtttttcttttttcatttgattgcttaatgaaatgggttttagttaactttattgtttagcatttatattttgttataacttttcgtagtgtcgaaattagttttataaggttcacaagttcgaaactgatttcacaggttttaagggttctgtaatggagttgctccattttataatgttattgtatattttttattttaagtttcttttttattattttgtttctaggttcgaaattagttttcacatttatattttatttttgaattattgatgtgcagtgtgtgttgttttgattatatttgtgagtatttttttcccatttgattaattgacgaaactggtttcaattttcattatatatcatttttgttttattttcataat

SEQ ID NO: 88326 - DNA, 661 bp, Cannabis sativa
taaaaaaataaagagagagcttcttcttcttcttcttccaactttgaaattattattcttatatactgaatatttcaaagatcatggtgattgagagtatgcccattcatgtcaaagtaatacctaacatagtgtggaagaatgtgtctaaccaaactgaaagagagaagatccaggttcagatcttgataattctctactacagaaaggaatcaagggctagagatttgaatgaaaggagttattattattctgctaccatcaatataaggatttcttaatatcttatgtgtttatttcatcgtattaggaaattcatatttagggtgttagattatagaattataatcaacatacgtgttactaaatctagatcttggtaaaataacttccaacaacttgactcaaaggcatagtaatgatttacttttataaaatatggatttaaaatgaaatttgtttgacttgggtgtgttcatattggtttatgtgcttaattgatgaatgtttataaattatgaattttctttgaaaaataattttattttcattttaaaaataatttatttggattccttgtgaaaaattaagcaagtttgtttttatggaattggattttgattaaaaatgcgtgagttatgtggttttgaaaattttggtc

SEQ ID NO: 88327 - DNA, 1041 bp, Cannabis sativa
  modified_base (51)..(53): a, c, t, g, unknown or other
tagtacttatcacatttgttcacacattgatttgttcttacctattgaacnnnacactagtaaagttactagtattaagataggttaccctcaattgtgtgaaccattttagggagttttaatcctattctttaaaagtcttttctactaaatctctagttagtggctttataaacaggtgcgccaagttttcacttgatctcatataggatattgagatgactcctctttgaatcaactcactcaaaatatccatgtgtcttagactaatatgtctagacttaccattttatactccactatacgctctagccaatgttgcttggctgtcacaatgtattaatattgtagatacatcctctttaattattgcaatctcaatcaagagatctctcaaccattcggtctcctttccaatggtagctagagctatgaactttgcttccattgtggaatgaaaaatacaagtttgtttcttagatcccaagaaactgcccctccacttagggtaaatacttagggctgcacacgagttgggttttcaggtttttgagtggtcgggttcgggttttcaaatttcaggtgttggaaatgcacaattgaacccgatttttggtggtcgggtatggcgggttttgggtcaggtataccgggtttcacgtggttgggttccagtgttatttgaatgacttcacgtttcctcggcaacaaaaaatatatattatataatacatatatatatagttatatataattaaaatatatataatgcagagtagccattgtcaaatcaatagccattaaagtattatactacatttattatataaaaattaattaaataatatacagggaaggacccactaagattgatgtgggggctatagccctcacgaacaaaaatattgccttttcaaaaattaaatataaactttttaatttaataattataagctaaaatagtagaaaagtccccacaaaattagataaatttagtaagagtgattataatgtagctataaatatttttttatgataaat

SEQ ID NO: 88328 - DNA, 611 bp, Cannabis sativa
attcaacccatgttcattttcaaattcaattaaacccgggaattcttggagcattgacacttctatgagaacctaaggataactcagcttattcctctcttagggaactcatcaaccattagaggcttcccaatctgccctactattttgaataaagtcgactgcccccaatatttgagttctaaatcttctaattgaatccaaatcgggacagttctaatatcctctttcttaaaattcacattaggatcccatgctttcatgattacatgcctcttattaaaaaaagtatatcctccattaagaatcaggtttctatcttcaatgctatagaatcgaataaggaaaataccatacgaaatcatacctactttgtccactttttccttccataatctccgcacaaagccttcaattactggtagtggtgggttggctccaagcacataacagacaattgatgagctctagaaatcaacttcctcctgtatatcttcttcagtgatcttcactctgttcttggctgtgaacgatggctccagattcctaattatgctaccaaactgaagaactggaggcacagctttgaatccgtgagcaatctctgatga

SEQ ID NO: 88329 - DNA, 701 bp, Cannabis sativa
tgaacagccaactcgcattatagaagtcgcatacgttgctgtatttagtaaattaagcttgaaactgttcttcatttattgtttacatttttcagttcaattactgtaactcaatgtatgaacggattgataataaatttaatctatatgtaaatcataggacacttgctttgtatataaaggaatgatccaccgtaaaatggcaacaagacagaaatccatgcaacagtggactaagcagacagtgatctgaccgaaccactatattctcttgagttctttgtagttcctgtttctgttaagtattttgtgttcctgatttgagtgctcgccattttgggttgagtacttgcacaaattctctacacttattattattatttaattttggtgttgtaaaaattccttcaacaacagttctatataccgttttgaatcttgcaacgagctctacaatatggtgtatgttttcgagccaaaatataagttttattttagtgtatttataccgcggggtttaatagaaaaccctagattgtcttatgtgaatattaagcagtgtgttgggataaacacatactggtctaccattgctgtgacatacggccgagatcatcggggataattctccacttgaattggctgaaaaatatgaacctggattaaaggtaaaaaaagtatattgtactgcatagtacgtt

SEQ ID NO: 88330 - DNA, 682 bp, Cannabis sativa
aaaatttataaacatgaagccttatttttgcacgtgttgcttgttattggcccccctaatatttagtcctagctccgctcctgtaacaaacactgaaccaatacaaccaactaatgacagttgggtaactaaaatagtaacaaattgtttccaatacacacccttaaacttataattggtaggatgaccaattgtgagtttgtatctaaaagaagagaatagttgactagaaatcagtttggttagaccattagcaagttgatcaaaagctggaatatgtttcacttggaccatttgttgaagaattttctctctcacaaaatagagatctagttctgtgtgctttgtgtgatcatgtaaatctagattagcagttagaaaaactgtacttacgttgtcacaccacacaacaggagtttaggcagtggaatgtgtaactcaatgaacaagaagtgtaaccaagtgagctctatgacagtgtgcaggtctttaaatttttatttaagaaaatagtttaaatatactaacaagaaaatgatacgtgtggatactgattagacatttaatggtcaaatacctgtgaagttcaaaaaatataacttaagtattattactacaaaaaattaaatttagatatttatttacaaccgagttaaatttaagtatttataccagaaattat

SEQ ID NO: 88331 - DNA, 643 bp, Cannabis sativa
atatatatatatatattggctcttaaatgggagataacttcttaattgagtgtagcatttttattacttgggatagagggacatgaaaaatttgagagaaaaaatttggctccatttaacagggaagttcactaattatgagtttattgggtattgtattgtataatattatattaaattatattttatataatatttttatgaaaattatatttgatattaattttatagacacttaaatatataatattttaatataaattaagatgtaatgtaatattatataaaaaatataatatataatctaattccatataataaaatacaatacatctaatacaacttaggaaactagtactgtatgttatatgttgtacgatttcattaattgaagcgtaaacgtacaggatcgggatccatataaaacactagtatttaaaattttgaagcatatgaaaacaaaggttctttgcttggaattctttaaatcgtcatcttttgaatgaaatttctaagaataatatgtattgccggaagccttaagcgtaatatatattagtataaaattttataaaatcaattttgtgatcaagcctattctagcaaacctcaaagctcctttggtaaaataaatagaataatt

SEQ ID NO: 88332 - DNA, 767 bp, Cannabis sativa
  modified_base (142)..(159): a, c, t, g, unknown or other
taataaatatgtcttcaatcatgaaaaattgcaatgtatatttttaagagatttttataaaaatattagattttggagaaaaatttacaatattattgtcacataattttttagggtaattatctcatatactgtttttttnnnnnnnnnnnnnnnnnntttacggtttgggtttctaaagtgatttctccggtagtttctatgtgggttgctatacgattctttgttgtgatttaggttgcaacgccggttgcaataggagtttctatgtagaattccgtaaaaatgccaaaaaaaaaaaactattttgaaggataaaaataaaaaagctcctatttttataaaaaaaataccgtcttttttataaaataacagtaaaacaattacaacagcaatgcaacaactaaataaagcaatcctacaacaaccgtgataactttaattaattaatgaaataataataattgtgtgtacaatgttcactttggcaactctttccagactccagtactttacccaaaccaaattgtcttaattaatttcactctaatctaatcaaccaaattagttaattaatttattaatgtgtttttaactgatcaatcaaccaaacaagttgagcgagagtgagacgagacctttttggcctactctgttttggagcttcaatatatattatcatcaatggcggtgacaacctttttgtgtaaaccttttttgagagtagtccctcaatttgcaaatataaagcttgaagagtaggagag

SEQ ID NO: 88333 - DNA, 732 bp, Cannabis sativa
tgtacttaaacgtattatcagaggatttttgtgtatgttggttctataaaaaactatatttttaatatatataaattcataacagagtggacataagtaaagctatatttttttgaatggatattaaaactatattaaaaacttattacagaagagagaaaagattagccaagaaaagttgtttatttccttttccttccttaaaagtttaacttttgagctgattcctttttttttttatcagaagggggtaaggagaagaaaggagaaggcttcgctgttacagtaaaaaaaaggagaagaaagaagaacaggggaagaacaggaggagcaagaagaaaaagaaaatgaggaagaatgtagacttagacgtcttatcagaggatttttgtggatgtaggttctattaaaaactatatttttaatatatacatataaattcataacagagtagacattagtaaagctatatttttgtgaatgtacagtaaagctatattaaaaacttattataaagaaatgaaaaaaaattacattgaaagccaaaaaaattgtttctttcttttttttttccttaaaagtttcacctttgacctgattcttttttttttttaatgagaagggagtaaggagaagaaatgagtaagaagaagaaaggagaaggtttcactgttacagtacagaaaaggaaaagaaagaagaactggggaagaaagaagaaaaagaaaagag

SEQ ID NO: 88334 - DNA, 559 bp, Cannabis sativa
gttgcttgctagctagtgttccctcttctcgcactattgctgaactaatcgcattttctgagagagccaagtagaggagtagtgtctctccagttactggttttgccaaaattggaggtgttggcaaatgccttaatgctcttaaaggcctcctcataatgctctatccattcaaatttattgttgcctcataatacattaaaaaatggtagacacttatcagttgacttcgaaatgaatctattaagtcccaccattcttcttgttaaggccttaacttcctttggtttggttggtgatggcatatctatcaaagccttgattttcccagggtttgcttcaatgcccctcccattgactatgaatcccaaaaaatttcctgaggaaattccaaaggaaaattttttcaggttacgcttcatattgtactttcttagtatttcaaagcactccacgaggtctgtagtatgacttccactctttaccgacttcaccaatatagcgtcgacatagactgttggaattttttttaccagaaacttagatctactcacaagta

SEQ ID NO: 88335 - DNA, 717 bp, Cannabis sativa
cctggtaaaataatttcaaacagatcaaaacctagacagatacctaaaccagaaccgagactaggactcgaacccgaacttagaacgggatccaaacccacacaataaccaggacctggacccagaatcaggatagggacctgaaaaacagaactaggacttggacctattacccgacccacaccttaacttgaacctaagacccagctcgtgacccggtacaagaaatcgaacaacactgggacccttgattgggattcggatctggacccaaggcttggacaaaactcatagtcagtgtctgggttttggaccagccctggacccgaaccgtaaaaaggactcgaacccacacccaaaccttaaccaagtcccaatcccaaaagtggaccagaacccgtaccctgtgacccaaaatcggaacaaaaaccggaagttggtaaggactggaactaggacttggacttggaatcataattgaaattggacctagatccagaacagtaaacagagcaggactcagacctggactccaaatcagacctatacgcgaattgggagccgcacccggatcccaactcaatcctggactcgggacctaaacccgaacctaaaatcaaacccaaacatggaacgagacttggactagaactcagacaaagaaccaaactcgaaccaagacctagacctgggacccaaaattagaacctgaacaag

SEQ ID NO: 88336 - DNA, 524 bp, Cannabis sativa
accagaatcttttgctcaagctcacgtcatccaagaatgggacaatgcaatggatcatgaaattgtagcacttgaagctaatgacacttggacagttgtttctctcccccctcattagtatgctataggctgtaaatggatttacaagataaagtttaatgctgatggtagtgtggagagatttaaggctcgattagctgcaaagggatataatcaacaagaagatattgattattctgaaacctttgcacctgttaccaaacttgttactgttaaattagttgtggccttagctactattaattgatggattttacatcaacttgatataaacaatacttttttacatggtgacctagatgaggatatttttatgactttacctcatgagtataatcctaagggggagattccacctaatgcagtttgcaaattgaaaaaatctctatatggtttaaagtaagattctaggcaatggtttgaaaaattctctaatgccttagttgaagaaggttttcaccatt

SEQ ID NO: 88337 - DNA, 555 bp, Cannabis sativa
aatagtttttaagttatgaagccaaatagatctttgaagtcccaaatcttattccattagagaagccattaacaattatcggagggttggagtaaagattttttggataggcgttaatctaacccgacaagccttctttgatcaaagattgattctagaaatcaatggtgatgttttctaactattctttatgctacttgtgttagttttttattcttagttattttttttttgaattagtcttgttgttcataataagagcattgttaatgttcttatgatattattgttgatttaacccttttgttgttattctcattgttgttgatctttatatgtgttcatactgcattaatgtaatgttagaatcataagaatccttgtaaattcacaacaattcaaactctatttcggtgtaagcttttgctgctgcgaagaatggtaagctgtaatgctttgtattttttttttattgactttggttttgaggttggataagaggtggaagatgaaatacccatgtgttttatctatgggaacacctttctggttgct

SEQ ID NO: 88338 - DNA, 787 bp, Cannabis sativa
agattttttttttaaaattgggcgggttgcacttaaattttagcaacccgaactttagattgggttagaaaatatataggataaaccgaccgatgtacagccctaacaaatacattgctaaatacgcaaacatttattattttagtcaaacatcactaatcatcgctaaacttcatttctaatcttagatttaatttattattgcaaatacattgctacatattgcaaaaagttagaatattaaaaaaaaaaaaaagtgcagaaaaatgcaatcaaaatctaatttttgggaaaaaattaacgaaacatacacaaatatgtagatctgttaaaaacaaactatatataatttggtaatcggccaaagagagaacaagagaatgagagatgagtggtgctttgtggtgagtttagttgatcttttatgggagagagaattggaggaagaggagagagaatgagagaagttaaaataaaaaagtgaataataacatatttttcttatgtgtttaatgagtggattaattcaaatccatactttacatttgaatatagtaatccgaaattcttatatcggctcgtttggtatgcaggattggactggactggacaagattatattatgctgaaagtaatcttgtgtttagtttaagaatagactggaatgttttatttatttccttctaaagaaagaaaaatttaaattaaaataaaaaatatataataataaatgaaaattaaaatatacaataataaataaataaaaatgaataatttgcagcaaaaa

SEQ ID NO: 88339 - DNA, 551 bp, Cannabis sativa
catgattctcatgtgtgatcaaattccatttaactatccaaattctatttggtattgggtgtgcatgagagtagaatgtttgacagagttgggtgggagatttacaatcttaccttgcctctatgaaccagcaggagccaggaatttgttaattcacaactttgaactgtttctacagtatgcctgatatgtgtgcgaactttttaaggatgtaaatttttcttgacactgttagaacttagaagttttgagtttgtatggcttatagtaccacctactatgaacatttattttaacatgatgatggtggcttatagtagtatgtctcatcttcggatattcattttgcagtgtgcccttgcattctgcacactcttgtgtgtataatacccaattcctggtaactttaccatcaggatgtcgggaacattgcttgtataactgaaaatacacgagtttgtttgcacatattattgatggttatgaatctaattatcttaaaccatggatgtagaaaaatttcagtagaagagaaaagaaagctcggggca

SEQ ID NO: 88340 - DNA, 894 bp, Cannabis sativa
atattcaacaatgaaaataaatatataatttcctcattaaaaaaaacgaaaagatgaaaaagtaaataaacctctattatcttagttaataatagtttctagaaactaattagtgattctctttcaaaaaaaaaaaaaaaaactaattagttattataaggagataaaggaaagaaagattttaaataaacttcatatatatatatatatgattaggtttagtataaggttacagccattaattataatcattaaatattttaaaaaattgatataaatttagagaaatttgttggtgacgctgcaaagaagcaaaatataggcaagattgtatctcttccaatgttactaatttggtgactgaaatctttgagaggagaaataaaattattaattgaatatgggaaagaatttatcgtcttataaaataggttggaattgaaaaaacaaatagaaattaataacattaatttatcaggataaattaacatcttaacttttaaagcaatcattacaagagtatttccatgactccaagtcaaaatactcaagaagtgatctagacatacacacatgattattgaatgattttatatgggttaatctttttaatactaatacaaagttacttttgatattttttttttgcttatgacaaagttacaaacatggaactacaaatttaacgcttgtaataagaaacaacatgtagttgcttgaattgttttatcttcttcacatagttgattttgttgaattggtgaactagctaggtgattggtactgttttaatggtttttttaattgaaaaatcaactttataaaccattaatctcagttacaaaataggtattattattctataaattaaaacgacaaccaaattaaaactct

SEQ ID NO: 88341 - DNA, 781 bp, Cannabis sativa
  modified_base (28)..(30): a, c, t, g, unknown or other
aatgtcaatgcagatattttcacccccnnnagcttccctttttataaattgggttgaaaaaagggaagctaaagacttacattgcagtagtgtttttagatagctatcttgttagttttatgtctcagcttgttcataatgccttacataaggaggttaatcagaaaaatgaaaaaaaatgtgaaaaatggaagaaggctgatggttctattgaagttttgaataaggttttagagtgtagatttaaggagctagagttgaacattcaatcatatattgactctaagattaatgaaggcttgatattttatatggatttacagttcaatgatttgaaggatgctattgaaaatacaaaagttgctaaagatagcaatggaagtcctaatgagagtaatgacaatgctgaatttgtgagtgtttactttcattttaagtttatttttgttatttgtttctatattgttttttttttctactgaatttgtttttttagaaggataatggtttaaatgatgttgaagtgaatggtttaaaaaataaaaatgaattaaaatggtaaggttcgatgagaatgaagatgatggtagagatgacaagacaagtttatttaatagattttttcattatgtttgtgtttatttagatgtttgaaattttttattgtttactttgttctgatttttttaatatgttttaacttttatttaataaggtatttggtttcattattattttttcttcgtatttgttcatgaaacactatacataacaaaattaa

SEQ ID NO: 88342 - DNA, 579 bp, Cannabis sativa
  modified_base (30)..(66): a, c, t, g, unknown or other
tttcatggttttagaattcatattaggttnnnnnnnnnnnnnnnnnnnnnnnnnnnnnnnnnnnnngtaaaataatttccaacatgaagtccaagaggtagaggatcagggtgaggtttgtcctgatactccctctaaagttgaaaaggaaagcgcagctcaggtggctacccattgggagttataatgagaagggattaccagtgtctgagattagggaactcttagaaactggtgaagactatgtcaccgaggaatatacagaggctattcctctgaggaggcaaagtgcattaagagctcggtgggtttctcctccatccgtggtaatcagggcaaaaatgaagaatttgcagaagcactgttacttaggggatgttgaatgcttccttccctccccaaacaagttggtgaccagtccaagggaaggttactacacttggttgggcactcacactatgcagggtcctatgttacccttgctttcgtacttcaagagaattatagattacaaccacctctgtccgacccaatttactctgaagggcatcaagtatttgtcatttatgtaatttatta

SEQ ID NO: 88343 - DNA, 900 bp, Cannabis sativa
aaaacaaaagtgttaccaaacaacaccttagttaattgataaataaaaaaaagtatttttcaatataccccaagaatattggtaaggggcatatgagcttatggggaccctaggcttgggcttagcccatagtcagcaaatgagtcagcctgagcattaggttgaaccccaaatgttgtggacttgtgactcaatattgaaaaagaagatagtattatgaacaataacatggactttgctgaggaaggaatgactgcgtgactacttacatactgtagaatgggatctttccatgtagaaagaaatatattatgattaagaaaaattagtaatgtttacaagcttagtgactgatttcataaaaactaatactctagcatttggccgttaaaaatttagaagagaaatctacataataagcgacaactttttattagtaggaatacttctgacacgtcatcaaaatagggaaatttgatgaaatatcactctatactttttttatattgtcttcttttatttttactctctttttcaaagttatcattttttccttttttttttaacccatgtcacttcaagatattctccatgtaattctcctatattaaggtattttggaaaaagtacatataaaaaaaaatatttcaattaaatataaattagaggtagatttggttaattaataaataaaagaagtatttttaatttaccctgagaaatttctctaactagtaaaataaccacgttaaacttatgttaggtaaatataagatgattctagaatgcattctttataagtttatttatttcaatatttaggaaaaaatatttagtttaatttttttgatattcgtttacgttatagttatttaagatattttacaaaattttaaaaaa

SEQ ID NO: 88344 - DNA, 624 bp, Cannabis sativa
gttgagtagcccaaaaaactcaaatggggcgggtcttggtttccaagcccgccaatcattatgaatgtgctaagctggaattgccgggggcttgggaaccaacggaacgttcaattccttcgagaaacggtttctcaaaagagacccaattttatctttttgtgtgaaataaaatgtcaaaaatcaaaagtggatggtgtggcttctttattgggctttgaaggggcttttactgttgattcggtgggcttggcaggaggcattgctctgttgtggaagcataatgatgattgtgctattttgggtttctcacaacaccacattgacttagcaataaactcatcccagttcggtcaatggagactcacggggctgtatggagagccaaatcggaataggagacatgaaacttggactctaatccgaaccttgtctagacaatcggggttaccatggtgtgttattggcgacgtaaacaacgttgctcgtcaagaagacaagaggggtggccgactttatcctcaaggtctgattactggtttcaaccaggtgcttcaacaatgcgatttgtcggacttagaacttcaaggacacccgtttacttgggagaaagggagaggcacg

SEQ ID NO: 88345 - DNA, 1063 bp, Cannabis sativa
aacaaatcagattaaattaaaatgggttttatttatggcataaaatcccaacacatatctggtaggatcataggagtcctcgctttgcctctctaggattttttctctagttttctcaaaatctccaacatttcttctagaatagggagttttagtggtatttgtcctgtgggaagtctgatgttcctttctaggacgttgggttatctctcctagttgatcctcttcatttcgcggaatatcgtctgccatgagttaataatttgaatttgttttcaaggagagttttttttctgagttttttattacaagactctcaataagagcaccacactgttaacgtaaatttttgttaactaaataatatgtcttttctataataaatgatcttcagaatttattatataataataataatagaaataattaagaagaaggtttttacgtaattttgaatttaaatcttcatagtctaagagtccatcttattcagggttagaggattgtatacagaatataattaattatttttcaagaatgaacaattaatataatataatattctctatttttccaaaggttagttgtcccttattctccgaattctatatttagttatgggagtctagtatgacagttattctcttagggtctaatcatttgcaaccgttcatgaaacgtggacactcccaatttttcatatttatgcacatgagataattataaataactgcacaattgttctttatctttatctataaacaacatatactgactatgctttgttgctcttgtcattcaatgaaaacttttcttcaacatctccgtggaataatgtctaagtgtaaagttagagcacatttcaaactcttccttaaatattgagtgaagtatatgcgagacgcttacttcaactcgtcaagagcgagatgaataatgttgaagttgtccttattctggtaatatactcacgggtgcgtgggtgaatgagctgcaaaactcattatctacccattctaaataattcaataatgtattctgtttatcccgagatagacttgtt

SEQ ID NO: 88346 - DNA, 1244 bp, Cannabis sativa
acctttccaatcaaagaagattcatttgtaaggagccgccacccttgctttcccagtagagataaattaaaatcatgaaggcttctgaagcccagtccacctccatgtttgtgtctacacatgcgcccccagctcgtccaactaatactccttgtagtcgaagagcctgttttccaccagaatttagccataataccttctaaatccttacaggtttccattggaagcagaaagacactcattgcatagctaggaatagcttgtgcaaccgtttttagaaggacctccttccttgcagaagagagtacacaaccttcccacccttgaatacacttttgtaatttgtccttaaaagaacctaaaatggcagtcttctttcggcccataatattcggcagacccaaataggtggtgttatcatccgcttcataaatccctaactgtccacagatcgaatctctcacagcagcttcggtattagaactaaagaaaacagaagattactcaaaattcactcgttgacccgaagcttgctcataaagatgtagtaactccataatagaatcagcttcccgagtattagctctacagaagaaataactgtcatcagctaagagcatatgagaaatcactggagccctacgagccactttggacccatgaatcttgccatcaacctcatatttccgcaggagacccgaaaaaccctcagcacagagaataaagagataaggagatataggattcccctaacgaataccacgtataggaagaactggacccatctcacgaccagcatgcacaaaagtataagataccgattccacacagtgcataatcaagttcacacatctcccatcaaagcccatccttaacagaaccgcacgaagataaccccactccattctatcgtaagccttactcatgtcgagctttaaagccatcaagtctttcctcccctaggttttcctttttaataatgcatgatttcgaaagaaaccatgatattgtctgagataagccggccttgaagaaaagcactctgagtttcagagattaccgaaggaagcacaaccttcaacctatttgctaggagttatgttatgaccttgagtagcacattacaaagcgaaataggtcttaaataacccatgttgctaggctactttttcttggggataagaaccacatttgtattattgagcccagcagggagaaccccgtgttgggtttcatgccctaaa

SEQ ID NO: 88347 - DNA, 1618 bp, Cannabis sativa
tttgtgcacaagataggatctaaattataatttcactagtgattaattgtactaaaggataaaaaagtaattataaaggtaaaacagtaatttaaccaaaattaattacggaccaacacaaaatgggctaattagtgcaattaattatatcaatggacactgcagtaaactcattatttataattctataattactaagagttcaattttatatagatagtagagtaatcatagaattaataaacatggttatttgattgatgagattcaataaataaatctagtttattggagcttaaagttataggtccatggttcccggatcgccaccatgaaatattatcaaggggtgggataaatacatgtatatagaagttcaaaaaagtctttttttgaattagcaaatagtaattatttatttttgtaataaataatttattatcaaattaattaaataaagaaaaaggcaaaaattgttaagacaaaagttatcagaacaaatggcacattctttgacttcaacaaggcataggaggcgccacatgcattgtgtccagacacagtgaaagcccccatatgtgtagggtatccccattagttttttatttttggtttaattaattaattcaatcgatacatatttgaatttaaaaagtagtttatattttctctcaagtggttgagagatttcctcaatcgattatattatttattcaaataattatatgtgatttaataaatagatttaaatttagataattaattaaattaaaaatttatttgggtttatttaaatataccgtataacaaaattctgaacaataaattttgggaatagaattttcacataacttttctgaaagcctaaaaaggccttttaccagtaaacctttttctctatatcacataaaacattgttcttgctcatatgttgagatttatacaagaacttcatatacactttatcatagtagctcacactactccttgtgtgtggtggatcgatcttgaagattacggtgtgagagttattggatccaacttacgagaagttttaaggatactttgataatcatcaagaagtatttattattttcatgtaatttatattttagatttattatatatacatctggagattcttgaaactatggtacaatgataatcaaacaattattgttttgttgcatacctgatttagtactacaaaactaacatatcttactttaggataagataaattcaaaaaatagacattgggaaagaagtgagtaacccatcgggccatatcgtacttataggtatgtataaaatacaaagaaacctatcgggcatgtatcaggaaactattggacatcaatcgtccgtatgtttggtggtctaacatcgagcatgtatcgtgcacctatcatacacatatcggaacttcacccctaaccccccgtccctgaaaccatcgatatcgtacccttattgggcactattgggcattttccaaaaacacatagaacccaaaataaaatatttatttcacataaacgtgatttacaccaaataatcaggaagaaaaaaaatatcaacaaaccacaaatccaacatctaaatgacattctaaaac

SEQ ID NO: 88348 - DNA, 688 bp, Cannabis sativa
gttggtctggttcataaacattctctttttgcttctaatcgttgttcgtactgtttgaataggctgcgttttttttttcttttttttcctagacgtcattacaaaagttgatcatcggtttacattttggttttttggagtgctattgtattatttacatctcttgcacaatttaatcattttattgtgagtaatagttttacattcttatcggtttacatctcttgcacaatttaatcattttattgtgagtaatagttattaggtttatagatctttcaattaggttcaagttgagttctagtttcttctttgttatgtccttgcttttttatggagaatttatttcaatgttgtgagtagaatgaggacatgaaaacgtttaacttatggtgatctgattgtctcaggcatgacatgactttcgtgttaaaatggattacgattagttgaatatgactcaggttgagagggaaatggtgtgcctccagtttcggttactattggtgttgaaaatgttgctgcatcgtttcatgaaattggtggaaaatgagtttaaacaaactgaccacccaaatgagcctcttgataatgataggcctactctgcgcattatctgaaccttcgattttcaatgtaagcttatttcttggtccctttatctggtttgtattaatatgtatctttt

SEQ ID NO: 88349 - DNA, 775 bp, Cannabis sativa
gcattcattgtcaatccgtttataaattgatttacaataattaagctaaaaaacgtaaacataataaatgaagaatagtttctagtttaatctactaaatagaacaacgtatgctacttttctagtgcgagttcgctgttcatattcttgcataagttcgcacgcttagaatgcatttgggactagtcgagtctaagatgtctgcgtctttgtaaagtcccctttgcggaaatcatataacggtctgatagaaccaagacatgcgagtctatatcggtttatcgaggctgttgggtcatccggaccagctcgcaatatagagaattgatctctctgtttttgcaggaggatcgcgaggatactcgcatatatcttgatatatgcgggctatagtcgttccttggtcctacataatgcaagccattcgaatgcgattagacttggtcatattcgcatcatctcgctgagtccggttcaggcgaggtttatactcgaggagtctctcattgacaactcagctttccttggggaaattgaatacacgtgtccttttaaataggagtctggtctcgagtttctaggtgagaaaaatcttactataataggtctcttcaatatctatccatttaatgctaattgacggttgtaccttgaatcaaggttggatacatgcgcgtgcttaacagttacactgttggaatttattttaccaggatctttgatctacgcacaagtatgttgattaacaccgtaaatatgaactttctaaaatgat

SEQ ID NO: 88350 - DNA, 852 bp, Cannabis sativa
tattctctaaaaaaaaatcataaatcattacaaagaggggatctcttggtgaaatcaaaggtatatacttttgtcaagggatttttacacaaatacctaaaattgcactttaaaaaaaattcacaatttttctagttacatttttatgaacaacaacattattttcacattgtatctataatgtagctgaaactcgaaaaaagcctaaaaacaattgtatagatcacttttatagtcatccattaaagatgttctaaatggagcaaaatgaccaaaaatgttagactaattaaataaatttcccttgttttaaaatatttagtttagatacatatgtaggatttgaaaaatcacatacagtataacaaagttaaatgaaagacaacttaacttatatagaaacaatgccatagtgcttaaatgtatttatatatgtatttaaatccatacaaatattgataaaattgtggatccgtagttttgtaatttttgtttttttttttttagatttttacactaaatattgaaatttttaatctttttatttttttactgcggggtgaaatttttttcaaaaatattatttttttttcaaaaatattgtgcaagttttatactgtgtactgtgttaagtttttacggttgttttttagttgttccactgttattttaattgttcagttttattattttacggttgttttattaaaaaacagtatttctataaaaaatttcgtgtaaccagtggcggacccagaatttaaagtgagggggcgtaattttttattgtaaaaggagggagggcataaataaatttaaaaagaaaaacataaagtgtagttagtgggattt

SEQ ID NO: 88351 - DNA, 3813 bp, Cannabis sativa
tatgcactcatttctttcctgaaagagatatccgaaaaatatcatactttactctctacggctagaaagttcctgtaacaatcaactttgtggagtgacatgaaagaagtaagcatccaaaaggtaaaaagacagaaactactaaaagctctaacagaaaaacacgagcccaaaaaatatgaacccatgtctttgaataataataacaataaaaatgataatagataagttccattaataatttaatcttcaaagcattatagtactcacatataaagaggaatgggaaacaaaatcatcaagtgtagtggaagtttgtaatataggtgtcaatgaaaagaacacatagtaattttcccgtttgttagacaagaaatgttggtaagataaatttcggaccatagccatttgtggccgactaaaatcctccaaattggggccctgaaccttttcggtttgataatcattggctagaacataattctttttccaaattatttggaaggtggtggaaggagatagttactgacgggtggccaggcacaaaatttatgagtaagttgaaaataacccaagagaaggtgaaggagtggagtaaatccacatttggacaaagcatgttaacaaagaatgagctagaaggaaggctgggggtcttagatagattggaaggaaccccctcttgggatcaatctctgtccgaggaaagaaggaatttaaaggaagagtggcaacgattgaactttgaagaagaaacaagtggtctggtggaaatctaaatgtaaatgggctaaggagatgcaaactcaagattcttccataacttattaaacgcaagcaaggctagaaataccatttcgagagctgaaagagataatgggtcagtcactgataaggagaaggaaattgttgaggagttgatagcgttcttttcaaaactttatacctctgaggtgagattgggaatggaattgaaggtattgagtggcaacaaatttcagagtccttagcgagtcaactagaaagtccttttgaagaagaagaggtaagaaggatcatttttagctgcgaaggaaataaagagcatggtccagacggttttagcttggcgattttccaaatgaattgggagaccatcaaggatgaacttatggaagtatttcgagctttagaaagagagggaagaattgaagacagcatcaataagacgcttatctgtctgatccccaaaagattaaacacttgcaaggtaaaagatttcagaccgattagtctcatcacaagtgtatataaaatcattgctaagacatttgccactagactctgtggagttttgggagagacaatctcagaaacccaatcggcttttgtcgaagggcgacaaaccctggattcagttctaatggcaaacgaggcgattcaggattacaagagttgtggtaaaggaggttttgtgttcaagattgattttgagaaagcatatgattgtgttgaatgggaattcttggatctggttttgagaaaaaaaaggacttggggagttatggagaaaatggatcagaagatgtgtctcatcaacatcattctctattttcattaatggtagagtgagaggtaaattcaatggcactaggggtcttagacaaggagatcatctaccatcgttcatctttacactagtagctgatgtgcttaggaggatggtggatatatttggggttccaagtacgtaaagacaatattcatcttagtcatttacagtttgcgaacgacacactattctttgtaaatgataaggcatcactccaaaagctagtcaagattgttgaagccttctatggtaattctgggttaaaagtaaatttgaatgtcaactgttgggaattggtcaaattgaggaggcggtggtccaatgtgcgaaacaaattggatgtgaggtaggcaattggcctatgacatatttgggaacgccacttggtggctcaccgaggaaaaagactttttgggagcttgtcgtggataagtgtgtgaaaagattggatgggtggaaatgctcttctctctggagggggtaggctcactcttatttagtctgtcctttcaatcgactatctttctctcttcaaagctccaaaggtcgtcataaatgctctagaaaaaatgatgagagactttctttgggaaggtggagacttagctggtggtgaccattgggtggcttgggatgaggtgtgcaaaccaagaaatgagggagggttagcaattggaagactacaattgaagaacaaagggttgcttatgaaatggctatagagataccctttagagtcaaattctctgtggcacaaagtgatcaaaaatcgctatcgcaaagcaaataatttatgggatacaaaagggggggttagattgtccctaagagggtcgtggaaggatatttcagagttttgtgttatgacaaatacagcaagttggtgaagttcaaagcaagaaatggggcaagtattcgtttttgggaagatgagtggattggggaatcttcgttgagaaattgattcccggacttaaccgtgatctctagggctaagaatgaaagtattcaggagctaattgtaaatgaaggcgaggtggggaactatgtggcaagttgggacttcaaatttagaagaaacattatggaaagggaaatcccaagcttgatacaaatattacagcagtcggaacaggttagagtgcttaatattttggatgatagtcgtttatggatactagatgataaactaaatgttcatgacagattgcaaaaaagtgacctttctatgcatgtcatcgggatggtgtgaatgttgtaagaaaagtggggaagacgtggcacatttgtttgtaaggtgttgccttgcgtgtagtctttggataaaactgctgaacgaatttgagactcaatgggttttaacctgttcaattcctcaaatgatggtgagtaaggtgggtggaagtaaaaggagcacgtgcttatggagaactgcagtcttggcagtgttgtgagctgtttggttagaaagaaataacaaaatctttgaaggttctgagtgttcagcagaggtcctatgggaaaagaatagattttggacagcatcttgggtatacaagacaaagcattttgaaaatcgttcatttttagacttaattagagattggagagcattgttgtagtttatttgcttctgcctcatttgaatgtttctggttttatgagtgtcctagggggctttgctaaaacgattataggggcagtgattatgttcagggtgtatagagtactacaggttttttgtgcttggttttcaactttgtaactacggttttcctctgccacaagtgcggcttttcattcataacggaggggcttgtctaagacaatggccctttctctttttataaaaaaaaaaactctttttataaaaaaaaaaaaaagtttttataaaaaaaaaaaaaagaagaagaagaagaagaagaagaacacatagtaaattcagattttctagtccccttgacacggcaatataagaacagtaagaatcaagtaagagataataatttttcatacttcgtttaaacaaaaaaaaaaaaaaaaagcagaagataaatagctaatatactcattctccatgaatagttccccataagtgattccatcagcatactgaattttcttaaaatggtcaactccctgcaatgaagtaattagcggaattaggttaattgcaagcaataactaaacaaaatataaagaggagctaccagcactaacct

SEQ ID NO: 88352 - DNA, 1014 bp, Cannabis sativa
  modified_base (561)..(570): a, c, t, g, unknown or other
  modified_base (870)..(875): a, c, t, g, unknown or other
acttataaaaaaaacagtaaaaaagtaaaaaataccgcctgacagtatttttataaaaaaaatggtaaaagttagtataccatgtaaatttccctaataatatacttaatttagaatgtacaataatttaaccacctcttataaaagtataaaaaatagttctttgaacttcaaaggaaaagaagaagaagaagaagaattttctctccctaatgttgttgtttctgagaaattattggattgcatatgcgtgtttttttttaaacatgaaatcccgaaagtcgtatttttgtaaatgtttctgtggctttggtccagacttacttattgggctattgagtctaaattgctttcatctaccacctctttgataccgtttaatacttccctaccagttattatgtttttatttgatttgtactatttgttcagtaaaccatataaaaaagtcataaaatctgaaaatgcttttttttttttttttgaaactgatttaaatgctatttgaatggtgagattcaccacttacgtagtagtagtactaataataataataataannnnnnnnnnaataataataataataaaaatagtggtagttgtgaaaaatggtcttgtggcccttcgccagagatttaaatttgtgttggcgggtgttgcaaagtgatagttatagtttaattgttcccatgtatgaaacaatatttttcacttgggtaatgttaaaaaacaacatttttttgtatggaaataacaacattgctcggtatattcctttaaatagtatataagttataaaagttattttggaagacaataaaaaaaattaggaataattacataagacactattttttgtaaaatatttannnnnntacgttcaaagaatgtttttttatatttttatggtttcccaaaaaaaataatacgaaaacaacataaaatcaacaagaaaacaacataaaagtaacatgaaaataacaacaaaaaaacaacgaaaaataacatacatat

SEQ ID NO: 88353 - DNA, 686 bp, Cannabis sativa
aaagccatgacgcggcacctgaaaccaactctcaggttccaccaagaggggcgggtcgcggcatgctaaagaccatgtcgcggcacgtaggttccaaacccagaaaccggcaagcttttacacgaagtttagctttcaaactcaaccaattcatgccaataaccaaccaaaacctaaagccatacaacagattttctaataataatatagagagtttataatacattttcatgcattaaaatccaatattaaaccccataatttcagatttcacaacaacacaaaatcatgctttaaactaacaagaacttgagcttcaaaccaaacgatccccattatttttccagcagcataacaccaataaaacatgaattttaacctagaaaatttcctgaaatttgagccaagaactcaacaatataatccacaacgaaatcaagaaatcaacctcaaactctatcaaaattaacactcatgcaatcaaaaacatcaaagcttagaaaaacatgtttttcaactactacttcagctacaaaacacaaattaaagccatgaaaaattacctcaattcccaagcacacacaatcaccttgaaccaaagcttcctaaagcaatttctcaagcaatcccttcaattcaatgttgaaaaacaagagggtttgaggaagacagggggttcgggtaag

SEQ ID NO: 88354 - DNA, 572 bp, Cannabis sativa
tttggaataaaatttggcattctcaagcccctccaaaaattaaacactttatgtggagagttgtgtctcatactattcctgttgcttccaatctttttgttaggcatattctctattccccactttgttctttttgtaagagtagtctagaaacggttcatcatgctctgctagggtgttccagattgagaaaggcttggaaatcatcaaggtttttggatcattatcataaatataaacatcttgatattactgattttttgctgtgttcttttgaggctctggataaggattatattagtattttgttttgctttttgtgggccttgtggaatcaaagaaataattatatacatcatcatactgttatgcctgctgctgatatctttgattggagtgttaattattttttccagtacattgatgcacagaaaaatattcagacttgtagtgttgcagcacaggctcctagcatggtctcggatggtgtttctgggtcttctttgcaggtgtatactgatgctgccattgacaattgtggtcaaaggcatagctttggtattgtggttgtt

SEQ ID NO: 88355 - DNA, 793 bp, Cannabis sativa
aattccaaccatcatttcactactacaaaaaggggcttcagtgagagactctaaaatgttttagtgacacttcactgcgcgtcactaagtgggtgactggaaagacaatgtttagtgacacttcattgtgtgtcactaaacctttttagaaaccctcactactcgtcactataagcttttagagtcacggcatgtcagactgtaaaaataacagctacacactctgcgtgtcactataactatttattttatttttttaaaatatatatatatgttttttttgatatcagctacccttaaagtgtgtcactatatcatacttcatttttttttaaaaaaaaattaatatctatttttttaattcagattattttataaaaattaacttataatttatttgaaatttatttgaattaaaaaataaatctcaataaaataaatgtgtataattaaatttatttacattatattccttttttatggaaggaatttaaaatttgaaatataaacactaaacaaaatatttatataagattggatataataaatgcaatataaattttttaattaaaatatttatagaacaatatcaattattatgaacactcaaataaaaaataaactaataagaacagatttgaaaaaattaagaacctaaaaaacccattaaatatgaatacacaattttttcgttaatatttcattttaacaaaagagaaaaattaactccatacaagaaggcatttcaaaaaaaaaaaaaaattgcatacaagaagatacaataaactaatag

SEQ ID NO: 88356 - DNA, 985 bp, Cannabis sativa
aacacgaacattaggatcagtagttatggggtcttgaagaagacccgatgaagtagaaattgtaacttgagttctccttattacatccatggtaactgattgaattgataaacaacactctcaataaaatcaccaaaatgttaatcttatatttggtcaactgacaacggagccttatttacgatcaaaattaccaagtgtaaacaattagaataagtaaataaaatagacacaactattttaaagaggttcaaccccttggttaatggttaacgacctactttccttttagttatattgatttgagagataataccactcagatcacaagctttgtaatttctaaagtagctctctatgaattatctcaagtgtgtgaaatgagaaagaattagtctttagtgcactggagatggcgtgcaaaagagagagctagtgttttgagagttaaaactcaagagcttaaggattagaacttagctttaagtttagcctagtgctctttatatagatgagagcttacagaagacctaagccaaagtagattaatatatcttaaaaggaggagatatcacctttttttcacatattaaatataaagaaaataaccaattaattattcttaaggaataggtaaatatttgaagtggaatcgctagtttcgtgggttgttggagtgaattcgtagctaagagtgaaccattgtctgtctagggtgaaagctatagcgacaccactcactactacaaaaatggtttttctcgacgtttttaaatagtcatttaaagtattccggtcgatttctataaccgtcgcctatacgaccgtcgcaaaatgggcaaaaaaggcgacggttaaaaattgtcgctaatgtggagaacgtaaaaaaaacaaaaaaaaaaaaaatacaatttttctgccattttcccccatttttttcctgcattagttttataattttatctaaattaaaataaaacaacta

SEQ ID NO: 88357 - DNA, 577 bp, Cannabis sativa
ttaaatttatttggtaagtttctcaattcggcctcatcgcgattttatcgttgcaaatcatgatttattttaagaaagttatgtaagttttaaaaaactgatctcttctagtcatataattttgtattttcatctttgtgagaagatagtttgttttttgaaaacctgtagtattctactaggttttagtctttattcattactcttacattgtttttagaataggttgaagagcttcattaataagaaaatggtcttcgaaaaaagacttatccaagtcttacttcggaggtagtaaacacacatacatcaaaactcgaagggagttcgctagttgtttggtggtgctcaaaaattagattgtcaaagtaaattacaaaggatcgcagtgaaactttagagggcgtctaaacttgttgaagtcaattgtacttgtaattgtttgagactttactaattgattttattatctaggcgtggccccgtagactaagagtgtttgaaagaacactaatactacatataattctcttgtgtcaagttttttatattttgcactattatttctgttctatta

SEQ ID NO: 88358 - DNA, 587 bp, Cannabis sativa
taatattttaaataatatctgcactcttgtattatatgtacttattattgttaactacttgatcttactacccatcgaatccaaaaacatctcaggctggcatataatgatgtatattatactatcaaatacttataaccaaaatttatatttaaacgtaggaccattgcatagcttttgaaaaagttgtgccaagttgtctgttagaagtatttggtaagcaattaagaattagtaagaaaataggaaaaagttacatgatagaataggttttgaatcaattgtgtaaaattattaggtagtgtaattattagagattatatattagagtaattatattttgttttaaaatacaatgtgtgtttggattttaagtagtaattgtatatgaatttttatttttatattttataaatgagttagtaattacagaatttaataattaattatttaaaaattgtaatgttttataattacccagtgtaattatctagttgaataaacacactaaattttgtaattactaaaaattatactcaattctaattacacaggcactttttaaatgcactataaaagttaaagct

SEQ ID NO: 88359 - DNA, 1740 bp, Cannabis sativa
tgacctataactttctcttggcatacagaaagttgaggccatacttccaagcacacccaataaagatgtacaccgatcaatcattgcagcaaattttacaaaaacctaaagcatctgaccgactactcaagtgggccattgaacttggccaatttgacatcacatatcaatcaagaatggccataaagggtcaagcccttgcaaacttcgtggccgagtgtacaaacaaatctcttgaaatctttcaagatttaggagaaaagcaagagccagagaagaagcgagagcaagagcagcagcaaaaacctaaagaatcgacatggaactccatgttgatggaagctgcactgactaattttctagtgcaggcattgcccttataacatctgggggcaacatctacacagagcaatcaaatttggcttcaaagcctaaaataacgaggctgaatatgaagccctggttgatggcctcaagctggcgcatgaagtacgagctaaccacctggatatattcaacgactctcaactaatcgttaattaagtcctaggtgaatacatagttcgaggtgaaagaatgatggcctacttgagcaagatccaagacttgctaagtcagctcaaaggctatactataaggcatatccctagagaactgaatgccactgcatatgcactcgctcgtctgacaagcatcaccattgccgacaaggcaagcctggtgccaataccgttcctgaaggaacaaagcattaccatccttgaagaagtcgacatgttggatgacaattcaacatggatgacacctattgcagcttacctctaaactggagccttgcctgaaaataagaatgagacaaaaaagataagaagaaaggtcgttaggtatctaatcttagacgaagtgatgtacagacatagcttctcaatgtcgctcttaaggtgtgtcaccgagggtgaggccgagcgactgatgatagaagtgcatgaaggcttctgcgacaatcatgtcgggggcaaagcctacccaaaaaaattctaataggggttacttttggctaataatgatcgaagatccgatggactatgtcaaaaaaagtgacaagtgccaaagattttcaaaaatccctagagctcgacctaataagctcatgatgatgcaatctccttggcccttcacaatatggggaatagacttgattggttagctccccaagggaaaaggaggagtgcagttcgttgtagtcgatgtagactactttaccaagtgggtagaagctaaatcctcgacaacacttcaaaaaaatacagcgcaccaaagtgaggttagaacctcaaaccaaaaataaattgcaaaatagttgataatacacaatttttaatttcaatccctagcaattgtaccaaaaacttgttgtgaaaattaatatttatacgcaagtgcacgcaatcgacaacaagtaatataatgataagtcaagtattgtctccacaggaattgcaaattaaaataaatgtcaaactaactaattaacaacttaaggtccttggaaataaaaataaacaaaaatgaatggatgattgataaaagtaaaacaaattagtgacactaaaaataaactcaaaataacacaattaataatggaacattatttgcaagaaaaggtatctatggaaaaatagacttgaatagataaatcccccttatgttaaatctgcccagtttttcagcattacttca

SEQ ID NO: 88360 - DNA, 677 bp, Cannabis sativa
aactcattgtcgactctcttaccattctcatacccatataaatagtgactcaacagataaacaatcgccattttcacagcgtcaacatcatcatcgaattctccagataaaaaccttgccctaacttgctcttgaattactttaatagttaaatcaggaaacatcttcttcttgaacgacatgttttgtttaaactcgttcaagtcagatgacccatctggacttaaccccttgatcaagacaaactcctccaaaccaaaacggacaactctgtcccggatcaagaaccacttctctaaatcctccctctcttgatgaacctccctcactaaagcaaggtgaggcaggtcaatgtgccacttaacattgcccatcttcaaaaattgcgaaaaaggcgtcgtcaaaaataacgccttttgagaaggagtaagatttccattgagctcctcaataacccacaggttattccaaatctggagcttacttgcgaaacggtgctctagtttcatcttcaagtaaacatcctgtaaaaaaaaccagttataaaataaggtttagccagtgacaacaacaacaagcacatgataaataaaataactggttccataaacaaaaattaaatcatattaaaagaacattatatatgtaaaatgaaaaacttaaagcacttaccacat

SEQ ID NO: 88361 - DNA, 735 bp, Cannabis sativa
tggagagcggcctcaaactgtcttgcaacaaaaagaaacttgtgtatcaagaaggttttggtggaaagcaactgtcccatgtgcgatgttttcgctgaaaccgagtggcacgtactggtggcctgcgagttcgcctggtcttgtttcaatgttgctggtttggctgctgtagcaagggactccttctcctctttgctgccgtggctagaagctacagccagttctgtttccagcgagatgatggggcgtgtaataatgctttgctgggcattatgggcagcaagaaacgatctggtgtggaagaagcgggttagaagagtgagtgacgtggtggcgtttgctaatttgagtcttgatcattggacaaaagctcaaggaaagggtaatctacccttgttgtctcctctcaaagagggagatggtgcggagcagtggttaaaaccgtcatcgggtatcaagctcaacgtagatgcggccatctttgcctcctctctcaagtacggcttcggatgtgtggtaaggaatccagctggtgagttggtctctgtctttgcagggatcaaagatggttcggttgcccctgaattggccgaaagcataggtatcagggaggctctaagttggctcaaaaacaatgcttacacgcgggctacgatcgagtcggatagccttgtctgcgttgaagctattcggagtgaagagtctcttgtctctgtgttcggtttggtggttgaa

SEQ ID NO: 88362 - DNA, 1374 bp, Cannabis sativa
tatgtactaaatcatgccctttcaactttcatccatgttagaatttttttactataaagtctttaaatttaacaatcttaatagttcaagaggaatttttaacggccaaaaaagttcagggaaaaaaattacaaattagtcgataatgaacatctagctcaataatgtacaagaataattagtaattttcgactaattttgatatttaaaatatatggtttattaaagaatttccttcagctattacactaatacacatacatatttttataaattagcctttttgctctttaaactttaacaactattaaatcgtaactcttaaaataaaaataagaaagattcaatattttttttaataaattttaaaaaattagtttagattttaaaaaaattatttttaataattaagaaaattaaaaaaaaattataattttaatactaatcaagtgatttgaaaatatatttagttttttattaaaaaaaatccatttagatataaaaaataaatataaaaatttaatttttcaaatttaaatttcactagaactagtttgagtctattttttttttctccaaaaatctaaatttattaaagtaaacataatatttttttagtttaattctaactctttttttttcaaaatatttttatatttttattgaatttttaattatttttctttattttttaagatatgagtttataaatataaataaatttgattttttcttcaaaaatcgtagtttgtttaaattatttattgtacctttaataattttagttaaattttttactatacatgtttataaataaaataaagtttaaaaatatttttttttaggaataatgtagttttttaagaaaacttaatatttttttattagttcattatttttatcatatttcttaataatttttattaatttttttaaaattaatagaatattataatttttattttttattttaatgaaattggtaaaattttgtattggtcaaagttcagaggtaaaaatactaattttgaacggtaaaaaaaacgtaacctaacagaagggcataattatgtaactattatattttagggaaatttttaacaaaacgtatatttagggtgcaagattaggtagtatcaaaaatttaagaggcaaaaatgttaattttaatgtacaatgtgttttgtgaatgaacgaaacattaattaaaagcttggggttaatatcgtgattatcactagggctgtacataaattattgtaaatcgcccaacccgaacaacccacccaaactaaaccgagataacccgaaaaaaaatacaaactgaaaaatccaacgaaaatataaccatcccaatctttatattgggcgggt

SEQ ID NO: 88363 - DNA, 615 bp, Cannabis sativa
ttgtaattaactaagcaaggccaacttgttagttcagttgagcaatattttccaccttttgtcttcatctctctccatccctttcattgtcttcttactcaagctcgagtactggaaattcagtactctttcatggtatcagagccatgtcgaatcatggcaataatgcaagtggtcctggtattcgaattgaaccaccaacagaggaaagaatcgatccacatcaagctcgagctactgaaccagctcctgaagctccaaatctagtttccctccccatcagtcagctcctcccccttaatctacgtctcgacagatccaactacataatttggagatctcttgtccttgctgccacttaagcatatgatcttgatggctacattcttggattactttctcaaccaccacaatttcttgcaggtaatgtccctaacccaacatttcaaaattggatgagacttgatcaattcttgatgcactggctaatgaattctgtctctgaacacatgctaggccatttaatcaattgtcaaacttctcacgagatttggaacacattcgctcaactctttgccaccaaatctcaagctcgacttctgcaactttgaaact

SEQ ID NO: 88364 - DNA, 527 bp, Cannabis sativa
ataacttacattaacaaaacagtcatggaaatgaagacgaagtagtgaagctcccatacgagattccttagacacagcacttcttacttctgctctaatggtggaaagaacattagggcatgaagaagagtagaaagtcgatgatagttgacctgaacctattctcatcatcatcataacaatccaaaacaataacactaacttaacacccatgattatatatatatatatatgtatgtgtttgtgttttgatgaggatatattagagtagctaggattgttgtgtatttatagtagagaagtgtagtgtgttattggcctttgttaacactctcggtcaactttgtcaccccagtcaactatttattaattaattggtaagaaatcatgtgtcttttttttttttttctttcttgtctttttgtttgggaataattaaagaaatgtatgtgtcgttttgtttgtgtaatattgttatctgtgtaaaattctgaggtgacatatattggaatattggagaatggtaa

SEQ ID NO: 88365 - DNA, 855 bp, Cannabis sativa
attgtggtcttgacattgcacataattaatcaatatagtttagaaacattacttgacattaccatatatttgttttccaaagtttgaacatcataatcgatccaacaatataatgatactaaagtagatatgttttttttgttgttgatttcgtttaaggttctggaaagagatattccatgggagacttacatgaccactaattttattagtacaacatgtcttcaactcctgagaaattacgataaaaaggaagaagattacaaagcacaattgctcaatgaggtaataataatttatcttctcttctcaatttattattctttagaattgttgagttaattttaattaatttattcaggatggattatcttatgtttgagagtttcttaatattttagagaatattcataagcaagagactgttgaatatgtagtcgcattgattgatgaaatgcttcaaggtactttttttctttctaggataattaactaataatattgtatcaaattttaactcattattttttatgtaatattttttgaataatgtgattaaatacttttttattttatatttctttcactttttttttttttcctttgtgtagcaaactcagaaagagttaaattattccatgacaaatcactttctattgagaagacttacaacattttcttaaggtaattccaccaccacatcaaatttagcttctttaataaatttaattatattaggcaacaacaaacattaatcgttattagtgttggtaaatcataaatgatacaactaaaaaataataaaaaataaacatgttaattttagatttgtatcacataaaacatttatcgtac

SEQ ID NO: 88366 - DNA, 717 bp, Cannabis sativa
acatacacaaaattgttgaataatgtatttttaattaagtgaaatatatgtatgttcaatttttttttttaattaagtaatgtatttttattttatttattaaaataagatttgagattttgataattttttttaaacagtgtagctatattagtgtactctttagatgtgattatatatatatgtacaataaaaaaataaatttcattattataggtattttatattgatctttctatatataaggattttattaaaaaatattttgacaaaatttgagtttgagtagtgaattaattgctttcaaaatacattttatatattatgtccaaacatatattttaaaaaaaaataataatagtgatagataattagatatattcttataatttgtaattaagagaatgtggttataataaagtgtacaaattattacaaatatatgtatcattaattatttttaaaacaaaggctttgtggtgtgaaattaaggtttaaatgtatatttgacgtataaatgtaatttttataataaaatatatataataaaattatttttttatataatatctgcataatttttgaatatatataataataaaaattattatattaagtaagtgggatatttttaaaataataataataataattaaataaataaataattagagaacaaataagagaaaaaacacaatcttttaactatcttgggta

SEQ ID NO: 88367 - DNA, 643 bp, Cannabis sativa
tttttttttttttgaaattatttctattatatataagaagtacaaattggtatacaaatgagtagtccccctttcaaaaaataaaaaataatataaaataaaaaagagcccaaatcccataatctcgatttatgttgacccttcaaaaccttattataagttagaacttggcctggacagagggagccattgaattggacaagtgagaaatgtacaaaaaagaacaacgtacgtcaaccattgaccatgagtgcatgaagacaacgactatgtgatgagagtcgtaatacgttgactatcgatgatggtgttagtaggccagtgaagaattatatatggtgagtttcggagaagtgatgtgttgttcaatttttattttttattttatttttttgaggaaagtacttgttctcttataaattaatatgaaagtcatttagaataagtattattacatagaatatataaattgacactttatttacaaaaatattttcataagttaaagataacatttatacttggttttaattactaaaatactacttacactatattacttacacaatcagacaatggttgcatcagacgaaaatttcaatcagacgatggttgtagaatggttgctaggtggttggctaaa

SEQ ID NO: 88368 - DNA, 624 bp, Cannabis sativa
tctgtttctttattgataattgaatagaaaagattacattgaaatagaattttatttagggtacaaagcccaacacttaatatgttacttccacttagttctgatgtgaaggttcaacaataccaatgagagaaatggctattatgagttctcttgcaggactctcatctgaatttgactctggaaagtcataggttatttctgcatctgatgtctcttcttcccaagatgtttttactcgtgttttttgtgcattggtgagtcgtaaaaattctacacaatagaaaaaatctactccaattggatacaaaagaagtaattcacaaggacttatgatctaacaccaaattctgggaggattatgtgcaactattgtaagtgttcaggccacaccaagtttgagtgttggaatttacagttcaaaaattagaactactgatgcatcggtccttatttgtgttgatgaattcaccaagttcttgaggtatcaggaaatacttaagtcttcatctacgattgttgattcagataacgctaatgcatgccttctttccacattcttaaaatgggccattgattttggtgtcatagatcatatgacaggtaattccagtctcttttcca

SEQ ID NO: 88369 - DNA, 686 bp, Cannabis sativa
tttatttgtatgtgagacaaaactttatttgattgatcaaagtcattttttaaaatatgaacactaaaaagggtcaaaacaaaatataagaggaaatagtcctatataaagggtataactgtcattataaatttttataagaaaattttatttacactaaaaaaaaattaaaattcagctttgagttgtcatatcttgtgtgtgggttacataagttgagtatttattttttaaatgttattacaacaaattatattttgaggctctcatgaattggttgagttggagttattcgacttgaatcaccatcaagtacaatacaataggttgttaaaaatatactaagccaaaagagatgaaggcaaatacatgaagacttgtgtgtagatacaaaaacaaaaaaataaaaaataaaaattataaatgcactccatttaaataatttttattttcaataaaagtatatatctttaattttatattagtttctcttaattcttttcttctaatttatattcttaaaaatatacttatcaaataaaaataaattatatttgaaatattataataaaaaaattatgtaaaactttattaaaaaaaaaaattgtacatgatttgaaaaaattataaaaatgaatattaaaattaacacaaaataatatgaaaaaaaaatttaaaaaaatatt

SEQ ID NO: 88370 - DNA, 824 bp, Cannabis sativa
cttaaaaatcgcctctaaagggggtttttgtagtgttagaggccactaatttattaattattttgttatgacttgtgattgtaaaaccagttagttagacaagtctcactaattaagtacactaacaatttagttagttaagttagcagcctagattagttagtttagtctgttagtgtggcacaaagttctccggtcacttagtataatagactagattagcttatcttggagacaatacttgtcttatttttctgtaaatattgaattgagagagagaaggagggttgttaagaaaagctcttaacactccccctcattatcaaatctttttcaagcttcttctcgcttgataagatttagttgatctcttaatttggaaaatttaatcgtacttaaactaatttggtgaatatacaacaacttgatcaaccgtgccgatttttcgcatctctattttttttcttgaagtacttttttctcagagaaaatggtaatgtacctccacatgcgcactttgttcgagtatgaaacactggattctctgcaagacgtatagtgttgtgaaaattatatacgcaagtatacgcagtcaaacaagtaataaaatgataagtaagatggtcttcacatgaattgcaaacaaaaatatgttgtaaaaccaactaattacaactcaaagtgaaaggaaaaaatgaaaatagttgagcaatgattcaaaattaaaatggcagtaattaattaaacttgctaaattaatactactgttgctagaaaaattgcttgcaagaaaaaaaaaatgtaatatggtaaaagtggcttga

SEQ ID NO: 88371 - DNA, 995 bp, Cannabis sativa
ttacactttttattttatcacatattttttcatgtttattatgtatatttttcatttatattctaatacatatttttttttatctctataaaatttataaatttttatccaacaaaattaatattttttattcatatcctatttgaaaaaaatattctttttgccccctaagaccatctccaatgcaagatttaaaatttgtgctaaatttggcacaaaaaataaatttgtgctatatttagctcactatttacaattgtgcttcaatgcacaaaatgtaaaataagaaaaaaaaacaattgattatattaatggtcatttcatattttagtgagaatatacaaaacttattattttttattctttttatttaaataatggtaatctagtaaataaagtttagtaaaagtcaatgaattataataattaatggtattatagtaaataaaaaaaaatagtatttattgtgtgctaaatttggcacaatgttatatcttgtgtcaaatttggcacaacttttaccatgtgctaaatttagcacactttttagaatatcattggggtatagttttttttagatgtgttaaaatatagcaatacaccacatttttagcactccattagagatgctataagataagcagtttgcactgccactgcttggtgtaaagcaaattttatattttaaacctattaattcgttctctactttaaaatcaatctaatctttttattagagagagaaagaaaattgaaatatccactaataggtaaattggacaaaatacattatatgaatataactcaaagagcaaaattaacaaaaataggtttatataccaaatggtttacattaaagaaaacaagcatacaaaaaatgtgaagtatattaggtctccaaattaaatgaatcaatttgatagttcacctatcaatgattatcaactaataatctttcaataaaaatttgaacataacaactctattatttaaat

SEQ ID NO: 88372 - DNA, 1175 bp, Cannabis sativa
  modified_base (690)..(702): a, c, t, g, unknown or other
aaaaaaaaaaaaaaaaatcgagcccctaaaggaaagatgcaacttttatgtgatgtagcatgtgagttctacacacagctgtgctgtgggaaaaaacagctgtgctgtgagaaaaagcagctctagcagaactgtggaaaaaagctgagctgagtgtttggtaaattataaattttaaagtactgtataatgataataataatggtataatatagtttattataataacaaatatgtaagatcttattttatataataatattttatttttttatatatttttaatttttgttcaaatataattttatatccatttgataaaaataatttatagtatttttacattatgttttatcacatgtaaaaaaaaaaaaatagaaactcatgtacataaaaaaaaagggtaaatagcgacataagtatccaaaattttaagtttgtaagcggtataaacccaatgtttatttttaacggcataagtacccaatgtttataaaactgtaattttcctccagttttgtcagtacagactccattttgaatctattaaaaaaaatatttggaagtaactgatactacgtgtttttgtctagactcaatgatctagaatctagaccttatatgtggtatgtttaagaaaataacagagtttgtactaacaaaattagagaaaaattacagttttacaannnnnnnnnnnnnatgccgctaaaaataaacattagatttatgccacttacaaacttgaaacgttgggtacttatgctgctaattaccctaaaaaatttagattgatgttgtttattaatattaaataaaataaaaattatttgttttaaacaaataatagatttaataattatttattttattataattaatttattttaaatattttatttttttaatatgtaataaataagtaaatatggttttagtacaaaaaaaatttattatagtcatttaatcaaaattgctttttttaaaagttgggttggagcagcttaagcttttagttgtagtttttccaaaaattcttcaaaaagctattttttgactgcttaccaaacacatttttatcacagctttttcaaaagggaaatttgcatatagtatactaacttttgtcaattttttacaaaaatactgcaaagcgatattttttacttttttac

SEQ ID NO: 88373 - DNA, 784 bp, Cannabis sativa
gtagctgccggtgtcggaaaagtcctcggagttgctgccaacgccgaaaaagttgtcagaattggcattgtcgtcagaaaaattaccgtagtttcttcatcaagaaattggttcctttatcaagtaactggttttttcatcaagacaccagtttcttggtaattttttcggcacctatgccaattccgatgacttttccaaagtttgctgtcggtgccggaaaagtcatcggagtagcttccaatgtcagaaaactcgtcagaattgacattgtcaccagaaaaatcaccaagaaagtggtttcttcattaagaaactagtttcttggtattttttcagtgatttttctggcgacaatgccaatttcgacgaattttctggcgccagcagcaactccgacgactttttcggcaccgatcgctactccaatgtttttccggcaccgacagcaaactccggtgacttttccaacatcactgacaaataaaactacctaaacaaataaaaacattaaatatgggatttgaaaacctaatttacatatatatgacatgacatatcaaaaaccataaaaagacctaaaaaaaaaaaataccatataaattgatcaaacttaaatgtgccatatttattataagaacggttaaaatctcatatcaaaaacaaaattttaaaaacaaatatcttttataattgtaattaaaaaaattaaaaataaaagtattaccaaacgccatttatatttctttatttattttggaacataatattgtatttttctatg

SEQ ID NO: 88374 - DNA, 609 bp, Cannabis sativa
agttgttctttcttgggctaatgaatttacaatcttctaaattagaaataacatgaacagagataaaaataaatatttaaatctgaatcatatatttaaacaaaactagaaaccagactgagaaagaaacaaataaaaacttactgatattttgatgaagaaataacttgttattaatttagtgcttacccaagtaaactgcagagggttatcattataatgataatgatgacatgatcaagccccaaaccaagaagatgatcatatatatatatatatatataggaagattgaggagaataagagccacatcagaaagggaaaaaaaagaatcacaattagtttatatatttgatataaaatcgtttttcttaattgaaaatcaagtgagtttatagatttatacatatttacataaaactctaccttgtcttcccttgcgagtttgtccttctcttctgcaactattatcccatagatgagcctcatatctacctgtccatctatgtctgaaaaaaattccaaaaccaaatgtttaaaatttaataacaagaaaaataataagagagagagaaagggaaaaaaaaaagtaagcctgcatatatatat

SEQ ID NO: 88375 - DNA, 525 bp, Cannabis sativa
ctatccctagggtatttggtcaactttgaatacctcaaaataccccgataattccataattaacttatctcaataatcccattaacattactaactaaactattatgacatttttagcctccggtcgggtctctagggtcgttgaacctgaaaatatttttatttcacaaataacttacattatatccacatattccaaataaatctccgtaattaataaattacgcttatttattcacttatgacaaaattcataatttacgctgaattaaaatagtaggatcataatcttggtcattattctctaattaactcataatatataataaaccttaattattcataattaggtttttaagatattacaaccatcccctctttatagaatttattcctcaaaatttacttaaacaactcgggatactgctcccgcatctgcaactctaactcacaagtcacttcctcaactttgttgtttctctacaacacattaacgtttggaattgtcttattccaaagtacttt

SEQ ID NO: 88376 - DNA, 662 bp, Cannabis sativa
  modified_base (47)..(47): a, c, t, g, unknown or other
cttaataataaaagtatatttatacgtataggatcaaaataaaactnaatgatatatgatcaccttatttataaaatggtgactcgtgtgacttgctttgaaataaaatagaaagaaaaaagttacgatgatatttgattgttgtaagtgttttgatattttttttaaaaaaattgaacagtaattttactaatcatttatattattaattattaaatttaataataaataaaaaaaaagttatcaatgacttacaaaatgaaaaaaaataaataaggaaactaattatttttttgaacatttattctacaagtaaagtttattttgatattatttgaaaaattctttaaaatattttactttggtcaagggggccatttagtaacaaactcttaaaattagattatatataataaaaattagaaaataatgcatatatattaattggggtgggggggccaaggccgcccttggctgcaatgtacctccgcccttgtttgtgtgaatcaaaatagtaaatgcttatgtatggtgttccatgcaagtaaaatggacgtatgtgctgcgtatttttacgtaagtttctatatgagtttagagattcatacttgaatgtattttgagtgtattgttgtgttaatgaatgtttaggatcttgttct

SEQ ID NO: 88377 - DNA, 736 bp, Cannabis sativa
aaataaataaatgttaacaatcttaataataggtaatggcatcttacatttttggttgagatactcatcacttggtttcagtcaatgagagagaccataaccattctactaattcttccattgagagagagtggatatgtaggtcaaaatcaatgaaagctgttctttaagaaagaaaaaaaaaacaaaaaagaaaaaatcctatgaaatgaattttacagggaagagaatattgaagaagcttccgtacacacaactgaataaatattcaagtccttgttcttgttcaacaactaaaactgaacttatactgttgcccctctttctttttcttttttgagttggatgtttataaatgccgaactaataataatactgcagctgtaacaagctctcctacaactaatgatcaaatgttaaaaagagttgcaaagttttcacgtgtgtattttatatgatatattaattaacttaaaactgtcatacaattacagtaaggcattattatatattaatcctggtccttatcttcacagggctcaagtctgacatgaggacaacatctctctggttctcctcttgtccagagaattttaagatcacctctcgtcttccccaacgtcaacaaagtgcctacattcaccaaatcaggaccacattattacactcagtattacaacaaacttggaaattgtaactcctcacttttaggttatgtttggttggaagaaataat

SEQ ID NO: 88378 - DNA, 805 bp, Cannabis sativa
aaattagatggtatacctcttttaagttgttgtgcttgattttaacctccttttttttatatatatttttcatttctatctttttttttcaacaactctactaattatgcccctatcatctaacaatactccgactctccatttaactctaacttgtgtagctgtgagggtataatcggtaatggagttataaaagtgggcacatttcaattgaatttaaattaaagctatttttggttaactaataaaaaaaacaggtatattttcaacttacccatttttttatatatacattaactaaatttatctctaataaaatttaattcaaatatacttttttttatgagtattgtacctaaattattctcacacactcacataactaagacataattttaaacataataaatttgcgttatttgtagatggatgtgtaggtttatagaaaagttgagacaaaattttaattagagaagaataaaaactatcgtgaaatgatatagataaaattaataaaataattgaaaaaagagataaacataatcgattttaaaagagtgaataaaaattaaaaatgtcaaattaaaaaaaatatgtaatgttatttcctaataatttttctacttataatagatttttaacggtatacatcgcgtgctcgtaactatatacaatatgatttttctcataaattgagacatcattatacttgaccaattattatatgtaatttttcttatttatatgtgtatttatattacacaataaaaaacaaaaaatcataatttttttttttaaatataaa

SEQ ID NO: 88379 - DNA, 656 bp, Cannabis sativa
aatataaacattataattaatcatctataattcggtaaatattattttaaactatgtgttttataaaaattatcgatttaactgttttgttagatgtcaaaatgaattctgtatttttcagaattataaaaataggattcagagtttaatgttttacaatttttttttttaaataaccgatttgaagacaattcttaatacaaacaaatacataaaatgtaaacatttatgttatagcgcttttagatcggattataattaaattttattttgacatttcaattcacggtcctatttgtactattttagaaaatacagggtcaattttttcatttaacaaaatagagagtccaattgataaattttacaacacagggtccaaagtaatatttaccattaccaatcataatttgaatattgagtaattttttttttcatttttaaagtggccgatatatattgataagtagttatttatatactatacaaaaagcaagtaataattaaatatagttcatgtaaaattgactaataatcactaataatctcttttcttcaacttagatcgcataaaaaattgtattatattttacataaaaataaaattttataatatatgtggaagaattttaaaaatgctttcacacataattcaa

SEQ ID NO: 88380 - DNA, 545 bp, Cannabis sativa
tcaataaaacctctattgactaaccaatcaaatattccaaatagttaatacacgtgattgaagataaatcggaagtaattgtgttattaggctttagttgtgcccaacaccttttctcacctcacgattagttagtaatattttatgtaagttatatgagattcgatacttaattaaacccatatcgatattacatcaaggaagatataaacaccaataatactttttagcaattctcaataattaaagatatatagttggtgacattacaaactaatcaataatgtgtatgtaataatgaatttctaatattatatttgggtttcacataatttaattcaaaataattattatgaaatagagtaatttgcgccataaatacttaagttcaactctcaattgtaaataaatacctaagtttaatttttagcgataattctgctacttctgtaagtacctggttgttaagtgttaagtaaattatcatgtgacaatccttaattggtcaagtcattaaatttttatttaaaaaaaaactaatttaa

SEQ ID NO: 88381 - DNA, 794 bp, Cannabis sativa
aaacagagcaattaacactaatgacaattaactaattcttaacaccacccctcaaacgagagggtgagttcttcacaccgagtttggaaatcaggtaatgaaaccttgaatgagaaagaccctttgtcatgcaatcggcaacttgatcagctgaaggaatgtacctaacttctaattgcttgcttaacactttgtctcaaacaaaatgaatgtctaactcaatgtgtttagtacgagcatggtacactggattggaggcaagagcacttgcactcatattatcacactaagtgattgggatagcagtcaatggaaatttgatttccttgagcaaggattcaatccatgttatctcagcacttacatgagcaagtgctttgtattcagattctgtacttgatcttgatacaacagtctgtttctttgatgaccaggacaccaaagtgtctccaaagtacacacagtagcctccaaccgatcttctatcatcaacattgcttgcccagtctgcatcagagaaacctgtgatagtcattctgtcactgcaactgatgtgaagtccttgagtactagttccctttagatatctgagaattctcttagccgcactccaatgagtagtagttggagttttaaggaactgactcagagagttgacagcataactaatgtctggtctggtgtggcataagtactgcaaagctccaatgagacttctgtagactgtggggtttgtcatttccttgccatctgaaattgatagagatttgcctgctgcaatgggagttggacat

SEQ ID NO: 88382 - DNA, 768 bp, Cannabis sativa
  modified_base (46)..(47): a, c, t, g, unknown or other
atgtcagcaatgttgtttttggtggtgacatgaattagctttagtnngccttcttggatcttctctcggacaacatggcagtcaatctcgatgtgcttggtgcgttcatagaatatgggattttcggagatgtgaatggcggcggttttgtcacaataaaggatggcgggatctttgtgctggatgccaggtgatttcacaagtggcatgagccatagcccgatattctgcttcagcggaagaacgagaaactgtcgactgctttttttatttccaagagatgagagatctgccaagaaagacacagtaacctgaaacagaccttccagtgtcactgcatgaggcccaatcagcatctgaatttttttagatgaaagtctatgtttgacatatcagtttcagcataagcaaataggttagtggaagatgctgagtaaaagaatagtccttgaccagatgtgcccttaagatattgtaatattctgtgagcagcagtgaggtggggaaccctcggatttgataaaaattgacttagtttatttacggcaaaagagatatcaggccgtgtaatagttaagtaaagaagtttaccaatgaggctgcggtagattttaggattgtttaatggttttccaacatcggatgagagccgaatgttggattccattggggtgggagcagtagaagctcctaaaaaacctatgtcagttaaaagttgaagggtgaaaggtcgttgagagacaaatatttcggaggaagaacgaccaa

SEQ ID NO: 88383 - DNA, 717 bp, Cannabis sativa
tgttaactgtgccatctttgttatatttgacctgatatacccacttattgcttataatagtaacatcaagtggtggaggaactaaaacccaagttttactttgaattaaagcatgaaactccacattcattgctttattccaaattggattggcaagagcaacttttatggttgttcgtttagtaactggggagatgttggcaatataagttttgggtttgaagatgccaagcttaggtctggtaaccatagggtgaagattttgagtattaggaggagttgcagtggttgaagtagagcttgaactggttgattcaagactgtgactttgagatgagatattgtttgaggaatgagtgtgagagctaaagctgtttgatgattggtgagagggctcatgtgtggactgagttgaatttgaaggaggtggggaaggaggtggtaagggtgcaggattggggaacacagtggctgaaggaatcacataagctcctgtgtcaattatgttaggagcaatttgcttgattgagttttgagtgggagcaaatagagttctgtaggggaactcaaactcattggaagtaacactatgagctacataaatcctaccactaggatgtaaacacctttaccctttggaatttagacagtatcccaaaataagcatttggatcaatgtttaaaattgcggatttaagcctcatggccttttttttt

SEQ ID NO: 88384 - DNA, 657 bp, Cannabis sativa
cactgcatgccaattacaatcatcagtccactaacccaaaactctatatgattgtaatacttactattctccgctagtataaaccaatgcacaaccaagaatcaaaaggtcttcctaggcttgtattattaggcttaggtaagggtagttgaaatggtcatttaggcttgcctataccataagcttttcctatcatcacccaaaagaaatttttttctcacaatcccaacatttttttttttcaaattacatgagaggattttttttttccattttttttcaacaagattgcaacaactttatatttatcttttttttttctggttgctataaatctaattttttttcatattctctcaattttcacactttttccacacacacacaacaaacttcccatccaaattcctccaaactaaagatctacttatggtataattagggttaaatttttgaatattcatgagtttatcttttcttttgctcaatatgtgtagaaacaaacaatatgttaaggctcaaaaatgtaactaggataaaattacagtgatggcctgaaagacacaatcgatccaaaaaaatacctaaatcacttttctagtcatgcataatttattatttcatctcaaatagcaagcaagtaagttctagaatttt

SEQ ID NO: 88385 - DNA, 986 bp, Cannabis sativa
atttttttaaaataaagacataaactaacatagtcctatgatttgaggacatttagtataatttccgtagatattttagcttttgtatgatgaattttgtttagctctttgtttcgcagcttttgttaagagctccaagttttttcatgacttgggctattggttaggtgtatgtttgatttttacactgaatattaatttttttaaaaaattatatatttatattttgacaaaaaaaaaattaaatttaattttttttcactatttttaaaatttttttaaaaaaattttcttatttatattttttagtccgttttggctggcttttttttttttttttaagtcagttgttgattttttttttttccaattctctctctctctcttcattattttttttttttttcaaactacttttattaatcatgtaaaagataaaaaaaactattgaaggaatgctcttaagttgtcaaaactaagtaaaaaaaatcataatacaaagacatattgaggagttgataatattttgtttattgcaattaaattaatgttttgttattttatattactttgtagttatattgttgttttatatttgtttccatgttatttattaagttgttctagggttgtttttttagttattattgagctgttttttttttttactagaatacaatattttttgtaattttgaaactttaaacataatattttttgtaaagttggtacagtaaaaatgtaaaaaaactatgtgtcagtatttttataaagtttctcctattttacattatttttataatttcctttttcttattagaaaatttacatctagatactttttattataaataattattaatatatgatgcatagtttaatatcactagtttttcgtattaaataacttaaataatcaatatttaaaatttaattactattgttgtaattccagcggaaataaccttgaggattcaatcataaaa

SEQ ID NO: 88386 - DNA, 564 bp, Cannabis sativa
ttttaaaactgcattttaataagtttttatatttactaacaaattagttagctatagctaaagactttgtctttagccaataaattaaatattaggaaattattttatatattatgtttaactttttttaaagaaaaaaaaaaattacggtttaggatgctccagtaatttttatatggattgcgatgtagattttgattgtaatttaattaagttgttccattaattactatgtggatttttatgtaaatttctgtagaaatgaaaaaaaaaatatattttaaagtatataaaaataaaaaaaaatcccttcaatattttgaaatactaaaaacttcaaatggtaaatattaattacttaattaggccaattcctattgtcactataaaacaagtctagttaatatcggaaagtatatgcacgtggtgagtaatcccatttaagatgatgatatatatataaatttatatatttttcttagtgaaaatgataataggaaatgtttgtgtagtagatctctaaagggttgttcaagtaaattttttatatgtttcaatacttaa

SEQ ID NO: 88387 - DNA, 1622 bp, Cannabis sativa
aaaaacgtcgtcgtttcatactttctaaagtcaaaggtggctgcttttattttaactaagagttttttagaccaacatttacatctacactacatcattatttgccacgtcatcaccaccaacaaatatgagaacaattttttattttttttttctaataaataaataaataaaaaggttcataaaatgcctaagggatattcttttatgcaaatttacaattacaggtggaaatgaggtggggtgggcctcatattattattttattttaaaaaaataataaaaaattgttgcatgagaatggtattcctttttggtatttttagatattattatatattatataataataaatataaattaattatttatttatgaatcatatgacaagaattgtctacctcttaggttgtgacacctaattccaaaaatataaataaatattactaattgttttaatatcttttttttaagatagggttattaattatgagaatcaaaccacttgtttttcataaactatgtgtaattaaaaataaattgtccactttaaaattatgtctaatttttacaattaacccaaaatgtcaatatcaaaagaaatataaataatggggtagatagaaagtagaaaactcacatcattattaatgttaattgttctatccaaattccaaattcactttttttaattacataaaaaaaatacatttcataaattatcatattgtctattcttttgcttggactttttcttttcaagtaaaatatattatagaatttttttttaaacaaaataacaaaagcatctcacaacaaaaataagaaggttgataacaaccatgttaaacataaataaaaaatagttataagaaatcacaacaatcaaacaaaaaaataaaatataaaagaagaagttgagtttataagctagtagtatttgaccttggagctagggtaaatctcattttattcttcaaaaatattggtagttattaaatatatttaattataaatattaattttaaaaatattaaatcattaaattttaattcaataataaataataaaaaaaaattaatttatatacttaattttattacttaattaaaaaatatattaaaatatatttttcacgttatattaaaaatatatttatatacaaaatatttaaataaattttttttgtcgaaaaacttttttttctttattttttctaataatagctattcatgtgtaataaagtacatatatataatactagttcttttatttgatatttttgttattttgcatcttatttaactattcattaaaaattgtggaaattactactatacttcgggctacttcgtaacaagaggttagaggtcgaggttgaggatgggccggggttggggccgaggccgagactacttttgtgtagtttttaattttttattttcattcatcgtgaaaaatttaaacgcgctttcttattttatagtattacatttttatattatatttagttgagagttgtaaatagagttactaatcattatcaatatcatgttatggttataataatataaccatcaattgtaacatataataaaacaaaaataaaaaatcttttaatt

SEQ ID NO: 88388 - DNA, 577 bp, Cannabis sativa
ttatttgttttattcaaagttagttggtatgaaatatatatatatatatatatttatatatattcatttcgagatggcataattaataatgttatgttggtgtgtgaaattgctaaacctaacaaataaaactgataaatcaattatatatatattatttattcggacacgattttgtttcgtgatgtatttttacggattgtttttcgtgatgtacggcagcagctaggggagttatttgatctgagagctgagctttatttaagggtaattagggttaaaaaatagtaatgtaccctgaaattcattctcatctaatatactacggaatacatttcgtgaagtatatcacaggataaaatatttattatgattttttatattatattattatatttaatgattatttcatatggggatgtataataacttttaatcgatcatgatattattaaactaaacttttgaaacttctacataagaacctatttgatatcacggacattcaaaacactttaaaaattaattgaagtgcatatttaaattcattctaaagtaaggacgtcaccatcaatta

SEQ ID NO: 88389 - DNA, 914 bp, Cannabis sativa
agagacagcagcagcacctggtttagcttgtgctgcatgatattcttccaaatagtcgactgcaaaaaacaaagcaatttcaggcggctttggtgtcgatccatgtctctctttgttcctctcatcccaaatgctcgaaaggataatagcaaattgctcgatttatttagtagaccaaatcgaagaaacccagctgtaagagatccattagagacatattattcgagaaatcatgatggagaaagaggatagctgccatatttttcttggtcttttgcaatggaacagtgcatgaatgattgactcattgcatctgtgacataaagtgcatatagctgaatcacttatatgtctggtgtgaaggattccagccactgggagacagtcgtgtatagcacgccataaaaattcttgattttggaaggtaaggacaaggaccagaactttttccactattgaagagaaagattagaactggctgtgggttgctgttcttcaagtctggtagcaagggcatatcccgatttgacttagtacattccattagcttcatgatgccatataagttgatcttgttgatcacaaagtgtaaggggtatactctgaatttttgaaacatctgagtccaggattaattgctcaagcagagaatgattccattgtctatttccagtaatcaaagcagacttcttcattggtgtaccagtatccctaaaaatcaaaggcaaaaaagaagtgataccaggtaggggtgttcgcggtgcaggtggtgcggttttgactattttttcaaaacaacccgcagatgcagttttttcaatttttcgaaccgcacccacatcgcgaaactaaaaacctgcaaaaactgcaccgctagtgcggtgcggtgaggtttttgtggtttatgcggtttg

SEQ ID NO: 88390 - DNA, 838 bp, Cannabis sativa
accagtcgcaccaccatggaaggaattatcgtcctcctcgccggttctgagccatttcgagccgatcaagtgattccgccgtcgtggttgggcacgcataccagctccataaggtttgacgattttttcagcgggcacaacaaacaattgagggcagaacctatccgaatgacccaatatgccacaaataaaacaaaaggtagggacatattcatacttgaaagtagcccagaatccttcctcagtcgcaatacgacgaagcttcttcctccttttcaatgggacgttgatgtcgagtgtaacacgaactcgcaagtaatcacgccaaataccttggaaattctttgggtccgtctttacatatgtgccaataaagtttcctaactcacgaagagttctctcggttttgaaaccgggttgcaagccatgaacttgaacccacatatctagtttggagataataacagagcgaggatcttgtccccgttgaagtttttcaaagacaaactgagtgcgattgaaagtccaaggacttccttcgataaccctttcaagatcaatctcatggtagaattggaacaaatacctatttggctcgagttccttgacgtacataccgcgtcctggttgaaacaaagatgccatcatatgtctcattgcatcaaaatcaatagccctctcagttaagaacttcccgacaatgcaccaccgatcttcaccactttgatctgaatcctcaaatatgtcatacacagtattcccatcatcttctccttcaagcagtatgttagcatattgctcttccacatctttaagcgaagcacttgtggaagccata

SEQ ID NO: 88391 - DNA, 969 bp, Cannabis sativa
agtttcgatgccatctcaatttggttacttggttcaagattgtcgctatttactttcttctcttaatagtgtgtctttaaattttgttaaacggtctgcaaatagagttgctcattgagttgctagagcgtcttgtttaagcccaaatcgtatttttaaggagcataatgttccgtttgatcttttgactattgttgatgcggaatgttactgaataaaataaatcaacttttgctcaaaaaaaaaaaatactacggagagataaattctaagtataaaagaggagagtgagatacacatgtggatagtacatgaaagtgaaactcacacgcgagtaaggagagtaaagagatttactgacgcgcgcagaactacagcgtcaaaatgtggcagggaatttgcggctgccacgtgacagtttggatgaagtgaacttgggtgtgtaggattgttttttctcaatgcaacagttatgcaaaaataactaattagcaacacaaaaataacttaacaacaatcaaacttcaaaacaagtttattaaatattaacatattacattaacacaattaaaatttataaatatataacacaacaacactgtacaagaactactaattgaatatataaaaaaatatttgcaaattcattgcaataatataaaaaattttgaaacacataaactcaaggaaaaaaaaaaaatacaccaaaataataattaaaaaaaattaaagtgattaataaaaaatatgctcaattagaaatcaagtagacaacaatatcaaatatttatatatataatttagacttaattaactcaaaatatatctataaaaaaattacacttaaaataataatcaattaaaatataaataaaaattaatttgatatttgtttactataattataccattcaaaaattataaagcacccaaaaatcaacaaaaattagtattaaaatatgtacctat

SEQ ID NO: 88392 - DNA, 733 bp, Cannabis sativa
attattataaagtgttcttgttttactctttcaaaaaatgaaataaaaagggttattgctttgaattgttttttgtccatcttgagataaaattttacttttttaacagtcatagaatgaaaagggtgaacttcttcacaattagaaagaaaatgaaaagtggtaacacaactggtaaagagagtgtgtgtgtgctgtttgactgactagcttcaaatactaagagcaacactttacattccaatgtttcaattcaaataaagcacaaagtatcaaatgatttttctctcctctcaaaaattattagcattagaaattcaaatgtaaaagaatcctaaagcaactaataataataatagcatatagcacaaaaagtcgtatgcaacaatcaaaataacccctaatataaaacatacccaaaatttggaaaaagaatacaaggcaatagaaaacataaatcatgagacccgcacagtttcaaaaatagaacaacataacacaatatgaaaactcaatcaataaaaatgtaacgaatcggaataaaaaaaaatcaacaaaatatgaagcaaaaaaaaaacaaaacataatgtatataaaaaaaacacacaatcaaactacttaaaaaaaaaaaaaaaaaaaaaactaaatcaatacccaaaaaaaatcacgaaattaaaaatgaaaataaaaaaataataaaaaaaaaagcaacaaaaacgaaaaaaaaaaaaaa

SEQ ID NO: 88393 - DNA, 1644 bp, Cannabis sativa
aaaagttaaggaatgtttggtatcaaattaaggtacattttcccatatagaaaggggcttacaaattgatgttccaaattttgataatgtcatggatgaggaaattgaataaatgcttaaagtaagattattatctctttcctgatgtcattatattttccatacaaatacaactaaaaactgaacagtgccagctcatctcactacaagtacaaacaatcttgtggtgtattgacactgcctttattgtgagatgtcgtgcaagtttcattgcaggcaacatcatcatttctgggattagaaaccacattaggtgttgatacacatgtacattagctattgttgtctctaataaattagatactatctgcaatatgtactcgatgcaccaaatagaacctagaattcatcaatataataccaattattgaattctagatattaaggatgtaatgagttataaaaaacttatcaaccaactataattgtagcaaattcaaactaaagttccaggtgtatgtctatcattttcactgtaaggcaagaagttaatgtataaaatcaaattaattacagtaatcaaaaattgaattttatttctaaattttaaccactagagacaattatggtctagtcacatgaatattttgacaaatattactaaaactggtccacattattttaagcaaatatcatttcaacacagagcaaaatccaaagaccccacatagttttctaatttctattaattttcaatgatcacatctacaaaaattcataacacagagagaaagatggagaagaatattatataatctacaaaattataatccttcacaccatgtcacgtggatacttgacaattttcaaagtatcttttctagcgggaacaaatatgataggtccttgttacaaattccctataataatttgatttcatttctctattctatttaggttaaataaaattgtaattgtacttgtattacattttgcattttggttttctatgaagtatttcaacaaacacttacaaggcatttcaatttaagaatatgtttatacataaaatacaagtaatgatcctaacaaatagacacacatatatatatatatacaatgttgagaagaacatagaaggaaggagaaaccataaaatctatacaataacaaaagaagaaaagcaatacaaatttaaagatagaaatagaagattacgtacacaaaaatgggattgactcaatttttattaatatggtggagacgtagtgtcgatatttatggtaaaggcgatgacgatgatgtagtttcgatggttgtagcagaggggattccggtgactcttgcagaggtgttgtactactatagagtgtagactttgagaaagaaggaaaggagttgtgttgcaagggcagtttaggaaagttaattaaaaaagaaagtagaaattaactaaaaaagttttgagggtaattttggttaattaaccaaaaaaaaagggtaattatcaacttacccaaaaaaaaaatagaaaattggagtttttttatttttacacttcaaaataatatttttttttcatttttacggaattatatatagaaactcatattgcaactagcgctgcaacctaatttgcaacaa

SEQ ID NO: 88394 - DNA, 581 bp, Cannabis sativa
caaattctcgatgagaaaccaattaattgaatctaatcaaacaaaccaacgtacacttatcccccgtagttaccaagccaaccaacttttgaacctgatttgtattcaaacccctacccctctccacaaccctcgcatccctaaactacttcaagcaccgttctttggcgaagccaaaacacttctcctttgtcatcgccaaacagccgttcatctcacgctcttcacattgctccctctccttcaaatccaaagtcgtaaaacctggcagattcagccaccacgagggcttgcacttgctggaagcgctgatcgagcacccgatcctagctccagagacgcactggtcgataatcttggactcacaggctctgtacgctttcgcccaagctttgggcttacggaatagaagatcttgggtttggaggaaagagccatttttgttttgggaatgttaagatttgagatttaatgtatttttgttcttgtgagctgggagggattctgcaaaaaaagaagaagaagaagaagaaaaagaaaaagaaaatttaaaaaaaaaaataaaaaagaaaaaaaaatta

SEQ ID NO: 88395 - DNA, 532 bp, Cannabis sativa
cagagatttctctggccatctaaattttgtctatttgaagttatatatatatatataaaaaaaagggtctagaatgccgaagattctccatctcgagaaggatgtaattaaagtctttgacattttttattcgtagtaattaagacttttaacaatttttatttgtagaggacccatatatatggcctctcattgacacacaaattcagataataaaaatcttatctgtctttccaaaaaaaatttctttttaaatttcatctctgggctatttctctactaggattaggatagataataagaatattaccattagtttaatattaccaactagaagatatatagcaaagtcttttatagtaagtgtcaatctcaataggaaaagccaacgttagaaaaaatattaaagttaattctcactatatgaattagcattatatctctctattagtatacaacttctatccatccaagactaaatggcatcagagcaacatgtaaacaacaaaatacaaaatatataattatagag

SEQ ID NO: 88396 - DNA, 1389 bp, Cannabis sativa
tattttttacaacataaataaatgatttttaaacaaccgcgcgaggcgcggtatcgttgcctagttattattattttttttttgaaatatgtatattaactaacaaaaggattacacaaagttcggcaagtccgccattaaaccggcagacgcacaaaagggatattctcccaaccacaacttattacaatttgcaaacaaagcctctttggccaataagtgagcagccctgtttttctttcttcctatatgctttactgccacgcaattgtgaaaatcaggggactctcgaatgtcgtcaagcagcgcgctccaatccgttttggcttgataattgtcgttcaaatagctggctgcccaaagacagtcagtttggatgatgaacgggtaggccttcactttagatgcaagatgaatgcccattctaagagccaaaacctccgccaattcaaccgtgtaatagcctctttgctgcttgatttcagcagccaacacagccccttcgtggttcctaatgacagctcccaatccaaggttcgcttctttacaatgaacactcgcatcactattgatgcaaaaagtcccagggtgaggaggatcccacccaccatctggtgtggtagtcggcttcagcaactgatccattttggagttgttgtgcatcataaaatccatctctaattgagcccacctgcaccataaattgttaggaagaaaatgaatgttgagtctttttttgttcctcctattccaaatgagccaagagagtataatgaacattaaaaaatctgcttgagttgtttgttgctttatagccatgagcatgtcctttgtttcgcctttccaccttttaatggtcttccacatcaaaaaatgctgccatatttcctttactgttggacagaaccatagcccatgttctattgtttcttactcagtcccacagccgcaacaccatggttctatcttcctaccctgagccctaagcaccatgttaaccggaagccaaccattatagatacgccaaacaaaatttcgaaccttaggagggacttccaacttccaaatctcagtccaccatctcctataattctcatccgaggaaggccctgcatttatctcattggtggtggccactttataaccactactcaccgtatacataccatttggtgtgtagtgccaaactaaatcatcattagcattactaaaacaaggagccatacctagaacaatgggaacatcatccgggtgaaatgtttgagttattacatcttgtttccacccaccttcattatccttcatttgatccaaagttgtcccacagttaactttcgcaggggtgcgaagagcaaaggtggaggaacgaggcagccatttgtcttcatt

SEQ ID NO: 88397 - DNA, 516 bp, Cannabis sativa
ctcgattgttcttgggagttttgttttttgatcaaaacgttgtagttttgattggaggcaaatgttgttttgactaggagtgaaaggtaaattgtgaccttgaatacctaatttgatttctgttaggtgtagggatagcttcagaatttcctacttggcagggaagtacaacataaactaagaagaattgaatcaaggaagggaaaggaaaaatcaagaatattaagaatagatcgtgttccatatatttcagaattatatctggatatttctaaacctaactattacctttcttgatttaatcatattacacagtacattgagttccatgaaaatggatattaatagatttgatggttcaggtgactatcgaatttggaaaaagaaaattagagccttacttgcccagaacaagatgctgaaaattctaagtgagcctattgtatggccaacatatacaataaaggcttagaaagaagaatgctgaaaacagcaacaagattgataattttcagc

SEQ ID NO: 88398 - DNA, 2567 bp, Cannabis sativa
aatttagctccaaattggcgcctaattttcattttgctgctaaagttttatcggcacattactgcgctggtaaaacatacaatatgaaaaattaatttagttttttcggtgacttaatgtgcaccgataaaagtatttttttaatatttatatttataatgtgaaattaaaataataataaataaataaatataatctcaaatatattatgaaattgaaatttatattgtaattacaaaactatataaaatatcgtaaactaaataaaaatatttttagtttataaatattagtattatttacactgcaaactaaaaaaaactacagatccacaacaacatcatcttcgtcgtcatcaccgagatgagcagtctgtgaagaggacccagcgccaagagactgaaatggtagaatcggtggaatcagaggcatcatgggcatgttaaatcctggaacaacactggccaattgcatcatttgttgttgaaacacgctcatgatttgattatgagtctgcatcatttgttgttgccactcgttctgtgcttcctaatcttccacccttcgcttcatggccttatattcctcttaggtgatagtgagctgcccggaggaacttaccccgagagttgctctttttgctcatgtcctaagtctcgacaactggcctattcctctcaaatggcgtgatcactcacccagcgcctgtgtcataacatgcatgtctacgagaaatttggtggggtcgacattataccgtcgcaggacattggttggcgctagttgagtttcacgaatctcaaccattttggtctacaaaaaatttcaacaaactgttagaattgaatagaaattaaaatatagaatgagtttactaaaaatataaaattatttacatgtagttattgtgtgtgttcatcgcaccatttgttgtctttgcagtggaactttacaaaagtatccacaacacttagatgttcccgggatcagcctatttttatagaatataaaaaattagaaaaatattattcaaaaaatataaatttttagacaaattactatgctgaaaacatcataccccactcacaatgtggccacctatggtcttagacccccatctaccgtgaatcttcatctgtcctcagtttttggcattttgtttggctcttgcatggaatataaagtaaatttattgttagcaaaatgaggaaaaaaaatcataagttaatggatattaaattttacaactttcaatttatacatgctattttgggtctttccagtatgtgataacctcagcccacacctccggtgtcaccatatctggacgtgatatcctagtcgcttctacctctccatatttttgaatattctccttccatgtctttttcgtatctgctctccagtcacgtagcccttttgacattgatttaacaatgtagtcctcaaacataggattgttagttgagaactcaaacttggttgaaaaaaataaacattaaagtcatatatatttattttataataattttgtttgaactattacaataaaaatttgaatgttaccgctattttgtcccatatagtttgaatgatcgtatcctcaacgtcctcgaactcaaacttgttcaaatgaatggtattgcgaacaaaaagcttgatataattcttaaacttattgccatagtcgtctattgggccccagtccccatatgaaatctaaattttaatttttgacctgtaggttgcttgactagttcttgttcaatatttttcccttgtactttctcttaactctctttttcttactgttgcttgcacctgtatcagccattctacacatacaagttacgaataattaattaatcaagctattaacaaaaaaatatatatatatatatatgtatttgatttaattaaaggtgagtttaaatattacaataccttaaagtctgcaagtcatcataatcatcatcatcattaacatgtacattattttcattatcattatcgctagtgtcttcatcatcactataaataatgaaaccatctaaatcttcacggttaggctgctcatagtccctgttggtcactttgattgggtcaacatcatcacggacatattcgacattgtccagttgtgcaagtttaacgactaatgggattcccgaagagtttctttcttgtatagtcgtggtatcatcatcatcctcatttgagaaatcctagacattgcgagggtgtaaacattgacaagcttccaatcaactctattctttaggtcgggaatgtaatatatcaaatttgcttgggatgcaagtatgaatggttcattttgttaccattcacgggcaatgcagacactagtgaaaaaaccatcactttctatcctgttatcgtttgtgtcccaccacttgcacttaaaaataataacattacaattcttcaagtaagtgaacccgtacacttgtttgagtacgccataaaaaattttaccaccttcttcaggaactaaaataccactattttgggtgttacgattatcatcctaatcctcaactaagaat

SEQ ID NO: 88399 - DNA, 527 bp, Cannabis sativa
gttaatagtttgaagaaataaaaaattgaaaaaaaatagtacaaaagaaaaataaagaaaaaacaattcctttaatttttgtattatttattttaatctaatttacttaaattttattttttaaaatatttatttacgtaaaataataaaaatataacatgtgtatactatgtctacgtagacaatcaactgtacacacttggacaatacaacttggctaataaaagtcaaatttaaatggaaataacaaactgctaatagaacacggatttaaaaaagagattttcatatatcacaatttactctttttattattaatatatatttatatataagtagtatttttatatattttactatgaaaaaagagaaacataaccaaccataaaattaatatcatatagagtttttagagtcattaatatttattacaataataataattgttgtgtttggtaatatgtattaggtaccacatgaaagatgcagtacttgatgcagtaccatagtttgcagggtgtccagac

SEQ ID NO: 88400 - DNA, 1033 bp, Cannabis sativa
gcccacccgagaaggagtacgtttgcccacatgatcctttgggatccacacgtcttcacgaattctaattgactcaacggagccaacacgccaacgacagccatccttccagagatcacgaccccataatatacttttccaaagaaaagaagagcgctttgtcacttcaacagttaacagggagccattaccgaagtaaaaccctttcattaccctagcagccaaggagtcaggcgagttatataaccgagcagcctgtttagccagaagcgactgattaaacagaaacaagtcccgaaagcacataccaccatcatttttatgccaacagagacgaggccatgtacaccaatgcatatttttcttatcatcgtccccaccacaccagaaagtggcacacatacggtgaatctcattaataataccaatcggtaaacgaaataagctcatagcataagtaggaatgacctggataaccgattttagcaacacttcacgcctaccaagggagaagagctttgacttccagccaaaaagtttattccaaatcctatctttaattggctgaaacagaccacttttacttttacccgcaaaacaaggcaacccaagaaatttatcatgacaaggaacaagcggcaccccgagaatgtgggccaaatactcacaaaaatcaagaggaatactagatgagaagcataccactgatttacgcaagttcacaagttgtcccgaagcattctcgtactgatgtagagtttctcttaagcgaacacaactagccactgaggcttccaaaaagaagaaactgtcatctgcaaacaaaagatgtgaaatcacataagttatgaaaattaataggcaaaaatatctactcaaattttgaactaattaaagaactcaatctcttacacaattttaatattatctactcctcgcttgaagttcctccttgtgctcactacatttagttgaacattagtaagatgaagtttctaggtgaagtaagatagcatacatcattcttaattga

SEQ ID NO: 88401 - DNA, 534 bp, Cannabis sativa
tacttgaggggcaagaaccccacaaggcccaattcttacatttaagatacaagaatactctttggatgttgatgttattaaatctcaattgcggcctcgatgtctctattcactaatccccctttggtaatcttatgtttatgaagagatgtgtgcaatcatactagcttgtcatattggttttattttcgctttctagactttttattataccgtttgtgattatttttcctctgcagattgttcttttggggttttgcacacgggagagcatctaaaacttactacaatatgtttcaaaatatcttttcagctattgatattaacatagtgagttcatctatgttgttaatatatcattttgatgctaatacctttagtttatttcctaattgattgggtttacggatgtttatttccttcagtttttggttttgtattgtatgattctctttttcctctggtggtatggttcataattgtttctctttgtaatttagaattttcaatctcacaaagacttatctcttgaat

SEQ ID NO: 88402 - DNA, 567 bp, Cannabis sativa
tttccggaacatcttacatcttgaatcgtcgatctccaaaaaatattgagagagttatggccaaaatacgatcaatcggcgcagcaaaaaactcactcggcgcgcctaggcatggaaatcatgggctgtggcccgcgccttctaatcctaagcaaaaaaggtttttttttttttttttttatctttttttttaccatattttggctatataagaagtagacttcaatagttttgaagcaagcaatcaaggaggacgaaaattagagataaaaatcaatagcgaaggttttttcaacgcgattttcagcatttttttcttctctattctcttctcttttcttaaattaatatgtgtgaatttactacaatgaacatgagtagctaaatatttaattagggtctagatggagattgtttgacattgatttatggttctaatatgattttattttctcttatcactttctatgtattatatttcatccgtaattaattacttttaattgcttgatcactaattaactgtttatgatcttaatgcgagatctgagaagtgagtgtcaatta

SEQ ID NO: 88403 - DNA, 634 bp, Cannabis sativa
atgcttccttcagtaaaacaatttcaaatccatagtgtacagctgctggtgtagatgaggattgttttagtttaggatactttccattcaatatgctatttttgactgaaagggaaaaaaatgttacaggcagcatgatgctaaacaaaattgtgagaaattagtgggtttatctaaatttttcaatctacttgtttctataattgtctgctgtgtgtatatgcttttatacgtgaagcaagaaacaaaaaattgtattttattaaaatataataagatattatcataatttacaagtgctaatcagtatttagtactgaaaaagatagtgctttaactccttagttttgagatccaaatcaatatccctctttctcaaaaatgttcatcctgagcttaaaacttctatctagttgctagccatagaaaatactcatgaaactctgcagaaaagaagagtatattattattcaactcctgggtggtgtagtcttttaagagaaacaatgagtctgtggatcaatttttttttttagaagtttacttttactgaagtctataggatagactattggctgaattttagccacaggaagactgtttgttgggccctccagataaggaacaataagat

SEQ ID NO: 88404 - DNA, 1364 bp, Cannabis sativa
atatagtcacatatatattataaaaaattctacaatccctctcaaaaaaagttcatccatgcattaatatttttttcatctcaaaaacaaattatgtctacaacatttaaaaaatttagaaaaatttaatatgtcaaaaataaattttaaataatataataatttttttaaaaaatttataaaatattttaaacaattatataaaaaaaatagactaaattttttattaaaaatgtccattataaaattttcctcagttttatttcgtaaaggaaataggaataaaaagttgtaaatagacaaaaaagaaaaaaaaaattgtaaattgtaataatgttttacagctcacataaactaaaaatatatatatataattttaataaaataatataagattatgtggcatagacttctctagaagttttctatttctataaacacgtccgtacactaagttaacgggcgttaagtttatagacgtggtgctcggtcctcagtcgcgcaacaaatggcgttattgttattattcttactatttttaattttgttcttaaatgactttataaattatttaacttcttctctaagacattacaatgacaataaataaatttatctcataattatgattttttttagacttgtctacttgtctcttgattttttttttcaccatttccgtattataattattattttttttttaaaatgtgacttttaacagttacacacatgtcatataaggtccggaaagaaaacataatctaatcacttaatatcagaatcgaggtactaaggtgcctataccattataaggtgatgtcgtataattagttagtaattttttataatctttattaaagtaaaataaataataactgacattgaattacactaataacgatattacatctcacaatagtactaaatagggttgaatatttggacccggaaacccaccaatttgccccgacctgctgccaaaaaagccgaaaaaaaaaagaaaacccgtatggtcgagtcgggtctcacctgaaaatggtatataaaggtatcaggttcaggtgtttaaaatgcatattgtggaactcgggtctccacccgaaacccgaataaataaacatttttaaaaaaaaaaaaaaaaattcatccctaataaatagtaagtaaacctaaataagtaaaaagtattagtatttagtaaatataaatcctaatcgattcgtccccaaacgaaacagaagagaagaagaaagacctgaatcgaattgatcagtcatcatctcatcttctccagcgagttctcattcctgggatcggctcagttcgattcctccaagcaagttgtccaccgctactaagta

SEQ ID NO: 88405 - DNA, 1676 bp, Cannabis sativa
  modified_base (916)..(916): a, c, t, g, unknown or other
  modified_base (947)..(947): a, c, t, g, unknown or other
cctcagctatctttaagccagcgatcaaggcttcatactcagcctcgttatttgatgcgtcaaattggaacctcaaagcgtagtgaaacttaaagccttctggcggtattagtattacccatgcacccgaactctgtttgttggatgcaccatccacgtataacttccaggtttctgcgtctcgctggataggtggaatttcttttggagttataccttctatcaagaagtcagccaaagcttgaccctttatggatgttcaaggatggtatgttatgtctaactgccccaattcaaacgagcattttatcaatcttccaaaagcattttgtttcgataaaacttgtctcaagggctgatcggttaacacttttatggggtggttctggaagtatggttgtagtttacgagacgcatggactaggcacaacgcgagtttttttagagggagatatctggattctgcccctagtaaccttttacttatatagtaaatacattgctggtggttgccctcttctcgcactaatcgcatcttcagagatggctaaatagagaaacaacatttcttcagttatgggtttcgccaaaactggtggcgttgctagatgcctttttatgttctgaaagacctcttcgcactcttttgtccactcgaactttttgttgcctcccaatacattgaagaacggcacacacttatcagttgactttaaaatgaatctattaagtgcatccattcttcctgtcagggcttgtacttccttaggctttgtcggtgatggcatgtctattaatgccttgatttttatggaatttgcttcaatacccctcgcgttaactatgaatcccaaaaattttcctgaggaaactccaaaggattattttttaagggtttagcttcatgttatacttngtttagcttcatgttatacttcttcaatatnttaaagcattctgcgaggtttgaggtgtgatccctactctttattgattttaccaacatatcatcgacataaacttctataatccgcacaattcgatttgcgaacattttgtttaccagtcgttgatacgttgccccagcgttctacagtctgaatggcatgaccttataacaatgtctcgtgttggttatgaagcttgtatgttcttgatctaagacatacatttttatctgattatatccagaatatgcgtccataaatgacataagctcgtgcccagaagttgcatccactaactagtcgatcctgggaagtggaaaataatcttttgggcacgccttattcagatcagagaaatcaatacaagttctccatgtttcgttaggctttgggatgagagcaagattggctatccacgagggataaaacacctcgcgtataaagtcgttgactaataacttgtcaacttcctattttagtgacccttgcctctcgaaatccaaggggctccttttctgtttcttcgctgggtagtttggatcaacatttaaatattgtcagataatattatggtcgatccctgtcagatctccatggctccaggaaaattgatcctggtttgccttcaaagaacttattagctgctatttgagcagctcgtccaagttcttcccgatgtatgcacaccttgtgggatttcctgcttcaagaataacctcttccaattcc

SEQ ID NO: 88406 - DNA, 1007 bp, Cannabis sativa
agtgaggaagtatgttcaggatcagaaatgctcattggatgtaatcatgggagaccacagacaagcaaatagcgatacattggagaaatagtaaaaaaaaattcttggatattagaagaatacatataccaaaagacattgtaataggcacactatatgattatggagtgtcaatgggatatcaaaaggcttggagaccaagagaaaaaacattagaattggcgagagggagacaagatgattcttatcaacaaccaccaatgtacctacacatgctaaaagtatcaaatccaagaacaatcacacacttacaaacagatacaaaaaatcgtttcaaatacttgtttctagcattcggaaatccaataagagggtggaaacattgtagaccagtcattgtcacagatggaaccttcttaaaaacatcatttggcgggacgttatttttcagcttctacaatggatgtaaacaacaaaattttcatattggcattcggaaaatgagactcagaaaatgatgactcttaggattggtttttcaactagataagagaaacatttagtgatattgaatgtacaatatcaaaaacttgttttatgttcatttatatatatatctacataatatatattttctgaatagtaacaagttacagtaaattttaaattcacataaaaaaaatcattaataatcacttttaatcctgctgaagaaacaagttactgacataagacaaatatatatatatgtaatacataactaaaaccagttttaacatgcaggattaacaataatatcagacagacataaaagtattacaaaagctgtgaagaatgtttacccagaccactttcatggagattgcatattccacttgcttaacgacatcaaatcaaactttggtggacatggagatgagctcactataaactttttgaaagctgccaaaacatataaggtcagtgttgggttttgtgtcctaaataaaactcatttcaataaaatc

SEQ ID NO: 88407 - DNA, 797 bp, Cannabis sativa
acacattaagttaactattaagaacatataatatctaattgctctactttgttcattattatgttgtgtaaattggagataaatggtataaaatttcagttttttgttgaatttcataattttgtgttttctctttgttaggggattgatggtgttgaaataagaagatctcaaaagtcattatcagcttgtaaattatcagttagcaaaagttcatttgttaaggtattgaatcattctttcttaatatattttagagtgaaatttttttgttctttttcccaattagagaataaatattgaaattgttaaatatatatcttttcatgcacagggtgtgtctgacatatgtactgttggtcaggatactaatagtgggttagatgttttgggacttttgaaggagaagaatgaggttggaccttttaaagttaatgttgcactagttgatgtcgagatggataagataatctcgtatttgtttgagaagagcttaaaatcaaggtatatattgcatgtactatattttttctttttataataaaagaaatagtagttattttgctatttataagtgtttgaagaagtgagatgtcaaatatgtcaattctagtgttaatattttatttagatattgatgtttttttataatttttcatgtagtgacattctagttgacaccgaatttcatcagttggagcgttatatatttcaaacacttgctccttctcagaacattaatggagaggttagtgaatgagtatgtatattattttaagtatatttaatttattttg

SEQ ID NO: 88408 - DNA, 698 bp, Cannabis sativa
tttttatcgaagcgtcttattcttataaaaatattttttgaattacacaagtttagattcgattcaataaacccctacacacgcatctccactatagctacttaaattaacctcaaataatttttatgagatttttttttttaattttagcctaaaactacttaaaattaatattgataatacaaggtaatataaatatttttactatatatatatatatttttacaaaaatactaactcccttaaaaatttcatatatcaataaaagataaattaaattacaactcaattataaaaataatataagaattaaaataaaaaattcattacactcacatatacaacatatacactatattataaatataagaaagatagaagagataaattacaacacatgtaatatacaatatatataatataatatcaagaaaaagaagatatatatatatatatacattaattcacaaccaaccttgagtgtagattagtagggatcagcatgactttgacaaggcattacatttttgtccaaaagcttatttctcctatctctaagcactaaaggaactctcatagaaatagctttgggaattatcaagtcttaggattttctagtaatatgctttgttgataaaaacttagttcatctcaatatgagcgacagttagacttctttatataatgtttaggatatc

SEQ ID NO: 88409 - DNA, 1441 bp, Cannabis sativa
  modified_base (1382)..(1410): a, c, t, g, unknown or other
agttgtcccaaagatcgtacgctcaaaatctgactgccccgacatgtacaatcttcattcgctcgatcccatgggtgcttagccttagccttgccattaccaacacctgcaaacattaactatgagtcgacaaactcagtaagaaaactgatcataatcataagtataactcgaattacatttaggagcccatacacccaagtataactcaatagcaacaccctaggcggtactgagtctaaaatgtttataagacaatactattgaccataataatagcctatactcagtactctagtcatactctagttgtaccgatgtgatagcattgtgtagtatttcagcaaaatatacatctattggtatctaatataactctacgtgtattaatacaactatcgatgtaatctaataggcttaataaatatgtacactaaacatgtaaacacatatgcatatcattatgctaatcttacatcgcttccaaattcaggtaacagctgatcgacgatttacagacccctacatcacaatattcgtaaaactaaagagtaatgcgctaaatcactttttggtgacttaaaatcgaaactaaaagttttcctattgatggataaatggaaataccataaatatcataggaatgggaaaatctagggtgccctaaaatgccccaaccgatagaccaattccccaacttgaagactggttctgtggggtttgcctggggaccaaccaaaattccgattcctacaggtcgcactaaatcggttgactgattcagtgcagaaaacacaaattccctcctaaacaactcaaatcgaacccaaatccaaccaaactttccagacctcctaattaggacacaacaaacatacttcaagcaataaaaccctgaaacaaccttagaaaaaaaaatcacaatgtgagagcaaagtttgagctctaaagttcaaactttgctcaaacaggacaataaattcccaaacagatccaaacgtccttaaataaagtttaaatatttcataaaacataatccatacaaaattaaacctacagtcatgcaaagccctagctttaaactaaagaaatcattaaaagggaggcttgagaattttatcatggattggaaacaccaagatcttgctaagacactaaattggagttgaaaagccctaattcccttgctagttctagagagcaagagatagaaagagtttaaagtttctaatttttgtaaaagataaatctaagtttatctaatattaacttagcataaaaatcagattttcttaacttaaaatcaatattatatatcactaaaagacaaacaactcatatggaaaaaaggctaagttgcccttgttggaaattattttacnnnnnnnnnnnnnnnnnnnnnnnnnnnnnttattaacatcctaaataagaactttctaaa

SEQ ID NO: 88410 - DNA, 582 bp, Cannabis sativa
  modified_base (536)..(551): a, c, t, g, unknown or other
tcttgatttcgatcttcatcctggcgacctttctaatgagtagtcgcctcatgtggatcattggagtcccctactttagtgccagaactagtaaaacgaagactagacttggttcgagtgagggtcgtgattacttgaacataatttgtaattgggctcatgcttccttcaactctcaatgaaagtacttaaatatttaccgagattttcaaaaattgattataaacaataagaaccgaagacataaataactaaaagagaaaaagtaaaaagagacaaataattttttacatggttggggcgttaattagccttactccacgagtcagtgttattcagtagttctttagcttgaacgattacaaagaatatatattctgtagtttgcctgagcaagtattgcaagtgaattcaacccttaatctataagattcgatgggtatttataataatttgagaattatatttagtttctcttttctgtctattggggagcatacaatgaattgttggaattatatttatccaggatcttnnnnnnnnnnnnnnnnatgttgatttaacaacctaatattgaacttc

SEQ ID NO: 88411 - DNA, 856 bp, Cannabis sativa
tataataccaagcttcaataaattagattattcattgaatctaattaactaaataatcttatttattaattctgttattactccactaaaaatatagaatgcaactcttagtaattataaaattatatttactgagtttaactataatatccattgatgtaatcaatactagtcattagttttccatgtattaattcataattagttttggttaaattatcgttttacccttctaattatctctttatcctttagtaccattaattcactaatgaaagtataatttagatctaatctaaatttttctacaacttttcaactcttaattaacacttaaaaagaatcaatattcaatctgttaggaaagttaagatttcatattgtaaatcatgttcctaaccatccatattattagcttccgaaaatagatgttgtaagaatcatctgctctaagaaactttaacaagtgaatcaaagaaactaataatatgaacaggagtttatgatttcttagaatttaggctgatatattaattgatcatcattgtgatatgaattaggtctttatagtaaatggctagttagacagcttaattacatattattccttgtcatatataatccctattataaatagcacattcaccgagatgtctatctacatcagtgatccaaatcaaggttgcttgtaccgaatatcgagcattagtgaaccgtactaacaactgttaattgaagattccataaatttaatatatttcttactattttattcatggctagtgatattaattttttgtttttttttaatatttatatataaattattaataaataattcaacattcaaacatat

SEQ ID NO: 88412 - DNA, 933 bp, Cannabis sativa
tgtcaagagttagaatcacttcctaaatttgggttgcctctcagtttgcgtaagctcaaactcgtaggctgctacaagttgattgcagctagaaagaaatggaatttgcaagcactttccaatctgataagctttgaattgggaaagtataaaggtgaagatatggtatcctttctagagcaagggttcctgccaactagtcttacctcccttactcttactcatcttccttatcttaaaaccttagatgataagggatttcaagagctcacatccttgaaagaactacctacgcttgaatgagtgccccgaagtggagacacttacttccagtgaaagaaagggctgccaccatcttttgaaggtacactgccaccttcattcaaaagtttcttcatggaaagttgctatttactgaaacaaaagtatgaatggaagaaagaaaaagcatacgattatggagcgagccaatccagtatgatgatttcttgtgttcctcgtcctcaagctacaatcagcattcagtcaagtgcccatcaataaggggttcttctagtggtacgtttcttgttcatgcattaaatttaattatcttttaacattttgtatatacaattaatcaatgtgctttaaagcaatatggatcttcttatgtggaactaatttggtttatgtgaggttcctttttataattatttttgtttaataaaaacagttaatcctatgtgaattctcttttttatttcttatcattccattacttttaacagattatgttacttgaaattattacatagtcagattgggaagacattagctgataattaaatcatttgggaggccatttccttcaccatttatttggtcgtgaggtaatttcacaaagtaattaaattatattgactacatgtcctaccaaatggttgtctttaa

SEQ ID NO: 88413 - DNA, 1580 bp, Cannabis sativa
aataataaactactcttaatggatgaattgaaattagaatatgttgtttacttgtcccaggaattagaattagattgacaatattctcatttcacacatttacttcacttcggaataagaataaataaactgtaagttaatattacaaaaatacacttattatcacccttcattttaatttaatactcttatatatatatgttatccttacaagtttacaactaaaagtttgaaataaaatttaaaataaataaaacaacactaccagtaccaaataataaaatataaaaaattatcataaaaacaaatacacaaaatcaagtattacaaatctaataaatataattaaaatatatattttttattttttaatatatattaaatgtaattaaattatatcagttttcaataaaaatttacaacaaaactccagaagatatttaaggtcctaggagagtaaacaaatatagggggaaaatattattcaggaaaggaaaaattggcaacaaccaatagcttcatactcataactgatttatataaaaaggcaaaagcttgcctattcaaacacaggtgatttttctttatattttttcttttcatttcttctagatgaaaggcctcttcgaataacccacctcaagtactcacccgtctcccaaaacccaaaaactatttaattactcctatatctaagataatagaatatataagatgaatgcgatacccttcccattgccaattaattttaaaataaaaccttattcatcttatcttaaattctaagattcatcaatcaaacaagctaattttgttttcaaaccttagatctcatcagatggtacaaaatcgtaaattttgtgccatttcgagcccaatcatgttaagaaaagtacaagttaaatgcattggttgttaattctcaaatgagtcaattataagaagctctcaggtaagagaaaaaagcaaggttccccagcatgttatatagacaatactgaaaatttcttacccttttcaagtagacaccatgtgcacccctgatcaatgattcaattttgtagtagtcatcaaggatagaaaaaagactggctgaacagaaatgaactatgaaaagaagctcagctaactcagctatacattaaaattaaactaaacaaccagatagattacaagaagggtaagggtaaggatagaaaaatgcattttgacagaaaacaaaacacagcacccagaagccaagtgaatatctcataacctggttaacatttcggtcacctatacctccttttggcagcccaggtgagagcattgcagccagatttctaaaaccttttcctgtaatagacaaggattttctcaagttaaatgtgataatgcacagaatagtaaaaagtatatgagaaaatcaagttggagaaaatcatggcaagagcataggcaatctatattcctctatatctaccaataactctttatcaacattaccacacatgccaacattttattagcaattcaacagtctttatcctttttctatttacaataatcccaactctcacagatgtgttgtgtgtgtg

SEQ ID NO: 88414 - DNA, 529 bp, Cannabis sativa
acagtgccatcaaaacttctaatagcaatagatccaatcccagttacttggcacttgtgatcatttcccataactacacttcctccattaatctcttcataatcaataaaccaatctttgttaggactcatctgatatgtgcatccactgtccaagatccattcatcacagtccttttgttgcagattgttgcaggcatcacctattttctgactagtgcagcagtcatttattacagcaaagagatcaccatctgaactgtaagtttcatctaccacagcattcgagtcgttaaacttctcttcttaatccctgtgtttctttttcttatttttgatttcccagcagtttttgattagatgaccaactttgccacagtgatgacattttattgtctctttagatcttgactttgatcttgagttacctctgaactttgagttatgccttcttgaatttcttcctctggtaaaaagactttcatcttgtcttgactcttgtctaacagctttttgccaattcagttcag

SEQ ID NO: 88415 - DNA, 2415 bp, Cannabis sativa
aattgacatttctcctgaagctaaaggtaaatcaggtttgtttaatatataataatattaatatcaacaatttataaaattttagtattattgataactataaattcatatcatgacatattatctctatttgcactataagaaatcttaaatttactaaatgaataaaaagatataataatatattattttaactaaaaagtccaaagtatattgttataaaaaataaaaagtaatttgtggtataaatatttaagtttaattctgagttgtatataaatacttaaatttaattttcagcataataatatctaagctatatttctgaaactttataggtacctaataattaaatatcaagttattatctacgtgtcattttgttattggtatatttaaattaatttcttttttaaaaaatcattacttggactaatcagggattgtcacgtggcaatttacttaatacttaacaactagatatacttacagagttctaaaaatataacttagatattattgctgccaaaaaattaaacttagatatttatttgtaaccaggagttaaacctaagtatttatgccgcaaatttgttaatgttaaatctgtgtctcaaataatatatatagaataatattatggtagatacacttattttaggggaattactctatatattattttttattttttaaaatttacgatttgagttgctttggtagtttctatgtcgtttgatgtgtagattttggttgtaatttaggttgctccgttaattgttatatgtgtttctatgtgaattttcgtaaaaatgctaagaaaaattattttgaagtgtaaaaatgaaaaaatctccctattttatccttacagtatagaaacattttcttagctgttgatatttatgacttttgagtgtatacattcagggccggccctgagggtaggcgagccaggcgtgtgccacggccccaaaattgtaaaaaaaaatattaatatatagatataaaatattaaataagaagaaagtataacaaatattgtttggtgtagtggtaaagggtcaagaaatcaatccctattctacttttctatttcttttaaaaaatatttaatgtgtagatatgaaagattgagcctttgagctcttaagagtttttaaaatttttaccattacacaaaagcattaaaaatattattttaataataattaaactatatataagagccccaaaatttaattttatcttaagccccatatatcttaggaccagcccgtacacattatctaatgtatacttgcatgtacctaactaattttttaaactgaaaccattaaaaaaaatacacattaaacaattcttagtgcaggtagatttttttagtttaactattgaagcctttaatattatattgtattgtattatttttctatttaaattaaataagttaaagagtttttttgcgaggagaggggagaataaattagagtttgaagaggcttgaattgtaaatttcatcatagatctgtttattgctcaaactaagaccaatatacatcttttacttactaaaataactaaattataggttgttctttaattgaagcaaccgaaaattatcaatgactaagagcttgtttggttgtgtttttagttttcagtttttaaaattgtgtttttaaaagtgagaatagaaaacagtttttatcattttaaaaattgaatggtgtttggcacaagtttttttaaaactatttttaattttttcttactaaaaaaatcaatatttcaacagcataccataatatgaacccattcgggtccggatttaagatccgagtatgtgagcaaaaatataaaatataatatgttagacaataaaaatagcttttgaaaattgaaaacaacattttgatgttttttgtcttttagttttttaaaactcagtttttaaaaaactgtttttaaaaatttttgccaaagaactcctattaatttttaaaaactgttttctatttttaaaaacttttcagtttttaaattatgaagccaaacagcccctaagccattgaacaaatggattttcaatgaagaggcgagctaaacaaaaatgtgtaataaagaaaaaaacttcattcttatgcctcttcttcttttcttctaagggttcacgagaactccagtagcgatgaaatcataactttctttaagttgttttttatattgtggtgttttagagtatgttcgatattgtttttaatttttaatctaaaaatacaaacaaactaattataaaataatagattatattatggtatatattagagtttttttcataaatgtacaataaaaataacataattacaaaaaatgtgcaaaaaaattattttaaaaatttatacattttgaaaa

SEQ ID NO: 88416 - DNA, 2684 bp, Cannabis sativa
taataataatacaacgtaatataacagtcaaaattgataaaaaaaatgacttgataaaaaaaaacctctaaaattcattgatgaataaaagaaaaagaaacttccgagaaaaaaaaaagaaaaaaataaaaaaaaaaaaaaaaacacactagtttatatatcgagtgagaaaaaaaaaagggttttcatttttgcacttcaaaacagattttatttatttttttttttgtatttttacagaattctaaataaaaattcttattgcaaatagcgctgcaacctaaattgtaacaaaaaatcgtatagcaacccacatagaaaccaccggagaaaccattagaaacccaaaccgtaaattcaaaaaaaaaaaaagttaaaaaaagagtatatggagtaattccaaaaaaaaattagagcaatagtaatattggtgcgtaaactgtgaagatttacataagagctaacttaaaaaaaaaaatataataatttaaattaaaaattaataaacttttaattattaatataattttattttttaaaataaatatataattaaatattattataatatgtataaagttttaatttatacaagcagtcctatcgtaagaatatacaccttacatcataataactacataatctaaaatcaatggtcaaaaaagttccctaacggtaggaaacttttattaggtcctaccataatcttgccttacgtatatctggcttaaagtggtatagatttagtgtgatactgcaagaaaagaggttaacattacgtaaccattaataagatgtttcctcacattgaattaaacgtatatagtttcgtggaaataatagttggaggatattcagtattagttgtgtggttggcctcagctagctagacaattctcctaaaattgccaaacttttgaaaaattaataaagttcaaaaacatacaaaatataatgttcaaacgttgcttcactaagcatcaagaaagttcaaacacgtatcttataataataataataatctttataatatgaatatgaataactggcttgctaagtttatatacacatatttatacataaagcattagtttactattaatgtttcctcacgaaccgacgctgtaaaagagtacattccggaaagttatggtacggtgtttgtgaaagtcagagatatagatatatatatatataatgtatacaaattgtgttattttaaaagttactgagtataataatgtgtagaacttatacatatataacgcgatttaaacattttacaaattgaatctagttactacatactgctagctaaccctaatattattcaccgatgatttctatatatatatagagagagagagtacttgacttccagctgttgtcagacgccagttgcaagctatcaaaagtagaaaatttgagatagatctatatatgtataaaatagtcaacgcgacgacttatctacctatacagctctggatatcaaaatgaaacctactttgcagttctagtacgtagggacttaattatattttgaatttgaagggggccaagttgtgatcaattaataccacattaattagtccctccgtgattcattttataataatcaaaagtcatggtttctgaaaaaaaaaaaaaatttacattgtttaaactaagtaaaggtgatgggtcacatgagttggagtagtgatacatatacatccagcgatataagtgaataaaagaaagagcgaaagactttgtcaattgccacgcactgtctcacacagcaaataagcttcacaagcttttacacttttgaattacaaataataataaaccaatttccaaaatattctctaaagtggttactttgaaaggacttcgtccttcatctattcataattgttatcttccctcacaatcaaacaataaactttccaattctagaatgaccatttggccaaccttgatttccctgatgtgatgaagccccttcattaaattagctaactcaacaactatgaatactaagttactaactaaaaaactatgtaaacctgtgcatattatgtaaattttttttttttttggtaaggtatgtaaacaaaatttttaattttaatattttgtatttttttttatcaacattgtcttcattaattttcttgtcttatggccataacgccttcctaaacatctacacaacacaagcaacatcctcatgttgtttaggtgtgtggaaatactcccagctagcaaactcatgattgtaacttttctgcccctagagatattaaaagttaagataattgcaaacatagggctaggcccgtacctaattagagcccacccaaacagcccaaaaattaaaaatatttgtgtacaatctgaaaaaaaaaaataataataataaaacaatgtgctaaaatgtaaactaattttaaatttaaaaattaagttagtaattttttttaaaaaaaaaataagaaaatgacaaaacatactaaattaattaataaaaattataaaaatttatttactacatatttcttaaaaaaatatatataataataattaaattaagttatataaatttatttagtattgcattgtgaataaatatattaaatcattaaatatatacaacagtatttgatatatcgtattactgaaaattaatatatcgt

SEQ ID NO: 88417 - DNA, 1162 bp, Cannabis sativa
attttatttatatttatttataaaataatttatattttataatttatgtttatatttatattatttagtatattgctatttttttatgaattttaaattgtattttgaataataattagtttattgaataataattaatgtataatattttaatttttatatagattaatatttgggaaattacgcgtcaaaaaaaaaatatttgggaaattactccatgtattatatttttaattttttttttaaaatttactgtttgagtttcaaaagtggtttctatgtgagttgctatacgattcttgattgcgatttaagttgttccgttagttacaatagaggtttcaatgtagaattccataaaaatgcaaaaaaataaaaaataaaaaaatgaaagtgtaaaaatgaacaggctccttaatatttttatatatttaaatatatataataaattttatttatttattaggggatttctcgcctcatcctcgatgagaataagcggggatgggaacatgggagcactccacgccaatttcttgcctcgtgtgcattcttattggagatgtaaagttgtactaaaaaaagaatttgtgatatatttacattaattttttttattttgctataatacataattgtaaaatttaatatttaattaataattttattaaaaacacatataaaaattaatgtaaaatatttataattcaatgtaataacaaaatattaaaatagcatgaaaataaatataaaagaagtgtacttttttatgaatcagtgattgttactgcaaattaactatatttgtaaaactaaaagcaccataacaatcaagttatggtcttcaattttctatacaatttacaaaaaataaaaccattcttcctccttttgactaaccttcttaggccacactactacaactctttgccttacattctcttttacactattcacaacctgagccaggtttggctctttatcttgccacaaaaattcatttctcatttttcaaagattgtacactaaactagcaacacaagcagccattattttttttttcttaaatatgcttgctttagacctttggatccacctggttattcgaggtaaagaagcatcagctactctccaatgcatccaatctgcaatctcagagaaa

SEQ ID NO: 88418 - DNA, 681 bp, Cannabis sativa
aaaataactcaaaccacttataattaaaatagaaccgattttataacataatgaataaaagtttataacacagaataactaaaaccaattataattaattaagatagaatcagttctacaacataaaataaaagaaaataatacatattaactcaaaatgattataattaaaaaaaaaaaaagaacatcagtttctaaaacactaaaacaaaattttaaaaaaatagttccacatcaaatagagtaaaaatgaatagcacataataccgcataaattggttataattaaaaaaaaacatagatatcaatttcaaatatactaagacataaatttaaacaaaaccggttctataataaaataaataaaaataaattacacacaataactcaaaatataagatcaagaaaccggttatatttatcacctagttaaaatctaaaacaaagaaactggtttcgtaaaacaactaagataaaaatgtacacacaaaaaccagttaaataaaaaaataaatcaaaagcctatcttttgaattaactatatcaaaattcgtttcctaaacaactaaattaaaaactaattctttgaattaattaaatcaaaagctgatttttaaaataaataattcaagaaccagtttataaaatgactaaataattaaactgaaagaaaaaaatatt

SEQ ID NO: 88419 - DNA, 533 bp, Cannabis sativa
gttggcatcacgggagtcatgcaggtttaatttcattaagaattaatttataattcagctgtccaaaagtaaaagttcattaagaagtttgtttgctttttgttattttaaaatacatattaagattatgaaacacaatttaatatattgattgatgatagtgatcacaaaatggtttatcaaatattgagcaccatgtatacataattaatacattgctctaaatagcatgaatgacaaacccttctaatttgaacgtcttataagagcctccagacttgcatggcatgacattaggaataataacaaatcctaatcccctaaattgcttctacacaaaaccttgttccccccactggagctgacaacgtgcggcatcaatattcacatgtgtaccaaattttttccatgttatataatgtatgatgtatatatacattgtaaattgtatatatacaaaataggtgaaatatttgttggaaaaattctcattacaagagagaatagactacaatcaaaatactcaaaataca

SEQ ID NO: 88420 - DNA, 1167 bp, Cannabis sativa
gctttggtttctactaaggagcttctcaactcaaccaaccatggcagcaagatttatcaggtattaatattgtctcttttatagattttttgtttttcgttctgaacaaacaatcatagccaaatgcctgagcttttttgtgggatatttctgggtgatctctgaataacgagtaggttcaatggtggggacaaacggtggtgaggcgatgttacaaccgtttaggctgagcgcttcttctccaagctcattgagaaagaggttttcttttcgttctttcttaattagatccatacagactatttatggtttaatttgaaaattggtttacttactgagtgagtgagtcaggtaattctcattgtctaaggatttttttccccctcttctggtccacttttcagatccacaacaagaagaaaaaaatcattgagatgtgggctatgttagtgattttttgctttatgagattttcaatgcttatgctgagacttgatcaactttcatttatgtatcttgttgtagttaagaaccttattttaattatgttttcgtgacaattgtacaggcaatcaaggtgcttaatatgattaagctttacgggaagccaatccgtgtcaataaggtatttgttttatttttccctccaaaggttactcgggtcttttactttcgtatgaatgtgtagaaaattatgcaacattagtaaattgtatatgtattttgcattgttttaggcatcacaagataaaaagagcttggatgttggagctaacctcttcattagaaaccttgatcctgtaagttagttagacactatcagaaaaaatagattatatatcatcattggcatcctcgtttttaactatcagaaaaaatggattatatatcatcattggcatcatcgtttttaactgagtctgtattactaaatttctatgtatatatcatattctttttagtttttttcactaaatttgtattttttttttaaatctgtatctctcaacttttttcaaaattgacaactattaatccaaggatatggattttaacatgagattattctgacataaaaggtcaagggttgtgtactattttataggtgttcactttgaaaataccctttgttttaacaggaatagtcttgcattttgattttatttt

SEQ ID NO: 88421 - DNA, 1221 bp, Cannabis sativa
gaaccatggcttgtaacttcacaaggctcctcagtgctcgaaatgctcgtcttgcctaacaaattaaatgttaagcaacgacaccacatgagatgacattttatgtattacaacaaaataagcaagtcattattattattattattagtagtagaaattacaagatggcctcggaaatgtgcttggattttgatgacagccaaattgtgtcttgttagagttgacgagacaagttgagtagtttcttcatgggatgtgttggactttgaaatgttgttgttgttggagtaaacaacaatgatgttcctaggagattttgatgaccctttcacaaaatttcttctaattcttttgagccaattgtaactactacccatgattgatgagctttatgttttttatttttcaggtattaatggaggaaggaagcaaagatagtggtgaagtagaaggcaagatatgttgaagccatgttctgtttttctttttgggagagttaataagagttacatacatatacatacatagatatacatacatcatagttagtggtatgtcatactataacgtgatggcatgaaatttgaagaatgaagaaaaagggtatttgagtttggtagaaatgaaataaaataattagagaggcttttttcttttttgaaaataattagagagcttaaaatcaaacaaatctgtttatttatttcttcttcttgcagtaatttgggacaatatgatttaacaataataataatattagaaaaaataaacaaaaataaaaaattacaaaaatacgttaatactaagaaaaaaatataaaattggcactaaaagatttaatttgatgatgtattatatatatatgggatatgattttgttccgttattgtactttcacgaattgtaattcgtgatgtaaggcagccgtcaataaaggagttatttgatctgacggctgaaattgatctagggataattagggttaaaaagtagaaacgtaccgtgacactaatttaatgtaccctgagactcatctaatataccacggaacacattccgtgaaaatacattacgggacaaaatcatatccctataatattattagctaataaagtgtagatttcggaaacttttaggagcctagtaatgatgttctaccatttaatatccaaaaaattaaaagagtacaataaaatattaaggtaggattgtgtttttatt

SEQ ID NO: 88422 - DNA, 1386 bp, Cannabis sativa
  modified_base (360)..(362): a, c, t, g, unknown or other
  modified_base (865)..(866): a, c, t, g, unknown or other
aaaaacaacataaataaaaataaacattaagtaaaataataatttaataaacattaggtgtgattttttttgtcgaaaagatattaaattcgtagtcatgataaaattataccataaatgagttaattaggattattaatgtaaataattataaaatgggagatcttttaagtaaaagatattcatttagtaggatattttgagtgatatttcactacaaaaaaaaaaatcatttttagtgacaactttttaatcacaataaaatatttctgtgattaaatgtgacttttagtcacaacaaaaaaattacttgtgactaaacatagtatttagacacaaattatcactaatttagttttnnncacaacaaatattgtgactaaaaacacatttagtcgcaataaatttttatttttgtgacaaataccttttgccactgactttttagttacaacgtaagaatgataatttataattagttacaatttttttacttgtagtcacaagttttgttgtgactaaaagtaaaaaattgtgtagtgtttgatgtgaatcattagagtttttgcactgattgatgtagattttacactaaattagtgtaagcattaaagatggtctaaatattttagacttagacttttattttacttggaagactttgagatttaactttatttgtatgcttttttattttgtaaatctactagtcttgtaaaaaaaacaacaatgaagaaggctaaataaactactatggatgggaaaaatatcaatactgaaattaaaattaattgtgtggatgaacatacaatatagctatatgtacttattattctatatcacacaatatatatatatatatatnnatatatatttatatatatactttttgacttgacttggatcttaatccttcaatgaatgacttctattttctataccacacatgtagggcaaaagttaattacaaattttctatcccaaaacataattaagttaagttgaccaattaatactttagagtttcacgattttttgtggaattaattaattaggtgggatctataaactgatgggtttaggctacatatgatcagttttaataattatattaaattaatattctacaataattttaaataggatcattaataatgacagttaaatttaatcagtataaacatatgtacttaaaaattaataaagtataggaccctaaataaaattttcgtttcttttaaataaatattttaaatttgatgtatgtataattgtaagagggtcttaaaatatccaaaccctaaataaaattatcatttcttaaaaaaagtataaattagtaaaaaataagaaaaacagtagtgggaccaaactaaagaaaagtca

SEQ ID NO: 88423 - DNA, 615 bp, Cannabis sativa
ttcaattattttgttgatgcgtgtctatttttccttatacatgtggtaagtaacagttaaaattttattgtcggtattgtaaaatatttagattttttttttgaaaacgtacgcgtttataaaaaaaataaactaaaaatttttgttggatgaaacaaataataggtgtaccaaaatgatcttttaagggggtgcaatataaatttttcagaaacttttatggttggcccctctagtatttaagtgttggtttcgcccctgccgacgacccacgaccttccctctctctctagttctctctggtgcgtagctgacgactcacgaccaccaccgccgaacgaattgacgaacgatttgtggttttttttttgggttaaaaatcaaatttttgtgaaatttattttttctgtgatttttgtatatggtccgctaggatacgatgttaagtacgatagtagtgtaatctgtaggttagagaagaaggtctgatagtggtccaatggtggtacaatgattgataaatgcatgatatataattcgatagtgatccgatagtggtctgataatagtccgatagtgtacttaaaattcatgtcatagaagaaagagagaaga

SEQ ID NO: 88424 - DNA, 927 bp, Cannabis sativa
atgtaactccccacctggtgtgccacccatagatatataatgactatgatcctcgatgtcttctcttgtaaacattttctccttgactttactgtaacttgtcgaataagaaaatggatcgctaaatccagtctcattagtcctctagcatcactaggaccaccagcatcattggtcttctaacattattaggacttgtactgtcagtggtttctctagcattactagttttgcctggacgactactactagtaccaggtgtttgaggattttctctacggggcattcactttcgtgtcggtggcctgagtggtatttagtacgatagtatagtcaagttcaaagctacaacaacagaaacctctgtaccttggtcatctcttacgtcatcattgccctcaacataacattcagggtctggatcataaaaaaaaccatcaatgaagggcatttgtgctacaatatcagcactcgacatcatagtgtctaatccaggtaatacatcggcaaccaacacctctgaatttgtttctggaacaaaactcccaacatcgctacgagtgtccttaacaaaacttagtgtgggactaggatcgacacaaacattcttctttaacaaagttacaaaggagtaaattcatctggcttcttcgcaagtgtagacaaaaagaaccttgcatgcttatcatttccaataacttctaggcgatacattaagtctttcattgtaatttacttcaaatgtcatactgcactttgtcaacatccaattcttcatccaatttaaccgccaccacgacctgttttctaatttatcttatatataatataggaataattacatagaaaatataaattgacattttatttacaaaaatacctctataaggtaaagtcaacatttataccttttatgtaattttaatt

SEQ ID NO: 88425 - DNA, 869 bp, Cannabis sativa
gtgggtcccgcagacacgatcactcaagtttcgaaatttcatgaccgatctccaaagtcaattttcctgttagatcatcatatacagtaaaaaatagcctatatgtatttttctatatttttttagattattttattgctatgttaataggatatccttccctataaaaggagagatccacaagctcgttttttatgttcggaaaagtaggcataaggtcagaatatctctctctagattttttctacaaattagagcatcaagacttaactattttttttatatttcatcccggccgtaagaaataatactcgaattgctgttacgatacaaaaagtgaattactacaaattattgtgtttctcttatttatactaaactcatgataaattcttgataatcgaataagcggatgtaacttagatatctgtgttcaaatttatgagtcaacaaacataagattataaaagttaatataaaatagtagtttaaaactatatgatataaataaaataaaaaaagaaactatacacataaatggtcaactatgaaaataatttttcttattttatttgataaatctcgatgtcgaagttattatatcatgaatggtcacctatagtttagtttaacgtcactctaatcgatcgatctagaacattttttagtatttgcagctatttcatgttgtttgattcatcttctttttattatagtacatctctctccatatataaatatgtatgtaaactagctagtactgtgaaattaaaaattctttgttcacagattttttttttttttttctaaaaacaaaaagcattctcattttcgaaaaatagagttaaagcaattaggcaaaggcagaa

SEQ ID NO: 88426 - DNA, 537 bp, Cannabis sativa
  modified_base (100)..(110): a, c, t, g, unknown or other
tatctcacttgttgtcttattgtatctcactttttcatcaccgtatctcagccgttgtcatcactgtatcgtattccttgtcattaccgtagttcacttnnnnnnnnnnntattgtatttcccaaatttatatcttaatcttaaatttcatctcgagttttaaatatttttttatatttttaagatgtacattaaagaaaattcattagtttgttcttttattattaattaatatgttttgaaaaagtgattattattttttaaatatcttaattaaaaaaaaacagaagaaaaaaaataaaaaatgtgatatttagttatgagaaatgctaaaaggcaaccctccttgctggtatcatgttagagagtcctacattgctaatgtgtggaaagataatgtaatatataagaggaacgggctactcctcccatagtcaattagttttgagatggaacctcattcatcttattcctaaattctaacatatcgtaccactattgtataacttaaaaaaaaaaaagatttagggaatatcg

SEQ ID NO: 88427 - DNA, 1125 bp, Cannabis sativa
ggcagaaagcaccgggtctagatggtttcaacaaccatttctttcaagataattggaacattgtgggaagtgatttatccaaagttgtactatctttatttaacacagggaagctactcaaggagatcaatgctaccacaataataatgattccaaagtctaactgtcctgaaaatgtaagtgatgtcagacctatctcttgttgtaatgtagtttataaaattgaaacaaagatgatatgttttcgcttaagggatattcttcccctatcattgcgtaaaatcagagaggctttgtacaagggagatttattgcctacaacattctaatatgccaagatctagttcggcattacgagaggaaaaatgccaacgcaaactgcatgttgtaactagatttgaggaaagcatacgacataatagagtgggactttcttgaggagatgttacaagcttttgacttctcgaaaagcttcatcaaactaatcatggtatgtattcgcactcaaagatttagcattcctcttaatggatctttacatggctttttttaagtaaagaggagtctaagacaaggagatcctttgtcccctctcttatttgtttcgggtatggaatacctttcccgtatcatggttaagattgggaagaagaatgatttcagtttcatgaaggatgcaaggatcttcaattgaatcatttgagcttcgtagatgatgtgtaactcttttgtcatggggattttaaatccatctatttcttacttcaaggtctcaagttgtttgccaacatctctggacttcaaccaaatgattctaaataaactttttactttagcgggatggatgattttgaaattcaaagagttttaaatgctttgggttttgtaaggagcaagctgccatttagatatcttggcattcccattgctgccaggagactttcaagtgctaaaactaaaattttggtagaaaagatgacgaatagaatcagcattggagctcaagaaacatctcatttgcgggtagagttaccttgattaattctgtattgatttctattcacacatattgggcacggatcatgattctatctaaacaacacttgaaaagagttaatgccatgt

SEQ ID NO: 88428 - DNA, 1330 bp, Cannabis sativa
ctacataatttaatgaaaaaataactaaaataaaataaagatatagtaaaaaatccatattataatataaaacaattcataaatataaagacttgaaatacttatctgtcaaaactgaaaggtcgttgatgtagaagccaagagcacaaaatagggtagttttgtggtacagtcaatgggtcaaaactcatttgaacacttggaataatagagctttttctaaaactagaaaggaagtgcttcttaaagctattgttcaagatataccttcctatgttatgtcatgttttaggattttagttgctatttgttctttttttttctttttgaatggaaaatgcaaattttattaaccatcaatctcacctatcaagcaaggtagcaaattagttggaacatcctcccatcagaagcgacaaccaaagtatacataaaatctcgagtaaaattatgagtcactatattatttgatcgcttaataaaaaaatagaaatatttctcaaagcaataagtaaaaacttacaatcattaataacctcaccaaagaaagagatcatcgtaacagaactcttcaaagcttgaatcacagtcagacaatcggtttctagtaccacattttgccatgaatatttcttatccaattgagcgccctaagaaccccatagcttcagctagttatggagtaacagaaacattgtaagagttggtacaactgtcaatctgaaagcctctctcatcacaggctactatcccaattccatatttcctcccatcctcaaagaaagcagtgccgacattgaccttaaattcaatatttgttctaagattgtgttgattttatagtactacatcaggtacacgacggaataaaagtttttgattatcatcgtaccatatcttctggatcactatatgtatatgtattatatctaaaaaaaaaagaataaacaaaaaagataatttactttttgaagtctatcagggtatcctcgagtcttttcgtatgttgtatcattagttgatctcgaaatactcacacggtagtcttccagatctttcaccacatacaaggactagtgtgggctagtaggataaaatagacataaagttcttgttaaattctcaacaaatgagcagaactattctatatgatgatggagagaaaagattaattaaattaatccttaagcttaccaaagataatacgtatcagtttttagtttatatggtatatttaaattaaaagtaataaaggtttttatcaaattaattatttaaaggggaactaccccatatactattttttttaacttttttttttttcaaattt

SEQ ID NO: 88429 - DNA, 659 bp, Cannabis sativa
tatttgtttatcatcaaaataaatgagtgattgacttttggtcaacaccaagtacttctgtacagccagctgtacaggctagcttttccaggttcagggctgtatagaccagatacagtgccgctcccaaacaaaagaaccaaaaagtaaaagctctagagtccaacataacccactcaagaagcaaatgagtacaaagggtccaaatcagagtgagtctgcgaagaaaggtaaaactcaagaattgaggtacattgagtacacacgtctcatagatactcgggagaatgtatataaggcaacctgtaacatggcacattacatgaagcctccactaatgtacatggtcagaaaacatttatcgtatcagagctatggctttgaatcgaccacaacctccataaaatgttgaaccaactgctccactacaagctcaagaagctgctcgaccacaagctcaagaagcttccttaccaaacaaaaatctactccctttcaatctgcgactcaatcgatcaaatttcactttgtggagatctcttatgctagcttttgtccgtgcttacaatctaattggctatcttcttggcacaattcctcaacctgttggaaattattttaccaggatcttagagctactcacaagtatgttgatttaa

SEQ ID NO: 88430 - DNA, 709 bp, Cannabis sativa
ggattttgattgatgagttaaagacctcatttgaaattttgaggttaaagacctcacttgaaatttttgaggtgaatggcctccttcagaatttttgttgattggttattgtatttaatcttggcaattagatttctcatgtattattagagaagaattaatttgaacgtagttcataaatttaatatcttattatggtgtattctttggagacagtttattttggaggaaaatttatttttaattttatttagataaatttagagataacttgaattataattttattttaacaagaattacaaaataactcaaatttacttagactttgtgtctttagaaatgtattttcaaattagtaggatttaagagaaatttgtttggacaaaatatgcgtcattttgctctattttcacatatatgtcatttgttaaatatattttcgccatcaaatatttgtgattttgcttcgtgaccaattagacgtatgcaagacatagattcggtaatagattatatagagagacttggaatatattttaaaaaatagatatttatggattcaatgtgaaaattattatggattaaattataaattttttttgaaaaatcctaacataaaaatgtattgttcaagaatttatagttctttattttttctttattttttctttatttacaatctatttaattaaaaaaagtaatcaaa

SEQ ID NO: 88431 - DNA, 1835 bp, Cannabis sativa
  modified_base (39)..(39): a, c, t, g, unknown or other
  modified_base (125)..(132): a, c, t, g, unknown or other
  modified_base (1805)..(1806): a, c, t, g, unknown or other
aaatattacttgatcgagttagcttacgttgcaaaaaantatttattacatagagataaaagaattaaaattaatgttgtgtcaaaatttaattaactttttttttaatttttattaaaagaaannnnnnnntttcaaatttcgccctaggcctctcatcactttgagacggccctgggtagagagggagaggttgatgtgttggatgatgttgttgtatgtgtgactgaggtattgaaaaatgactcatcaggaataggaggtgggtgtgtggtcttttgaggtgtagttgtgtttggtggtggtggaatagggaagacacctgactataatattggtggaagtattgagacagacaataagtatcataagggaaactagtttcattaaactatattgtccttgctatatagatacgacctgaagggtgtaggtatttgtagcccttatggtaggggttataaccaagaaatatgcagtgagttgttctaaaggcaagcttatttggttggtaaggtcttaacagagggtagcatgaacagtcaaatgttcggagaaagaaatagtaaggtttttggtgaaagagcacctcaaaggggtttttgaattgaagcacaggagttggtagtcgattaactatgtaggcagcaatggtgaatgcatcccaccagtgtgacaatggtatgttttcttgtgccaaaagagacagtcccatgtccatatataacatgtcgatgatttctctcaggttgaccttgttgctgatgtgtgtgaggacagggataacgaaagttaattccaagagggtcaatgattgatttcaatggcctatattctccactccaatttgattggatttcttttatttttgtattaaaatgtagtgcaacataagttttaaactgataaaaactagcagtaacttcagatttgactttcataggatatagccaagtgaatttagaaaaatcatttaactttgaggctgagcattatttaggacacttcttaagatccttggagaagcatgtccaagtctatgatgcaaaatttgagcttcagcgaatgttccaggactgttgttctttatgcaactaaaagcagcaagggtggtacgcaatcttttattgtaagtagtagaaggtgggaccctagcttgtgagagatccagatgataaagaccatgtttaagagagccttgaagaagtacttggcccgtagtcttgtccttgataagacatgtataagaataaaaagtaaaattatgttattatctgtgggtctgtgtgttcgacgataagaattttgggttgggattcaacgccggagagtgagagaaagattttttttttttttttaatgtaaggctatttttgaaggaaaagatattaaaaatatagatattctagttctattagaataagcatactaagccaaattatcttcataaagtcactaaataattatctaaaatgattcaaaataatataaataaaaacactacttaatcaaaatattacaataccgcacaaatacaagctaaatgataagaatatctagtccaaatacaacatagtgttagaattagatctagaaataatatacatagatcttaaacttatgtcagattaccaatattattttagaaattaataagatggagaatataccagattccatgctattgaatagaaataagaaaataaaaatggatgatgggtctatcgttttccacatactaaattttacaaatgcacaaaaaacaacaaaaaaaaaaaaataacaaaaatacggtttcacggaannttaaacatttttacgatttttttaatttt

SEQ ID NO: 88432 - DNA, 518 bp, Cannabis sativa
tgcaacaagtgctagaaagactttgagagtgttggacttggaaactggggaatatgtttgggagtagtcaatgccatgtctttgagtgtaagctttggctacaagatgagctttgaagcgttcaacaaccccacttttattgtatttgatgacttcgtaaacccatttgcaaccaattgtcttgtggcctagaggtaacttggtgataatccaagttttgttttttcttttgagagcttgagtctctttgtccatggcaagaagccagtgtgtaaactgagctgcctcatcataattttaaggttcagtctcagagtatgcatgctaagacaacaactctgaattggggatggagctttatgtatgagaaaaagggctctatggcactactacaaaaatagtttttcccgacatttttaaacagccatctaaagtattcccgtcagtttctataaccgttgcctatacgaccatcgtaaaacgggcagaataggcaacggttcaaaactatcgctaat

SEQ ID NO: 88433 - DNA, 512 bp, Cannabis sativa
acaaaataaataatttagcattttcttttttttgataaatcaaagattcgttagattataaacaaaaccttacaagagtagtatagttcacctttttagttatatttcatatttacaaagttacaatccactcttcatctattcaattgacattcttaagctttaaactatgaatcctacttttgacttcatgaattatattctaaccaaccccttccacccgcctgacttggtgtagccaaagtgctttatttcttatcttccaaattaacttgatacactaaagtagcaactagagtgggattgaactctccacccaagctgcttcttaatttcacacacagacattttgtaactaaatgggcaatcaaagaatatatgctcaatgtgttccacatcatgaccacatagtaaggaattgctagcaacaacaatgttatgcttaaaaaaagactttatttgatttttaatctattcaacacaaccagccacaaaataatactatgctttgg

SEQ ID NO: 88434 - DNA, 598 bp, Cannabis sativa
cattatagaactctttatccatcccctgacagtgttggaggtggcaattcggggaccatggacctataattctaagctctaataaactagattataattctaagctctatattcctctattgttgaagatcgaataaaactttgccaaagagcaattcctcccagggattagtcaccacaaaaacggtgatgaacctcgttaaatcttgtctctatttcatttagtttatttcgatttattccgcatttcatataattgttcatatatgtttcatattatttatataaatttctaacaatatcgtgttttttgtgcttcgtacttcgtgccatttcatgctaatctgtataattgtgtggttttatgttcaagtcaatattttttcatgtctacttgtactcgtgttaatttcgtgtcgtgttaaaatttgagctcgtaattataatattaatacctaatataaaattataaacctatcttaagaagggccccaccaaattctagggtgagggagatttataagaaaaaaaaattaagtagaggatttttgagggttagaggtcgacatttgatgatatgagatatttgggcaatgac

SEQ ID NO: 88435 - DNA, 532 bp, Cannabis sativa
  modified_base (105)..(109): a, c, t, g, unknown or other
cagaattttaactgcaaaaccacgattaaaaccggtgttcatattttatttttctatagcttttattatttctgtgttgaattattattgtgaggctcaaatttnnnnnacgaaaatctgcgttaacacatacatacctagatagatctgcaaataaaaatttattttccatccttagggttaattttctaataaatattaagaaaattacttaatttaagtttgtccaaaattaattaattaatttttgactcaaatttaatttttcataaacaaatatctaaattaaattttaaatccaatgtattaaaaacatacatttttgaattcattaaaataaaataaaataaatctaaaaattattctaatttatattgatctaaaattaataaagaaattacttttcaacatgaatataatttttttatttaaataaatatcttaagaaaaatatcaaatatttaagtttcttgaataaaattaacttaaatattaattttctatataattaaatatatttagaaaaatacca

SEQ ID NO: 88436 - DNA, 2625 bp, Cannabis sativa
tgagggatcccagtcataggatatatcaaagaaatgcttgttgaacttgatttcactaaaatataaaagatgtcactccaacatctgaacgcagttatttcaacataaaccaatgtaaggtctacatttgcccaaattattaactaataaactgaaaatgtaaatttataagaatctctaatctaacactatctgaccaagaaaaaactgcaaaatgaatgcatgtaaaaattaaaaacataacccaataccttaactgccatacatattaaaaacataataatcaatactttatttgaaatatatgtgaggatctgctacctgatgcgtttctgcaaaatctcagtaaagaaactacaaggcacaattgaggaaaacaatcctgacctcagcccttacatgtcaccagccaactcagctatttcttgttcctcctcacataagtatatttgaccaacgacctatcactatcctcccttaaaagaagtacaactaaggaatacaggagcataaagacaaatctacactaatacgatagcttttggaatgtaagatgtggcttgcatttggtggcaatgtatatacaccaactttggttaacacccaccctggttttgtataaattgcaactgtgaatgtaagatatggtttgtctttggtggtaacagacctacactatcaaatattgctactaaaaacctaccctgtttttgtacaaattgcaactttaactctctgatatggaaccacagaaacacattacccattatatgaattcagttcttctactttagtgtaagtttatggttctgatgttcccttgcattaaatgatctgtctaaggatacatacaagtattatagtgtcccaaatttgtgttgcataatttgatcatcttattaaatacaagaaaggtaccataattcatggagacaaagcaagtgacagttgttggttaaaaatacatataaactttctttcactattgttccacataaagcacatacacaaccaatgaagctattgagaattgtatccagctcaagggactcagctaaaaggctctgcctaaatcaacttacaatacaccacaggtatatacactacttatctttgcaactactctataacatacaacaatgactgatatattataaaactgcacaataatagataattctcaaaactttagactacttacagaaagacatatctcttaatcatctcaaaagtagatggatcttttgcttggcaactgaaaaatccatcaccatgtaagcttactttggaaattccataagtgtaccaacagtcataagtttcattcacctaatcacaaaaagtgaaaaaagacaaccatcttagaatttaccaaaaacttaagaatgcaaggaaaaataacactagcaaaagataagtatagtatgactgataaaattgaaccttgaatttagctttgttcaaccatgcagcgccaaaattaggcctgcagtttaaaggaagggcctcatttggagcttctgcaaatgccagtcgagcaacacctgaagacaggtctctatattccacctgcaataaaacaaaataatttagtaaaaagcacaaaataaaatgccagaataacatataaaacccacaatcacacataagaaagatgagaatatatattctaatgcttcccatgagctttccattatatataaactgcacaatggataaccaagcaaccaacctacaaagataatataacaaaaacaacccacacaatggaaatcctttgttgtaatggactcagaggaaaattcacatataactctaggagttcctcatgctaagagaggtatggattgagactatagtacaaaccttaaatattgacgcccaatagtagtcataacgacagcgaaatttacttttctcaaaaggataaaacacatgcttggctttgtagttgaacagtccaagttcacagaccttggatgatctgagatccacacctatgaaagggaggcaaagcaaaaggttatatcttaacaagaagaaagaagttaatgtttaaacaaaaaataaagtactaaaagattaaacagaaggagatagataacaacttttatacgtgtaggctatgttttataagctaattccctgaaacttatatctcattttgttgtagttaatgaccaaaacatttcagttgtccatagccccaaacgaaggactgttgggcagaaaaggcaatagcaccaatagaatcaatgagtaacaccacattcataggctgtccatatgtaaatatttatcaatatacttaatcacccaattgcaaaggacaacaagaacaattttccgcaggctgaagcacactgagagtaggtcactcatataaaaataagaacaagaaacgaaagagatacaattacaagagttgagtttattggaagaaaaggcaattaacaaaaatatatgttccaatgggcaaatgatggggatgccaactctaaattgttgcttagacttattcatgccagaatgtccaagaattttatttcaaagttggggaagaaggtggatctactggttacggagaagacaattaaaaaattattttattatacaatgatttca

SEQ ID NO: 88437 - DNA, 827 bp, Cannabis sativa
tgttgttgtggtggttatgtctgtgattgtcaaagatggaggcctcatacttttgttttggtattgacagtataaaagaaaaaaaaagagggggacagtataaatgttaattctgccgtgtggcagtaaaattgaaaagtattaccctaaattcagtatttttgtaaaatgcccttagaaaaggagaaatttgagttgggataagttgaaaattattatatttattacactttaactaaatataactctaaaataattttaatagataaataccatctttaataattaaagtactaagtataacctcaataacttattcaagttagaatccataacatacataataagaaaatgattgataaaactaggtataaattaaaaaataataaaataaagataagaattaaaataaaaaataagtagaaagtttaatttcctcgtttgagtttctatacataataggaaactatatttagaaaaaaaaaaatccctaaattttacactatatcagaactatctttttttttttctcgtaataccaaaaatattctttccattctgtccatctccctttctttctttctcttacacaatatccttgacgccccaatccctctaaaacaaccaccatcccacatcttaggcaacagtcacctccgttggtgctattcaactccaacgtcagcccagcgccctgcagcccattctccctctcgatctatttattatcggttaccccgcggtcttcatcaccgtctttatgagtatattctttagttacaatatatatatataagatcggaagagcgtcgtgtagggaaagagtg

SEQ ID NO: 88438 - DNA, 557 bp, Cannabis sativa
ggggaaccacctgcacgaagcaatcaaatttggattcaaggcctccaacaatgaagcagaatatgaagccctcatagctggactaaaacttgcttgggaaatgcacggcaagtacattaaggtctgtagtgatttacagttggtagtgaatcatgttttgagagagtaagcagctcgaagagagaaaatgattgcctacctaagaaagatacaagacctgctcctacaatttaagggttacacccccaggaagatttcaagagaagaaattgctactgctgatgccctagcacgactttcgagcagcacagtaacggataaggccaacgaataagacctgctcctatcctgttcctcgaagagcctagcatcactggcacgaaagagatcgaagtgattgacacttccccaaactggattacatcgatagtcgcctacctcaacataggggaactcctagataatcgaaatgaagctcaaaagatgagaaggaaggcagcacagtatatcattatagagggaattatgtacagacgaggattctccatgtcgttgct

SEQ ID NO: 88439 - DNA, 507 bp, Cannabis sativa
ttcaaactttacaaaccattccaatatattctacatgtttccggatcccataaaaattttcacaaagtattacaagtcacttttcaacatgtcatcctaagtgacaaaacccagaatagaaaaaaaaaatcagctggtagacccaacccgggtggtatagtgtggcccgaacatgtacaatccatcgccaatccctcgaactcatggctgatcacaaactgattaaccctttcctgtacagtagatcacccatgaacaaagcctagcaagacaatagaaataaaaatatgcaatatatattcttactcaaataaatactgatgccatcacatctactgtctatttagcatagacctatgtgttgcgctcacatgtctatttacattacggccttagattggtttatctcaattttgattaccgagtctaacctaattatgctttacctgcataattctttatttcaacatatatagcatggcgttgcattcaagatcatttaaacac

SEQ ID NO: 88440 - DNA, 577 bp, Cannabis sativa
aaacatatcttgggctaacatattggttctcccatgagccttttatttataatctttggtatagattttgcctaaaaatctctttttgtactgtctaaagaacataactctttgttaaaatcaattaataaaaataagtaaacgtagtcccattaccatcacgacatggggtgaactactataaatccatggtgtcttgttctattagcctaatctcaatctctttcattttttgtacttctcctccatttcttccttttcttattcttcatcctcttgagtttctttgaataatggctgccaagaattgtcttccaccctaaatggtgtaatggaggctaggttatattctcccccttttccacaaaaatatcttttataaaaatcaatttcacatgtgccttaggaattttctagagactttctcacaaatcagccacaatctacatgtattcatgccacctcagccattttttgccacatcaattaatgaattgccacgtcatcttttttctacattaatttcaacattcagtccctcctacttttgcagtaaaatccctacaaaacttcagca

SEQ ID NO: 88441 - DNA, 848 bp, Cannabis sativa
gcctaatcatgtgcggcctccaataatgacttacagatgtccatctacttgtggtggtagtaaatcttgattattatcggcccttttattttgatcgaccttgacatatttttgcacgtgcgaattattctttcttatcagaaattcaatttcccgcttcaaattgttgcattcgctggtgtcatggccataattcccatgaaaacggcagaactttgtcatgtctcacttgcttacgtcttctttcatgggtgtgggcttcttgtacggagctaatgactgagtagaaatgtagatagtttctaaatcttctctcaagacagagaaagcagtaaactttgtaggattttccctggggtcctcttcggtttttccgacgaactttcccttttttccattgccttgcctattgttattgttggaccgtttaccactcgagcttgaacttcttgggtactgagggagctggatggatgctctagcagagggagccttttgttggctaggcttatgctcgacttctgctcactgaatggcttcttcaagcttaatgaagccatccgcacgatcaaggaagtcactcatagaatctattggtctgtttttctgatatccttccaaagttctccaagaacttcaatgcccccagtatcgcagaaaatttcttgtcttcggtcaaccattcaaccttagttgcttccgtcatgaatctactgatgtaagctcagagaggttctcctggtctttgcttaactttgaccaggtcttccaagtgcaatgaaagttgacgtgaagaagagaattgtgcatgaaattttgaggagaaagccttccaagagttaaacctt

SEQ ID NO: 88442 - DNA, 1059 bp, Cannabis sativa
ccccctcactttaaatcctgggtccgccattgtttagagatacaagaagtttacgacaatcttttataataacccaaaaaaagcataggtaatttttgaatagcttagactgctaccaagcaatctaactccagttctacttttttctatggttgagttttaatccagcttagcgcttccttcataccaattgcttcagccaaatttggagcgcctataccagcaaaactgcccgacttagccaacactaattccccttgagagtctcaagtgactatgccataaccaaatgcaactcatagcagcatcgatagttaccttgattgtactctcctgcagcttaacccaaaatttagctctatcaccagcttcaaaaattaaaaaagaagcctctgaacctctattttaagctaacttccattgcacaagacaactcgtagatgagataagagcaccatatatccaccgtagcatacttttggttccaaactaactcatttcgagccttccataatcccgaacacaacataacaacttgtccttattgcacttttgcaaaatttgatcatgttagaaccttattttaccagggtctagatttactaatatgtatgttgattataattctataatctaacatcctaaatatgaaattcctaaaaacgataaataaacacattcaagattaagtaatccttatagtgatggcagcagaataacatggctcattccgttcagatttctaacctttgatcctttctgttgcagagtatgatcaagatctgaacctaaatcttctattccttcgattgtgttcaatacagtcttccacaaagatccgagtatcagcttgaatagagtgggctaatactcaaacaacttcggagcaaagttttgagagagatattgtatagtgtatttcaaaaataataaagaaagagagaaggagagttttctgacattggaaacttaggttaattctctcttatcattactttctttatataggcttcacttaggactaggttagatgagattgagctaaaaatagagacttgg

SEQ ID NO: 88443 - DNA, 764 bp, Cannabis sativa
tggggacctcttgatgccaaaggcttctattcctaaccttccatattgcatatacacacataaagtcgactaggatatagacctcccttctgatccggcgaatccaattcatgaagacccattaaaattggtattgataagtcccaataccaatccagccaagtagttcttgcatacataatctgctatatatacaactaaaaaataaatgttcatgtgtctcttcttcttactactcataaatcaaacagttttctcctatagagctgccttgcttccccaatctattaattagtagttttcaatcttttccaagcagccatgccattcacactatgtgtaaagtcttttttggtaaggtaagttagatgccaaaatattttttatttatggtgaaatttctttgtgatatcaatccgatgttatcacctttattattcggttttattgctcttttctatcttaggaaagattgatttttcagttggattttttcttgtatggaaactgatgtgatcaatgcatgatcaattacctctcaaacaacacaatataaagaacttgatcaagaacagaactaaagtaatcgatattacacaaaaaaaaaacaactgtgaactaaaagcaataaactagtaacataaaccagtaatgagaactaaagatcagcaataataggcaaacaattaatagcaatagaagtagagaaagagatcaaacacaatgaatttacgaggttcgaacaagtgattgttaatcacttg

SEQ ID NO: 88444 - DNA, 588 bp, Cannabis sativa
aaataagatatttttaagtgaggtagaagtttttatattcttaaagaattacaccatgttctaatacaagatgctatagtctcaatccaacatttttggtggctctaaaatagataacgtgtgtcctcctttttatgaaaagcactccaaaaatatataagataaaatagaaagtaaaaattatatttatttatcattatgaaattctctccagcttcacactaaatctctctttcgatgttgcatctttgctagaattccccatatagatagtaatctgtcatactatttacaaaaagtacttatgggcagccaatagaagaggacacaccattttggtgaaattttacaactctccactccacctatcacattgaattaaaatagctctagcaccatagtgattaaaaactacacaaagttgattgataataacctttagagaaaggttaacaataagaacatatgaatgttagacttaacaacaagccttttctttcaagtctttacctgatatggtgaactatcagggaactatggtggcgtttggttagaggtaatgaaatagaatggaatgaaaaggaaaca

SEQ ID NO: 88445 - DNA, 715 bp, Cannabis sativa
atgtaaacgaaacagtactttggagggttttcccaccaaaatatgaggttggatggtttcttgcaagtaaattgatagttgagggggttttgccgcaaattactcttctttaattgggtgtagattagtttttccttcgatacaatacttgaacatgaagcgcttaagttctattgagagcataaatatcttatcggtaaaaaaaattaataaagactagtgaatatgtaattagagagacatttaagctctaattatgaataagtagttaaggtcatattaggaacagttggttactttgttagttatgttggttgttaggttcagttagcttctaattgtcactagttggttagattggtttaagtatttgttactgctacttgtatgtatgatcatgtaacttttacttaatcaatcaaaacatttctttttctctttcttttctgtttgtcttagcttctctttctctttttgttctttcttcttcttcttctgttcttcattgccaaagagatccaacatctccaacatggtatcagagctctgatcttggtattgatgacgaatatggcaaccactgatcctggtagctcaaatttcaatcaacacaataaggagctctgtttgcagcttcaagaaatcgaatcagggaccaagaagatgctactgtctacttcaatcatacaatcccgatcaaacttaatgatcacaa

SEQ ID NO: 88446 - DNA, 1269 bp, Cannabis sativa
catgtgtttcatgaaaatattcacatgatctgcaggacctgaccatatcatttgacccttttttgcactactagaaaaagaaaatttcttctgttaaaaatagttgggtatagtattattgttggtctctatgatcaacgcccattcgaatgtcgtaaaattagaataggcgtcagtagaaaatcgtcatgtatgcctatgtctcgactatttaaaactgtaactgatggtttagaacaatcataaaaaaagctggtctggttcgatctacaactctgaccaattgtgatcccgaactccgacgcaaacttggccttttgcgagcccccaacataaaacaaccaaagatttgtagattaaaaaaactcgaaggtttagtgaacaaagagagaacccgagatctacatagaaaataaaaatggagaaaaaaaaaagatggatctaaaaaatagaaaagaataagaagatgaagagagaaggagaggaggtggatcttagagaagatgacctctctcttgacccatttggggttgttggtcgtcaaaaatgggtcaagagagaggtcaatcttagagaagatggttttttcctgtaattaatcaaacaaagcatctatccttggcaaaggatatttgttctttattgtaaacttgttcaattctcaatgatcaatgcgcatacgtaatgactcgtccttcttgttgacaaacaaaactagtgcaccccaaggaaaggtactcggcctcgtaaatcgcagatcaagtaggttctgcaattggactttcaattccttcaattctttagggtcattctatacgggcccttagaaattggctcaacccttggtactaattcaatttcgaagtcaatctctctctttggtggtgatcctggcaattcttctgggaatatatctagaaattcacatactacactcgaaccttttttcggtcccttaagtatatctttcatggtatccaacacactagccaggtttcccatacatccttctcgcaataactctctagtcctaagtgtcaatatcattggaatctgagatccctaaaacctttttcaaaaaaaaaaaaaaaaaaaacaaatggggtcttaccctctggttcaaaagtcaccatcttcctcttacaatctatggtagtattgtacttagtcaaccaatccatccccaagattgcatcaaaatcttttaagtctaattcaatcagatccactgacaattctctcccttctactaacactgggagagacctt

SEQ ID NO: 88447 - DNA, 531 bp, Cannabis sativa
aaaattgcctcttcataacttgtgggctctttaatttcagtttgttgaacaactggcagtgcaaatgctattatgtctgctttcacaaatcttactagaggataaatcatttttcgagttctatcacgagccaactgataaccttctagacctatctgtccgaaccctttcgacacttctgttgggtctttgttatcttgttctttcggctccaaaatggcttccatctgcggattgtcttccagtttcacactatcttctgcctgtgaaccttattctgagagcttagtttcgtagtccacttctacgcttgcggtgtctttgtttcctattttccctgtaacacacagagacacactacctttcttggaggtcaagtgagcatattctaactcattaaaaacaacattaatagcaataataacttttggtttacccttcttagaaaaatagattctataccccttggttcctaaggcataacctagaaaaattctattcacggagctaggttccagcttgtcaatagat

SEQ ID NO: 88448 - DNA, 949 bp, Cannabis sativa
acctcaacaacactctgaacctcgcatcgagcaacaagatgcatgttctcatcaagcttccaccttctgtatctgtaagccaccgaagctacctcctctccttcattagcaaaaggattaggctcatcaaaggtgaccttattaccgtccctaaccaagacttgctgagagaaattctggttgatataagcagcctcaacactcaaagaataggcagaattgatatcatccttagcctcgggcaaaggctcctgagaggtctcgtgaacagaaagcaaatcaagctgcgacccatctcttttatcgaagaataacttgttcccaactcgctggatcacaatatcccatgaatacacagacctaggcgcgcacataagagaggacagaatagtgtcagtagcaaagactgtggctttatcttcattagcaagccttcggataattgggtcatcagtggttgtgactttgaagaaattcctgttcttgaacctctcaagacggcgctcgttcttcggagcagtacgatcgaacgaccggtcatagaattctaggccgccacagagaagaaggtcctctggctcgggaacagtgaaggagagcttggagaaagttgagaagggaatctgctcgagcatattccactccggctgaatatccacagacgatttgaacacagccgcctcacgcctaaactggttgacattggacctgttattgttgtagtgacggtcacggcgtgcacgctccttctcggcctctctcttccgtgcctcgacctcctcgtcgcgtcgctgagggagctgccgttgctgctggtacctccacttgggtccgaatttggggcgcggaggaggcttcccgtcgaccaatctgaaggaagcgtcgtcgtcggcgtaaccggggaaggaatcgtcgttggagaaacaaaaggctgaatcggagggttgat

SEQ ID NO: 88449 - DNA, 1088 bp, Cannabis sativa
tatcaaaacaaggggaagtattcattgaaaaagataacaaagcacggtaaaccaagaattaaaggctgcccgatcagctagttgtctgaaaatgaaatgaaatataacccaagtttaaaaactgcttggccagttatttttgtctataataaaggcccatgggccgaacaaataaaaaaaaaagagaaaaatatttcaaacggcagggatcctgggctcctggtacgggttagctcggtctaaaggggtcggaggctcgacactctggtcagcaggggtctcagtgctctggtcgatttgaactgtagaattggctgccttaaggttttctttagccgcctgacccgcccagtaattaagatatgcctctttgaaatctccgaggtaatcaaaattgcttgaggggccttcaaaaattcatagaagacctctaaggaaacaatttctaggctttccacttccttcgagagctcttcctccctggtctgcctagacttgatgtcttctatcaactttgaaagaagagtgtggagactctccctctcgtctttgagcatattgaccttcttggataaggcatcattatttgcctcgatctgagcggttgatggcatctcttaaatctcctttgttagctcatcgacccgattgttggcagcaaggagcttcttgttcacctctccgagctcatccctcacgtcctgaaccttcttgttggccgtatccacctccctctacaagttgttggtggtggcaaggttcttcgcaattgtggattttgctcggagtaggcgtaggccatctttagattgacctgcacggaaaagagttgagacatgcattggtagatagataagataaaaataaagaggaaaatatttacccgagctgcctccttcaagactccacccatcaccagctctaaggatagctcattgtccgccccagacagttgatcgctcacctcgggaagtgatcgatcaaggtaatattggagcatgtcctttcccttcttggcctccaagcttagcaccacgacagttgaggaggtcttggttaaaacagatccatccaagcttgcccttttt

SEQ ID NO: 88450 - DNA, 1887 bp, Cannabis sativa
tcgtgtctctttatttacttactttaatatatttctcttctcgccaatccaacgagcgagtgttggccagatttttgtgtcaataagcatggtcagctgatactagcatcgttagctcatctctttgctagcttttcttcaatcgagacgactgaggctctggccattaaaatgggattggaggttgctaatatcaagggtgttcatcggttctaggtgacttctgatagctctataatcatcaaggccttgaatacttcgaatcatcaactcattagctggactgccattgttgagacaattcaagctatggacgtgtataagcatttttttcattcttttagtagtgctaactaaccgtgtttcccatcgtatagctaattttgctcttaaatattttatttgtaattcttggctgggggatattcctccttgtgctaatgtcattttaaaggtagaattgcctagcctgtagttaattttgtgggaataaaatattctctttttaaataaataaaataaaaataaattactttgatattaaaatttgtgttcattgtattaatattttgagataaattatttgattcatcttttttttctacttgaaattttttatatttttatttagtgtattattcaaataaatcaaacaaattaatacaacaaaaaatataaaaaataattatcaactatgtgatactagttatgtcgatcaacatatactgtaggataagtcaagtcgacacatgaataaaattaacagatacgcgaatatgatatgtagacacatgaacatgataggtcgacacgtggatatgataggtctagttatggttgagctttcctgatacaaaatataaataggtcgagttagaattaaccaattagacgcaccaactcgcatgacacaatcacaagaattatcacccactccaccatcttatgaattactacaataaaataattcaatcaataattatatagtttttcttctatttcaaaaaataagggtctagagatcaaatatttatgagagcttgagttgagaggtgttaatggtaaagagttattcttgtatgcttctattgtggttgatatgatatggcgggcctataatgataagatacacaaaaataatctgaatatcattacataacatatcaaatctattactcattgttatgcagattatgtttcttgtattttaccgccttcttaggctaattctacgagactttggaccctgtccctgaatgacttgataaagatcaattgcgatgctaaggtaggggtgaggcaatgtgtgtggtggctttggctagaaaccatcagggagaggttctatgggagactaccaactagctccaattttctgcttcccttattggtgaagtgaatacttttactggccttggagactgcggtcactatgagacaccattttgtgtattgagatcgattctaagattgttatcaatactaaggaacttgttctttgtagagtattgacaactacattcattaatgtaatactctctaatttattttcaagttataatttttcttttgatctagatggtgtaattttgcttccttaataggtagatgtttgcctaaagcttaactcatgatagatttatcaacattaccacaaaatatttaatgatcgggatgtctaatttgccccaacacccttggacaccatggacacccaatcgtgatggaagaagatgtggactcaaccaattctctccaaaattaaacattttctttggcgagcctactatgatattctcccaactagctacaatctgcataaaaagaagtctttgcctttaccaacttgttgacgctgccaataccaagacgagaccctagtacatg

SEQ ID NO: 88451 - DNA, 659 bp, Cannabis sativa
ccacgatccccgaattctcagcattgccttgaatggccgattccactaacagttctccgaccacctcagcatcgccggacctcccttcacctgtctccatcaaatgaactcctcttccaagcttggtgaccaatggattctccctctccgattcctcctgctccaccaaaatatcactagccatcacctggccttgtttgaacgccacaaaacaatttggtataggatcatcttccttcaaccaagggccatatttgggaaccagctgctcatgctcatccttttccatcactacttgtttatcacaatcctttttttcatgtccccatctaccacatccataacaaagcattgataatctctcaaacttgaattgaatccaaaaccgcttcccatcgctcagtagaaatcggcccacgaacaaactcttattcaacagaaaaccaatacgcattcggacgtagccattgagaaacatcctgcgatcattctgccatttaaaatcctcaatctcccctgccatttcacccatacgcttgacattcctctgtgtgaatagctttaaaggccatcctctcatcttaatccaacaggatattttattcagattataatccctccactgtcccgtatccggccaagcttctagtaccaataat

SEQ ID NO: 88452 - DNA, 500 bp, Cannabis sativa
gttcagccttaatctgctgacaagttaggcatctcgataagaattctaccacattcttcttcattgtgctccacaagaagtagggtttcaaatattgatacatcttggcggtgccgggatgcagagaatagggagtggtatgagcctcttcgagaatttcatttctgagttccatactatcaggaacacagactctagtcttaaataacagcattccactatctaagactgtaaagtctttggcttggccagccgaaacttcctctctgactttaactaacttgggaagagttaactgagcagctttaatacgttctaacaaatcatactgcaacgtcaagttatgaagtttgcctacaacaaactcgatgctcaatctgaccatatcttcagccaacagaggtgaaatttgaaccatactagctacttgcccgggacctttccttctcagggcatcagccactacattggccttccccggatgataaaggatctcacaa

SEQ ID NO: 88453 - DNA, 917 bp, Cannabis sativa
caaaaactaaaatatctctttcctcttcttcttcctactcttcttaattttcttgctgaagaaaccctaatgagagaccctcgtgttctttactctctctccatctctttctcgacttctatattctcagagccagatggaagttcgcaacccttgaaaaactagatctggatctgctttgaggtgacgaggaagaataggcgtcaatgaggaggaggttctctccatctttttctgggcattgtggtgaaatagtgttgctccgatggtgaggaggaagaaggcgtcgatgaggaggaaggattcgagtctccgccaaaaatgttgatctgtaaaaaacgacagagtcgatctcgtcataagcgatgttcatctttttcttagggttgttaacagagaatccataaacccagtttccaaaaacagctggagaagaagagacattgaaattggttgaagcagggtaacccgttacgggtcttaaggtatccgccattgaagaaaagcttggatttggtgtgtgtgatgttagtgatgagagaaggctaattaaaaaagaaagaaaaggagaaagagaaagatggattgtaaaatatgctaaggctggatttgtggatcaacctctgtcaacgcagaggagagaagaacacgaaatttgttgtcatttgcagaagtgaagggggagagaaggtgattttagaggttagggattttatgttaagacattttttaagttttgaatttaattttgtatttaatttaattttaagtttttgggttttacaaaaccaattctctgttggatttttttattaaaggattaaattgtaagtttaaatgtttgataattttgtaattttttattttaaaaataatttttatttaatttttaaatatataagaattaatgataaaaa

SEQ ID NO: 88454 - DNA, 1336 bp, Cannabis sativa
taggatgttaatgaaacatactaggtagtaaatctagatcctggtaaaatatttccaacacatgcctggttgtgaggtacttttatgttggtcgagtctcaatggttcacttgagtagttggtgtgatgcttcaggtttctgtagaacctgccgcaattgttgatcggtgtacacctttatgggttgtatctggaagtatggccttagctttctggaagccaagagcaagctgtgggtcagcttctccatgagttggaattgacttttagtgtcgatcagtctcttgttggtgtagtatacagggtgttgtacactgtcttcttctcttatgagggcaatactcacaacatgttccatgactgcttggtgcatgcctagctcttctttgtctagggattcgggcaacacaggtggtcgagccaatctgtttctttagctcctggaatgtaatttcacattcttttgcccactcaaatttgttgttgtttttgcttcatgctgaagaagggtacacatttgtctgtatacttggacacaaggctacttagtgcagcagtgcatcctatttggctttgtacttccttgattgttgtgggcaacttcatgttcaaaagggcttggatctttcttgggtttgagcttcttcatgttgtaggttcaaaggatttttgaaattttttgccggtcctccatatgcccccagctcttttggatttgacaagcatgtcgtccatgcacacctctacgttgtggccgataagatcattgaacatcatgaagcttgtgtgctcctgatctgatggatgcatcttctatttcttggctttagataaggccaagttgtaatagtgacgggcagatttctgatctcctcttgaaatcttacctcatgccttgctgggagttttaggtagaggtggtagttggatgttgtgccttcaagttgaatggactggttagcctatcatggtgttgagagacaagggaacattgattacaacgaactgcaccatcagagttctggtggttggaatttctctaatagtgaggggtaatctgatatacacaatgggtgcgatgccttggccaaagaggccatacatcacttgattacagggtgccaagttagcaacttggagctgtgttgattttgaaaagaatgttgggaaggctccattgtccaccatgtatcttgctgcaattatcatgggagacggtgcgccatctttcacgtacatgtcccttaggttgaggtacttgttgagcatggctgtctcagtagtcctcttgcccgttttgagggggtcgaggcaagtcttgacttggaaggcgact

SEQ ID NO: 88455 - DNA, 4337 bp, Cannabis sativa
  modified_base (169)..(173): a, c, t, g, unknown or other
ccagcctggtctccacaggggcttggccggccatgaggtgctcagtaggctttcctaggcacttctacacgtggacaacaacatataggctgcgaattgggccctgaaagcccaataaaatggctgaataatatctaaaattatgggcactttggtcttttgtaaatannnnncaaactatgcaagtattaagggatttaaactgtaacctaggattttaggcctcctatataaaggccttaacctaggcctagaaacctaagctgcctctaagcctgaaacctgcttctaaactctaaatgtttgacaaactctctttctctctctctctctctctctcacctaccctaacatcatctcaacacttgagttttgccattattgatttataccttgtattcctaaggatgctatagcagatcccacctatagtgatctagatagtcttaacccttggtataaatacaactaaaaggggagtaagtcattacctgctatcacaagggggtcgaacctctataacaaatctattgtttattatttttcattcttatttgtgcaagcacgtggcaagtatcagatccatacgacccccgttgtcagttgatcattttttaaggtcaacagtttggtgctttcattgagagcgtggatatcgtaatctgatcaaacgccatggtgaacacaagaactcacatcgcaccatctgcatcttcgggtctccctcaagacccacagattgtagatccaggtactcaggttctagtcacaactagaatcctcatgaacactgcaaatatagtgaatcctattaccacaacaggcactacaagtctggccgctacagttggccaaatagatacgagcaccccggtggatccaagtggcaggcccacgcctctaagagtagacccaccattggcgcctcctactaaaggaaggacccaggggccacatccccctggaacaacaattggatcttgactccagttccacgctggagagatgggcccaaaaattggcgagcctcacctggacttagaagaagaccttgagttggctagactcagggaagctgtaggtcgtgcaggcctaactgaagcaccacatgctactgattgcgatagtttcgcttagtagagacgagaattcctgagatggatggatgaccaagagtacatctttcgatctgaccaagcagagttagatcactgcaatcgagaggccagggatctaataagtcagttcagtcagagaaccaatagaagaggccaggatctccttagagatccacttcaaggaagactaccgccaagttcttcaagaactaggatagatcttcccctgccagagggaggacagacctttcctcaaaggtcaaatgacgagaacagccagatcttggcaactagtggcatgggggccggccaatctcagccaatgaccttgaattgttgttctcttgggtgtttccacccattctcgagcctctctgattaaatattagccttgggtgactcactcccgaatgtcccaggataagaaatcaccttgttggccagccaaaggtgcacttctagggtgttggccggccaatggttggataactaggggtgttgttgtgccagagattcttggtcggctctcaggctaatggctgccagagtctggctattctcaccatcagatctttgcctggtgaaactggacgatgtactcttggtcatccatccatctcagaaattcgcgtctctattgtgcgagtgcatcacagccaatagcgtgtggttcttcagtttggccaacttgacaggcggcctctctaagtctgggtaacttgagatctctcccaagtctacatagggctcaccaattcttggcctcatctctccagcataatactggggaccagatacaaatgtggtgtccgggggttgctccatattggtgttagacgccagtgaagagtcctccctaggtggcaaaggttggccattaagaccaactggattggtggtgtcgacctggccagttttggtggtcaggttcatggtgcctgccagaatggcagggttgaccacatttgttgagttcgtggagattccagttgtgactagaacacgaacatcatgatctgcagtcatagggtcttgaagaagacccaacgaggtagaagttgtagccggagttctccttgtgttaaccatggcatttgatcaaattaattgataacttactctcaatgaaagcaccaaactgttaacctcagaattgtgccaaccaatagtggggtcgtatttaatggtgatgcttgccacgtgttacacaataagaataataaagtaaaatagacaacaaattttatagaggtttagccccctaagttagcaggtaatgacctactccccttttggttatattgatacctagagataatactactcagatcactatagtgatgggatttggagtagctcttttaagattacaatatatgaatcagtaggcagatctctaatgagagagagagaaagagccttggaggcgtgagagagagtgggggagagaaacaacccttggggcgtgtagcagagagagaagagaggattagggtttcatacttagagttgagagctaatgacttagggttttagagataggttaatgctctttatatagtagaacttacatgccaaatattcttagaaataggtaaaataaagttgttatttacatatttaataaataaatacaaatgaccaaattgtcccttgaaaatagatatttttcctctatttttgtaggctgttaaggcctagtctgttgcttgacttgctgttcacgaatgagagctgcacatcaatctcctgccagggaaaagctagctagccatacacctgcaggatgtaggctcgctggccatacaatgtttgtaggttgaggtttggccgatcatgctcctactaaggtctagccagccatgtgcctgccacggtttggccggccatatgcctaccaaagtctagtcggtcatgtgcctgccagaatcttacaggtcatgttcctgccatctttgtcaagagttggccaattccttttatgtgttgtccaactttggtgatggccaacctctgtagatggaggctaacccttagaggtggaggccagcctttatcagcctttggaggtggaggtcagcctttggaggtggaggccagcctttgtacactttttccttgtagagatcaggcttccttggtctgaaagtcaccttttggctggacagcttatgctcaaaccctggccaaccatacaagctcatcttggccgacctatggactcaatttggctggccaaacatggtggtacaactccttgatggctcgcttaacttcatttgcttgctgcttgacggtttttccataccttttaagaagactttatcttgctattaccaaggttgtattatacatgtattctgtcttggcttaggtagttatgccacgtcaggtggataaaatttagaataacggtaaaatacattttcttttttttattccatgcataaattgtatatatggtatacatatatgtgatgcttctttggaattaaatttcttaagttactctttcaatgtaaaattgtcatgggatacaatgatctactttaatcgtactattgtagagattattattgttgttgtaaatatgagattatctccgatttggatatttttttaagaaaaaatttggtgtatctgacggttttaaaccgtcagctatactatagtcgactatgtaaaattgtttgctatagtgttcactattgccgacgattttaaatagttgagaaattttttcaccaaatttttcaaatgtcacctattcttcccagttttgcgacggttgaataggcaacggttatagatcctgacaagagtacattaccttattgtttaaaactatcgggaaatctactttttttagtagtggagtcaactagattttgcatttacataatacctatcttttgagatctaacaatattacattgtctaacagatgatcatcctttatggggacgtcaagcgccacgaggtcccattaaaagcaatcaaccaagttagaccaataatggagatcgaaattgatactacataattaataatagaaatcaatgttggttcaatataaattcatatacaatttttagaaatttgtaaacatttagcaagtaatgaagatatgaaaaaatacataaaacaaacatatctcaaatactttctaagatttttaactaaatgatacattttcctttaggatttgggacgggttgg

SEQ ID NO: 88456 - DNA, 1423 bp, Cannabis sativa
agcaaatgccatgttagtattagaatcaattccagaggaagaattacccttttgattttcttcttgagtgacaagatggaaaacccgattggcttctggtaatggatccattaaaagtatattgctgcgtatttgggaaaaatggtctgaaagccccatcaaaaacgacatgatgtactccatgtggtggtgttcttggagtttcttcacaccaccgcacgtgcatccattgcaggtacaattgggcctgtagtttgataactcttcccatattgtttttagccgagtgtagtatatgctgatggactgattttcttaatgaaggttcatcaaattctttctcagattgaatatatgtggtccgttttgttgatggaatctgatctttaaatctgtccatatagcagctgcagattcatcgtaaagcaaactagaagaaatttctttagaaaccgaattgagaatccaagatataactatgttattatttctaatccaggcattgtaaagattatagtcagaaatatgaggtttaggtatagaaccatccaagaagcctaatttgtttttgacagaaattgcgagctgcatcgcacggctccaagatgtgtaattgtcctgccctgttagaggttgagaaacaagaatattaccggggttgtcgccatggtgcagataatatggatcagcaagatcctcaagaggacttcttggattcgtgattggattgcttcgatttcgagagatggcagaagtaggaactccagtttcagctccatcttcttgattgtcacaagacattctcgatcagggaagaacactggaaagaaaaattccaggagagaaaggaaaatatttcacaggaaagaatctgtgaaagagacgatagatcagtacgctaccattgtcggagaagaagacacgagatggtaggaagaggcggaagcgaagaagatcagtggagaagcttgcttctccgctctgataccatattacgataggaataacagagagaaatgtaattgatacaaagatgaattgaagaaacagaattcattaattgaattaagagagagttacagcagtatatatatagaggagaaagaccaaaacagaacaaactatctaaacaaactaactaaatattcggttgttaacagacataaccaataactgaatataactgaattaactaacacagcattaaggactacagtacaaataaaggtaggagagaaataagtgataatctgatatccccctctcaagatggactgtagatatcatgcacaaccatcttgcgaatatgggttgtaagtgtagtagaaggcaaaggctttgtaaaagcatctgccaattgaagtgttgtgtttattggtattagtcgaatagtagaggccttgatcttttctcggatgaaatg

SEQ ID NO: 88457 - DNA, 639 bp, Cannabis sativa
tctgaacaatctcaacctcaccatcgttttcggagtattaagttaaataaccttctttcaaaactacttttgctaaataaccttcttataaaattatgtttattttttaatttttttattaactaataaagtaaatgactaatatacccacctaaatacaacttaaacactcagccccaatccccaccatcaagaccatttttattcttctcttcttcatttcttcatctcttcatctcttcttctcttcttcatttctttatctcaaccaaccttaataataagcttaactattattttttcttctcttcacctcactattttttcttaagattttttccataaacccatctccatctcttctctttaaatctatcatctactctcttaaaattcctaaaactaaaaccctaatatgtaatcaatccaatctctatagataaaactaagaaattcttttagtttaatcactatttcagtaagttttattatatatatatattctccaatttaaataaatatatcatattatatatacccacataacataatacatatacatgtattttttttttatgataaacaatacatatacatattcatgagcatcattctctacttcaattagtgtaaaacaaa

SEQ ID NO: 88458 - DNA, 986 bp, Cannabis sativa
tttagtggtacttaatccaattccctgtgggatcgacctcacctgtgtgagattttactacttgattgcgtatacttgcgtagcgattaaaaatatagcaacacttagtgaggtattcaatgggaactacactaagagtgtcaaaatatgttgtactagcaaacttagctagtgagtctgtgttggtattctgttcatgcagaacttgtttgatggagtgcttgagctgggctaatagatctttagcttttcttaagtatgcgattagctttgacccttgagcttgatactcgctgataatttgttgacaactagttgtgaatcactgtagatctcgagtgactcaactttaattgctagtgataatcgtagtcttgctaggagtgcctcgtactcagcttcattactggttgcggttttacaaactgcattgcgctgtgagtttaaaatccctttggagtaactaagatgagtccagcaccagcaccgtgctcgttagaggatccatctacatagagcttctaggaaggttcaacgtcctcctgagctgtagtctcaggcgtgtggacctagtcttcacaaatcatgagatcgtcttcttcaaggctattgcattcagaaatgaagtctcttaatgcatgccttgtgattattgtttgaggctggtgggtgatctcaaactaacccagttcaactacccacttgagtaggcaccctaatgcttttggcttcattagaagttgcctaagttgtttgtcagttatcaccttgactgtgtgagcttggaagtatgaccttagatttctagaggccaggaacaagcagtaggcacgcttctcaatgggggatacattgactcggccctaatgagacacttgctgatgtagtagatagggtgttgtatctcttcttcctcgcgcaccagagcaacattggccgcatgcttggtgattgccaaatgaatgtatagtttttcaccatctatt

SEQ ID NO: 88459 - DNA, 643 bp, Cannabis sativa
caaattatccaggatttttttgtccacatggatagtttgggtttgttttatatttatagtatgatgtattgctcatttgattttttcattagtagatattttggtatgtcgtctccttacgtgttcttgtaagttggcaaacttactataagtttgcatacttatgagaattgtgtagagaaactgccaaaatttttactaataatttttttttttaatttttcatttaaaaattaatataaaatttttacaatcattttaaaattaaaaaaaaattattagtaatcatttagatatataaaaaataaaattaaacataattattaataatcattttaacttcatcacaggaccataatttccaacccccaactctaataatttcatcatcaatcatcttccataaccccttcctaaagtgttctttccccaaatttctcctatccttttaagattgcaccaatatcaaacacagtgaaatactttatcactcatcaatttttataacagcgaaattaaaatgacaagaacattaatagttccataacaaaacccagaaaaaaatacaaaaacacttgagatgctctgttcggcatcaagcaaagagaagcatagaaagggacacttcgaggagggagacaaa

SEQ ID NO: 88460 - DNA, 782 bp, Cannabis sativa
  modified_base (747)..(750): a, c, t, g, unknown or other
ttctcgagtatctgaaatggcccaatgaacttagggcttaacttacccctcttcccgaagcgtctaatacccttcatcggaaaaatttgcaagaaaacatgttcccctgcctgaaatgtaatatctctttgcttcatatcagcataacttttctgcctgctttgcgaagcaagcatccgagccttgatcttttctatagcttcattggtattttgaactaattacggacccaagtacttcctttctccaattttgtcccaatgaattggggaacgacatttcctaccatacatcatctcataaggagccatccctattgtactttggtagttgttgtaggagaactcaacaaaggcaagtacttactctatgaactctccaagtccgtaacacaggctcgtagtaaatcttctaatatctgaatagttctctctgattgccgatcagtctaagggtgaaaagttgtgctgaacttcagctttgtacccatagctctctgaagacttacccaaaatttcgatgtaagctttggatccctgtctgaaacaatggatttaggagctccatggagacgaactatctccttctacagctcagtgtactgatccactgtataggtaatctttactggtagaaaatgagctgactttgtgaatcagtccattatgacccatactgaatcataaattcccgtggaaaaccaaccacgaaatccattgcaatttctgttggaatatgttttaccannnnctagatttactaccatgtatgtggtttaacat

SEQ ID NO: 88461 - DNA, 913 bp, Cannabis sativa
catgctagatctaaattaaagataatgtattttattatccccgactaacggttaatagcgatgttaatattggaagttatgtgtaggcaatttgaataattgtgcattacttaatagaataattagtattatgcatcgaactgacaaatcataataaatatgaatgtattaaaagaagtgcagagtagttggaactttatgtacagcttagggttttctttgaccaaatatattttaacaaaccacacaaaatcgtgtcacaatattgtatattataaaatatatgctatatatatcttcgtgctttgcctccataatggactaacccaactttaatttctcactaattgttgtagatgtggaaggcataagatatatatatatataattatcataatgggcacgattactttttaaaagaattaatattgcctgaaagtaataaaaactagtagacatcatcattagtaatatttgagtatataacttcttattatttggtagttaaagtagttgctgcttctccctgaacatattgtctgtcgactgatctctagtgttatacaattttttgttttggtaatatatgtattctattttcagggctcaactgatattttacatgtttttagttttgttttagttttgaatatcactctctttagagatttagaaaattcgtaaccttattttgttttactacctactatctattacattatgatacttgttgttaataatcatgtacaattggcatatagcgtttgttatcaattgccactataaaagttgtgactaattataaattattattcttatcatagctataaagtattagtcataaaaatcacaattatagtgtgattaaatgtatttttagtcccaataattattatgactaaaattaaattag

SEQ ID NO: 88462 - DNA, 968 bp, Cannabis sativa
ggagctccttatcaaatatcaaatcaaaaaaaaaaaaaattaacaaaatattagattactacttaatatatagattaatttgataattactaattgaataatatggtgagaattgcctactaatgattgaaaatttttattcgaaaaaattaaagaaaattatatataacaatgaatgtttattgttgattaattgtttaatttttgtaattcatttgaatcttgaatatattcatgtataaaataaataaaattgagtacatatatcttgaaacgttaatttgttttggtcatataaaaatataaattgttaatttattgttaataagttggagcgaaattgatttctttaattgcctgttagtaattataaattttattttgataaataattaatttttctttagaaaaaataaataaagtttattgttgattgattggataatttatgcaattaaactgtttttatacatgtaaaatacaagttaatttaagttttatgcaaaatgtttagttgatttgtagaaaaaataaaatcaatatttgttctagtttaaagcaatggatattgggatgagaacaaaaaagtgtatacataaacagtttatataggcaattaactgtaaaaaatgaatgacaccttaaattcgcaagcagttaattagtagtttggagcattttatcgtcaaaatttgagcttagagagttaaatggaagtgaaatgatagttgaaagggtttagccgcaaaaaactcaacttaaaaaaaaacactaaatagcaaaaaatatataaataaccaaaaaaaaatagaatatatacgaatatatttgtaaaattaaaaattaaatccacaacaacaatcaacaaagaataaacaaaaaataaactaaaaaccctaaacatcaaaaaataagcaaacaaacaaataataacaaagttatatgtaaacaaacacattgttgcacaa

SEQ ID NO: 88463 - DNA, 559 bp, Cannabis sativa
  modified_base (91)..(103): a, c, t, g, unknown or other
ttactaaatagaaaataacaccaaaactaactaaaattaagcaaacaaacacattttcactgctcttctcacaatacttttagtttaaaannnnnnnnnnnnnctctataccatagagttatcacaaattatcactgaatgtaaacaattattttttgagttgaaaaatgttttccttatttttgttaaacaatcaactaatgtagtagctcacaattttataccaacttctatattatttcttgattatcgtttcgatataaaatatgttgctttcgagttgttacattatttggtaacaaattttattggttaataataatttattttttattaaaaaaatcattaattattaatttatatttctaaaattttaaattaattaaaatgtaatgttgatatttagtagtgaatgttatattcaaatttatttaatttaatgtataacaccaatatttaaaacaacaatatatactacccttaagatgttagccttgaaatctgtgaaactttaggcaattgtgttaaagttgccatactaccataaaggaggaaaacg

SEQ ID NO: 88464 - DNA, 734 bp, Cannabis sativa
acatttcccattaaaaataatctaacattcaaatatttgcgtaaagtatcaaataataataataataagtcttttaaaattaattttgtttttaccatagtcttttaaaattaaggtttttattagtcttttaaaattaatttcttattggtctttcaaaattatttttttgggaagactcaaattaataattattttcattagctagtctttgaaaatgaatataagtactaaagaagtctctccactctccaatgataaaaataataataacttcaatagatccaacatatgtctttaccgaaaaagtatggaagtttggtagttgtaacaatctaaattcatcattgtatgttaacttactcactaatacaagtgaaaaaataattgtatatatggtaacttgccttttatgataaaattattcatttgtattttgtgaagaattggtagctatatataaaaatcaatcacatttgccttttagagatgatgaaaaagtatactgttttactattattatttttaaatgaaaggaacatttccaagtatattaattagaaatttttacaccaaaaatacaaaatacacactttattacatatatatcttcacacggttaaactaacatttatacttattaaatttattttattacacttttaccacttgcacacacaatccatgcagccacacacgtcattgattgatgacttatatcaatcacaccttac

SEQ ID NO: 88465 - DNA, 1411 bp, Cannabis sativa
gtggaaatcttcaggcattttatgttattttacgatacagaaaatattatacagttttcaatcctaaaaaatcgaaagcaacgagttaaaagaactttcaatcacatcattgaaaaaaatgcaactaagtccattaatctctttctaaagagagaaatgcaagtagaatatggttacgctttgaagaagcaaaagaaaagagtgagagaaactactacaaggttcgtgagctatggaaacttcgaatttcgagaaggtttttttatggtttgtcacggcgttattttgacgcctaatctgcttaaaaattacgtcctgaccgtttgaatatggaaacttcttttgttttattttatttttctgttatataaaatttaaaattaaataatttaagataatattttcaaaaaaaaaaaagataattcttttacaagttacaataataaatcatacgatagctacaacttggagttaatttttttaacaatgaactttattgatgaaaaaaaattataatgatatacaaactttaaaaatttcaacaaaagaaagaatctcatcaaactatactaattctctatttattatgcctaactaattcctatgctgccctactgatagtgggacaatttggagttagataaatagcaaccagctaaaaaaatactattcttcttgctactagtccaatttttaagattaaatttatgtgtattgttacttaatataaacaatggtcacatgacattttttttttaatttttttattagaaaaaattatgttttatctaaaaattcattaatttaatatgacgtgggactattgtgatcaattttaaagttgtcaactatttaagtattttttttttttaaaaaaagtaacaaatcttatgtgaatgagaaaaaaaataaaaaaaaaatattttaaaataatatgtatattttgacaattaataaatattgtctccctttgaaaatactctaaatcacgtgttcgtatctcactcatgtgcttattggataacactttttagttttgagagactttgatattttttggttaaaatacgctaaataaatattttagtttagtagtatgaggagccaaattgctcgtaatgaatttgtctcaaagattcaatataaatacgaaaaccttcttcttcttctttttttttttcaaaaccaccttcatcctctctctaatatgtgcaaaatagtatgtgaatcttcaaatcaagtgaataactaagaaacaattcggctcgtccatggtcttgtgttgatcaattataggatccttacaaatgaagttctttgttgttgggagaacttgttagttttttgtactagtgtttaatttatctagttttcatttttcaatatgttggatgatgaattcatagtttga

SEQ ID NO: 88466 - DNA, 512 bp, Cannabis sativa
ttctaatttgtgcttagattcattaaacgtgtcatgctctcctttatcagatagctatatatgttttgatccttttatgtatttggtataaagtaatgattttttttaaaaggaaaaaaaaaaaaaaattggtcttttaaaagtttgaaattgaaagatttgaaggtgtagaagggtcctccaccaacaacatccaattattttctttgaatatctatggtgaatattcaatggaataatgggaaattagaattgaaactctataacaagttttttcattttttccataaaatattgtaccacttttttatgaactaagaatatttaaattatatgctattttaatgagtggggtggtatttatgtaggattcttaaaaaggtggggtaaaaagtggatttcaaattttatgactaatgctcaaatttaggatttaatcgtagatgatgttttctttattttgtcctagtgattttaaatccatttattatttactttgctcaaataaattt

SEQ ID NO: 88467 - DNA, 514 bp, Cannabis sativa
gggctactaaataggttcttgggccatatccaatctaggtccgaagaggttttggaaatcgcaagaggaggcggagacaagggcaagaagagccaggcttctgggggcgaatctcaacagccagcacctccaactttgaatccagaggctgcttctaaggctctaagcaaagaagccgtgtctacttccatcattgacatgactgaacctattttggtcgtggaacctttaaggcgggttcatatggagaacactagaggggataactctgattatgatgggccagtcgtgatcaataaaaagtggtctggcttctgaaggcgacgccaataagaaggcgagggtggagaccaaggaaaaggtcttacagttggtagcctcaaggaggcagacctcagatactcaatcccagaaggggtctaatgcctctgatggcggaaggatgcctaggcgaagcaccaaaacttcaagggacaatcaggtcctccaacaccaccctagcgcctagagttat

SEQ ID NO: 88468 - DNA, 1538 bp, Cannabis sativa
ccctatgaacgttctcacgttcccaactcctctactccaactgctactcattttctctttttctctccctctccaccaaaccctaaacgatcaatctctcactcactctcttctcaatttatttttatttatttttttcctgaaatttataactttaatacttgtacaaattaatgttaaaggctttttttttttttttttaaactttaaaacaattttttatatatatatttttatagaattttatataaaaaaccctattacaactagcgctgcaacctaaatcgtaacaaaaaaatcgtatagcaactcacatagaaaccaccggagaaactactttagaaatccaaacagtaaatttaaaaaaaagttaaaaaaaaacagtatttgcacaaattaatattattactttaactttaactttattttattttttatttcgaaaaaatgaccaaatgatgaacaggtttattcccaattttaattttactagtaaataactcgtgcttcgcaatttatgttaaagaaatttttaaattatatattttatttaagaattgtggtatagttcctccaaataaaaaattttctataagttttttgtcttcctcgaaagttagttgtcttccgaaagggctttcttggaaagcctttgtgtccattcagaaggagtctgtaggaaagtagtcttcctccaaaaaaaggattctggatggctagttgtcctctcctggaagggagtctaggatagtcgacttcagttgtttctgttcctatctcggaagatccttcaacgtgtgcttcggttcttagtctcggaagcatactgttgacgcaatttttcgtgaacttaatctaaacaaattattaattcaagtaaagaagagacaaaaaataataaatgaataccgtatatttttacgtagttttgtagttaaatctacatactccacgagtcaatattatttatgagttttggttgtgtttacaatttagtcaagtttctgtaaatcataattgcctcttcccattttcctttgagtgaacccctatttataagaataggatggtagctaatcaacttatcttagtgaaaagttacaattgatgggtggttaatgctcacgtatcacatttaactaaacatttgaataaatataaatatctgtttatatttaatatactataagtggtctttgacttggtcaaaccatgttatttttgagcagatgtattgttgtgtgtaatacaagatgatacattattgcgtgtgtaatacgaagagatgcattgttgagcatgtattacgagaaggtgcattattgttgtgtattacgaggtgattcattactgttgtgtaataccaggtgatgcatcattgctggtgtattacaaggtgatttattactgttgtgtgattcaacactactgtgtattacgaggtgattcatcactgactgagtattatgaggtgattcattactggtgtgtattacgaggtaattcatcactgatgtatattaaaaggtaattcatca

SEQ ID NO: 88469 - DNA, 824 bp, Cannabis sativa
cgagatactccacctgtggttgggcaaaaatgcacctcttgcggttagcatatagcttgtggtcacgtaagcgctgcaaaaccattcccaagtgagttacatgagtctctaaagagggactataaacatgaatatcatcaaagaaaaccaacacacagtctcgggaaagatcacgaaatatttcattcataagagcctgaaatgtggctggtgcattcgttaacccgaatggcatgacaaggaatttgtaatgcccctcatgagtacgaaaagccgtcttctcgatatcccggggggacattcggatttggtgatacccggattttaaatccaacttggagaaaaccttggcgccatgaagttcatcgatgacggggatgggaaacttgtccgccacagtctccctattaagagcccgataatcaacacaaaaacgccaactcctatcctttttcttgactaacaacacagggcttgagaatgggctagtacttgttttaatgattcccactttgaacatatcgcgcaccatctcctcaatggcattcttctgaacatgggcatatcggtatggccgaaccgatacgggctccgtccctggcttcagagtaatcgaatgttcttttgctcgaattggtggcaaccccggtggcatctcaaagacatcatcatattgtcgaagcaacgtggcaacatgcgaaggaatcggttggagggggcttcttcttccggggccatggttccaagttgaacccaatacccttcagctcctctttcaactgccaagaccatagccttcaatgatatgggagacttgcacaaac

SEQ ID NO: 88470 - DNA, 576 bp, Cannabis sativa
ctcaacttattttgtttgatttaaattttttttttgtctaattttatttaattttactatttcagtcattatttatgtataagtcatgctacccagactttgatatcaaattatgccccatgaactttcctttatgttagaatttttttactaaatttagacaaaagtgcttaaattcaacaatctcaatggttaaagagtatttttaacgaccttaaaaattcaaaaagcataatttgataatatttaagttaggaaaaaaaatcttaattaactaataataattgttaatacgttcctactttttgtttgagagagagagctgtatatatagagaattttgtttttggtttgacaaaatatatatattaaattaatgcaaattaaaaaaagaaataatggatgctcatataatataactataaatcactacattgaatatttctacctttaatttgttgatcatgatctaaatttattattttcttttagatatagaaccatgggcgaatggggctcccgcgtgtgttctctcttctgctttctggtcactctgttcgtgatctcatccatcat

SEQ ID NO: 88471 - DNA, 680 bp, Cannabis sativa
ggctaacatgagaaagagatgctccaggaaaactagacaataaaactttaatatcagaaaagaaaacccacagttcatgcaaatacattgtctgaccctcccaagttgaaaccaaagaaagtgaatcagaaaaaaaaccctctccacgggaagtcccacatcttgagtccaacgcaaatctactagtaacgcaaatgcttctgcctggaaaactgagaagaaaaatctgcaaatgaaatagtttaaaagcaataagtacttttaatttttaaaaccaaaaaatattatattatattagcacaatattaatgttagcatctaatcactttttaaataacctattatattaacctatctataatatatatttttttgaagggaaaccgatacaggttaaaataacaaaggtaacaaagttacgcaaccagaagaggattttcttccatctaaaccattatcttacgggcatgcagagatacccatgagaactagacaataaaaccttaatatcaaaagaacttcaaaactgagagttgtcacttccgccccactaatagaacacctacaaaaaatatgagagaaaaattaatacatgataaatatttaataaaatatgaaatttcccttacaaataaaataaaataaattaaaatatgaaattttatataagtagtcacata

SEQ ID NO: 88472 - DNA, 614 bp, Cannabis sativa
  modified_base (88)..(89): a, c, t, g, unknown or other
tgcaagaagtacaaagaacaacaaggcttcaacaaatctcacagtggagataagaaggactttcggcaccatcatcatgggaaagacnntgctgcaatcgctaaagataatgatgactgctccacagacggagagttgttctctatctcagagtcttcaatgaacagggagtggattctcaattcctgatgcactaatcacatgtgtccaaatcgagagatttttttattataagtcggttgatggaggtaaacttctaatgggaaatgatcattcttgcagggtcattggaactggaaggtggccatcaaataatatgatggcagaattaaggtgctaacgaatgtaaggcacatctcgaaccttagacaaaacctcatatccctgggtgcgctcgagaacaaagaatacagatacaagtccatgcacggaagcttgaggatcaccaaaggttctttggtagtaatgaaaggtgaaaagatcaatagtctatatgttctccaaggagaaactgttccagttagagaatcaagtatggtgaaaggactagaattggatatgaaattgtggcatcacagacttggacatatcagtgaacaaggcctcaaagaact

SEQ ID NO: 88473 - DNA, 834 bp, Cannabis sativa
tcgtaaaaatgtttaaaattccataaaaccgtatttttgttgttttttttgttgtttttgtacatttatgaaattaaccttagaatatatgtctaggttgcacttctgtagatagaagaagatgccaatttgttgtgtatatgcgtccacaacaaaaattgtagtattaaaaacttaaaacttccaatctttattttaggcccaataatccaatagcccaagagtcaagtccaacaagagctccacaaaatttgtagtattaaaaacttaaaacttccaatcttattttaatttttaccttcatttaattattttttaatttatacacagttttatagatcatattcccattatgtgcattggaaactctaattttaataagttatgtgagattatatttggtactttgattataaaagagagtatttatcaattaaaattattttggagttatatttaattaatgtataataaaaatgggtagttttcaacttatctcaaactcttctttcactcacaatgatttggcccaagaagaagtgagagaaaaactcacataatgaaccaacaattaggctcaaagagattagatcagcccaaccaagaaatgaatccctaattagaagccctaatataaaaggtaagcatatgtaaggtaagaaagagtcaaccaactattatcctctctctatattcaaattgcaaaacttcttcttctctcttcttatggcacgtttactattcagtaatcagaatcagaataaattaatggagaaatgtaacggaataaatgaaaaataatcggaatcaatatttgtaatgtgttgtttacta

SEQ ID NO: 88474 - DNA, 647 bp, Cannabis sativa
gtgtcttattatctaatgatgcaatactgttatggttatactaatcaatatataacaaagcaacaagtagagcaaaaaaaaattaagaccaccacaaaaactattcaagtaatggggaaagaatcttgcctgataaaatgaagataaaaacatagccaaattttgaataaataaatacctgcagaaatgaaagcaaaaatgattgatgttatcaaacaaatgtatataaatctatcttggtttgaggtttgaaacaatagaacattcttacctgtgcctcgctagacccaagttcataagtcaaattcaaaggaatgtgacatattaagagggaaaacaatctacattgggccaaaaagacaaacataagtgatacaaatgtctccagagaaacaaaaagagatacagaatatgtccaaaatgtgtataatatataaactgaagttcaaatctgttaaaaccaaaatgggaaaactttactctagacagacctataaatggtttatgaaattattatccataacttgcacagtattaactcgagaacaacaacctgaataccagtaaatacaatgagaactaaatataaagcagttgtttgttaactaaattaaaacaccaaaaaacctctattaaacattgaaggt

SEQ ID NO: 88475 - DNA, 1333 bp, Cannabis sativa
  modified_base (1268)..(1274): a, c, t, g, unknown or other
tattaggcattgtgtattttttattacattgttgatgaaactggttttttttacttcttttaatgaaataattagtttcttttaatattgatgaaatggtttttaatttttttcattatcttattaatgaaactatttttttctgcttcttttaatgaaattattagttttttttttaatgttgatgaaactggtttttaaagtttgtatcatttttagattataattttttgtactgtgtttttttattatggtgttgatgaaattgatttttttctgctacttttattgaaataattagttcattttaatatatagaattaattagtttactactctattaccttgataaaattattttggtattgcatcaatttctataaaaaaaacaaaagcaaaaacaaaaacaaaaaatagtattttaaaaaaatagcttcagtttcagttaaaagaatagcttctactgagaatttttttagtgtttcattttttaaaagataaaaaagaaaaagaaaaagaaaaagaaacttaattttaaatttttttatggtattcttttttaaataaaatgaattttttccatattttagttttttctaaaaaaatatcatatttagtataattaaatttttatgccatatatatcaaaacttatctttcatttcccatatttttgcaaataacccaaaaattattttgacagtataaatgttgaaattagttcaaaagtaatattttgtgtaaaaataaaaaaaaaaataaaactacttaataacatttgttaatattctttttttggataactattagcttccgaagaaaatggtaagagtgtataagtaaatgttcttcagcctactacaatggtgggctcaaatccaatgctgaccgttaagcccggtagtgatcgcttggattttggttaggatatgaatgtttgggcttaaataatgtttggcatttaaaaagggataattacaccaagtattgaaatttttaattgttttacttttatattgtggggtaaaattttttttcaaaaatactgtattttttatttttttcaaaaatactgtataagtttatactgtgtactgtgttaagttttcactgttgttctactgttatttttagtcgttctgtattgtgttctactgatgttttataaaaacatagtatttttgaaaagatttccgtgtgacagtatttttgtgaaaaattactccaaattctaatatttttataagggtgcgtttggaagtaactgnnnnnnnactaggtagggtaattactagggtagtaattatacagtgtagtaattacactatatttt

SEQ ID NO: 88476 - DNA, 761 bp, Cannabis sativa
ttaccaagggttatgcatgcatctagcatcttacccttttagggttcgtttggtaccccgactttggactcagatcctatcttcggtctcgggccacaaattttggctcggacttatattacatccctaactctatttcatatacatttctatgaccctttttaaatattataatataagttaattttgataatttatcttatatttaataatacaattggtattgtattaaattttatgatcctaataatttatacaatttaaattttatccaaacatagtatattacttattatataatacaaaacgaaatttatctatactgtcttccaagcgatttgttaatgtataagtaattaattatgactctatatattaatcaactccctagatatatgatacgatacactagctagatatagaggttcaatttaatctgtcttattattacttatttatgatcttaagatgtatttgcctgaaattagaatattaatttggtgtaattttgtataattatatgaattatccaattttttaatgaattatatataatagtaatattttagtgaaaaaataaatatcaatcattttgaaaaagatcttatatttgtgaaagagttctgtggagtattaattttctgaattttaatttgcctaaagctctacagtaaattaaaatataatttcagtcaataaattataatgttataataaaacaattacttatataattatggtttgtcaaaaaaaaaaaaaaa

SEQ ID NO: 88477 - DNA, 863 bp, Cannabis sativa
  modified_base (45)..(49): a, c, t, g, unknown or other
aaacttttgtgagggtgacataaaataacaccatgtgtgtttttnnnnnataaaatgtcaaatttcccattataaattatacatatacttcaaaactttagttatatttatataattttgaacaatattttataaataattaaataaaaaattattatctacttataaatacttaaatttttatattatatcttataaataaattaatatataatcattttttttatattttattaattttaattataaaattataatattcagtattatatttatattttattattattttgacttatttataattgataaatttatatattattattaataataaattataagattttttaatatatcgtgttgtgcttttcgagcttgtcgtgtgtcgtacttttcgagcaaatctattcgtacttacgtgtcatgccttttgtgattctcatgtcgtgtcttgtagggctgttcatttgatccaatctgcatttttttagttaaacaacatccaatctgcactaagtgtggattttatattttggatccaatctaattcgtataagagtttaaatccaatctaattcccaatagtatagattggatcaattgctttttttaaaatgataaattattttatttttttattaaaatgcaaaaaaaagaaaaagaagaagaagaacacagcagcagcaacacaaccaaaatttaacaaatattaaaaaaaaaaaattcttaatctccaacaataatctatttccatctccatttacatacaaaacaaactgatattatatatgtcagtatatatgtactcatctcatatgacaaaaaacgaaacaattattacaatttatatttagatttat

SEQ ID NO: 88478 - DNA, 1828 bp, Cannabis sativa
  modified_base (850)..(856): a, c, t, g, unknown or other
acaattcttttttctcttaaggattttccgtcccttttttattgtaacctgatcctatttatagttacataagagggcagttatttacaaatcagactaatatcttacaacaataatctcctaaaattatgggatttgattacgtcccatgtaaactaaatgcagttattatttaaaaatcacaaagctgtgattggtctacttttaccgagtcaatgcatgtgtattaaatacattgtaaagtgtattgctctgggacatctcgctaaaaacatagcaacaataaccctgttagcgagctagagcttttcacatgtctttccgaggttgataatgtaaatctcgtcgtttctgtgcttgaagacataatgctccatcaatcgtagttcttggtgacaagataaacctcagcagtcaacatcatttgaatgtcaacttctatctgagaaatctgacttgacagaatagtgagtctcactgaaagatgtatgaagctgattagtgaaggtgccaggagtatgccttcttataacgagatggatacctcgctattcgtcgttcaagttgatccaactattatgcttagtttgtataatgtatattatacactaagtgttctaacagttaacatgtgtcacttacttttcttcatacatagcgaggttggtgactcgctttgtattaatgatgtcatccttgtgatcatatcttcatatatgaaataattttctcgtcaatacgtgaattaatagtttgtacatctatgtctcgctcaagacttttcagccaacgagttatagatatactctactagttcagtatttaatgagttattctattttaacatctnnnnnnntaattactattatatttgttgatttgtattctctcaagttgacatgtgtccttctctgaagtgtcacccgaattttgagtataacaattgccctttaaaaagttctttttgataaaaagtactttttaaatgattacagagggtatatttgtcataatcccttttgaaaaaaggcatgtcctctgattttggcggttttgtggttttgaggtacatcagcatttaatgaccatcttttctacttctttttcaaattatacacgtaggatcaattatctccctgatctaatggagattaacccaagagtataaaatggaaaaaggaaccatctttgcattacctttgccattttagaaactctgctaatttctcaagcttttctctgtcattaacatttttcctacgagtttcatccgatttaatttacgatttcaagcattcggagggatcttcacgctgttcgttaattcacaggttgcagagccgttcattatccccaaaaccaacctcaaacagtaagtgacttttctccttattttcttacgagtttgttatgttacatttctgagtttaattaccaatttattggtcagcatcgttgtcatctcatttggttttagcaatttttagggctgaattgtgtctgggtaatcgttagggtttagatagaacataggttttcgaggttcttcaatttaccaactgctggtttgataaatttcttccaggaattgggattgctttcttcttgaaccaatgtctcaatctagttcataagtttattgtctagaagatttagaaatagagtatcccactgaacttcccatcccgtacgaacccaaaacttcaaaacccaaatccaatttggagataattgatgcaaaaattagggaacacttagtgagaacccaccaagatgatattgccagtcgccacaggcgcttcttgcaagagattacagaaggcaaacg

SEQ ID NO: 88479 - DNA, 544 bp, Cannabis sativa
attcaaagtttcttcaagaattgcagcggaatgaatcttgattctgcattcttgatcgattaccaagctaatttgtggaaaaattacgactaaaaatacaaaatcaaaaatgtcaaaactttaaataatcaaacgattagcagtgacaagattatcaatcaaaaacaacaatcgaatgaaaacagtggcaaacagaggaatgaaaataatatagaaaataataaatgcagaaattgaagaaattaataccaatatatatactggttcaagtcctatagatcaatgtgatctatggctctactctagttttagaacaccaccggaaatccttctttattgattgagtaagagtatgtacaatacagtcatgacgagattaattgttgagtccttactaagtgtttcaactctcacacttacacctaagaatcttcttcatctacagaagatttttcttacaaaaccccgaacccaatctctcttttttctctgcacctctctctctctctaccactcaattgtttctctctcaaactctcaatct

SEQ ID NO: 88480 - DNA, 1481 bp, Cannabis sativa
tcctagtgctgacgagattaagaggactttgtttgcaatgaacaaccataaagccccgggtcctgatgggatgtcagttcttttctacaaacattattgggattctgttggatctgatttctgtgatgcgattctagacttctttgagaatggtaatatgcatagagggattaatgccacgaacattgtgctcatcccgaaggtccaaaaccctattcgtaccaatcattttagaccgatctttctttgtaatgcgatgtacaaagtcatcgctaaaattttggctaacagaattaggcctattcttccttccattatctgtccaacggaagctgcttttgtcccgggtagaaacatccatgataacaatgtcattgtccaagaaatcattcactcatttaatagaaaaaagggtaaggagggtttctttgctataaaaattgaccttgttaaagcatacgataggttgagctggaaatttattgatcatgtcctggagtgttatggtatccctctaaaattccgtcattggatatcgcaatgtatttctactacaactctaaatatttgtctcaatgggggtcctgtaggcaaaatcaatccctcttgtgggcttcgtcagggagactcgctttccccttatcttttcatctgggctgctgatgttctttcaagattaattcacgatgcccttgaccagggatccatcaaaggtattaaactcagtaggggtggtcctgtgctatcccacattttctttgcggatgacttaatattggtgggcagagccaatttagttgaggcaaatggtttctggagctgcttagaaaaattctgctcttggtctggccaacaggtgaataagctcaagacgacaattttcttcagtaaaaacacgccggtgaacatgcgtagggatatcaaggaaggtctaggatttgattatcctgagggatgcttaaaatatttgggtcttccccttttccgatctaggcaaaaggacgctgattttaactttattttagacaacctcacggctaaacttcagggttggaaggcaaagactctatcaaaggcggggcgtgcaactcttataaaatctgtgggcttgtctttgccaatgtatgctatgcaaactacgaaactatcatctcgtatggttaacaggatcgatagtctggttagagatttttggtggggttttgagaaaggaaaccatgggatccatctaaaggcttgggacaagctttgcctccctaaatcgttaggtggattgggtttccggaagataaaagaaatgaaccaggccttcttggctaaatggggttggaatattttaaccggtagccaatctctatgttctcaagttttgaacgcgaagtacctccggggaaaagactttctctcctgcaggtataaaaaatctgattcttggttttggaaaagtgttgtcaaggctaatttgttaggctatttttagc

SEQ ID NO: 88481 - DNA, 1107 bp, Cannabis sativa
acaacaaatttgcttaataaacaactacattctgaacacattaatgtttctccttgttccatctgtcacttagcaaaacagaaaagactacctttcaattcacaaaataacattgctgctgcctgttttgatttaatacacatggacatatggggtccatttcatgttcaaagtattgaaggttataaatattttttgacaattgtggatgaccatagcagatatacttggatttatatgctcaaatccaaatctgatgtgcaaattctaattccacaattctataaccttgttttcactcaatttaacaaaaatatcaaagcggttaggtgtgataatgcaaaagagcttaatatcaaaccattttatctcctcaaagggattcaaatatataattcatgtgttgagagacctcaacaaaattcagttgttgagcgaaaacatcaacacatcttaaatgtggcccgagccttgactttccaatcttctatagccttggcatattggccctacctcatacacactgctgtatacttaataaaccgcacaccaacacctttattacaacttgccactccttaccatctgctgcacaataaaccaccaacatatgcacatttaagaaactttggatgtcttgcatatgcttcatctttaccaagcactagacacaaattctcccctcgtgcacatgcatgcatattcattggatatcccaatggcatgaaagcatacacactactcgatcttgcttctaataaaatttttcattctcgagatgtggtgttctatgaacaaatatttccactaaaagggtccctcaacacacagtccttggattgaatgtttcctgctactgatgcaacttctccacctgctcctttacagcctttaaccactgctgcacctccatctcacactgcaccagttgccattacaccagtgcctactgctactgatacaactttatcaaaggtctctaccacttctctgccagcaataacccgatctttcccagcagttgtcactgatgcttccccaactactgatgcatcttccaccaaaccacagcagcctgtcattactaaagcaggtagacaaacttca

SEQ ID NO: 88482 - DNA, 897 bp, Cannabis sativa
tcatcaagatgacatcttaattccctgctttcatccattttcatagcatagagcttcttctttagatacaatttgttggctaaggatttattcaagtagatggaagcaagcttgatccataaacctgaagcagttgtttcatcagatacttctctcaagacttcatctccaagacttagtaaaatggcaatgtgagcctttgattctgtgtcccttttgatcttttcatctgtaatttctgcaagttgagtaggatcgattgcttttgaaattccctgatgtacaagcaaagctttcatcttgattctccataaactgaaatcatttgtccctgtaaacttgtcgacttcaaatcttgttgatgaaattttcgggttgagttctttgaatcttgaaccagtttttgaatgtcagttgccttcttcaccgagctctgataccatttgtggtgaattccaattcacctcattcaagaacatacacaacaaagaacaacaatcataaaccagaaccgaaaatacaaaccaataaaccagcaatgaacatttaatcaagcatgaactatgagcaattgatggtaataaactgaaaacaaaaaattggcaccttttctataacgaggttccaacatagatcaatgtaatctatgcctacatccctgggaaacaatcagcatactttctttattgatgaatcaaagttgagtagaaagagtttgatcttgcaccaggaagatcgattacaaaggagtcaagctcctgaccctcccaaacactcagtctcacttttctctctaatctggtgtttcacttaatttcatcaccttgagaaataaatgggttgatatatatatataggttctggacagaaaacaattccccccaaagccaactaaca

SEQ ID NO: 88483 - DNA, 720 bp, Cannabis sativa
  modified_base (562)..(566): a, c, t, g, unknown or other
ttcaactgaagaaaattctacactatgttatctctattccattttggatagaattagagaaatgtcttctgtttattcagatgaactttataagcagtaaagagttcaataccccaaaatgagtaatgcatataacaaataatgtactacacatgatgtgaagatcaagacaatagattgattgaaattcactacttgttttatgttagtgcaagtgggggtttgttgggattttatgccctaaataaaatgcatttcaatctaatctagtttgttatcaacgaaagatatgaagtcatttatgtttacatgtagttttcatgtttatagtttaatatatacaaaatctgttaagtccagaacatatattcattcacaattatagtgatttcaacacagcggaatgtgactgtgattatatgcttcaaaagacaaagtccctaattcatcaatgcactggatttacactgatgtgataattagcggtgaagtgtacttacactttgcataagtgttatgtactttctagaacattggcaaagtatgctagtttcggatgtannnnntatacattggactgggactgatattgatccttgtaaagatattataatcctacagttgtatctttctaagtcaatattactagttgatcttagatcagaaggtcttaatcctaacatgcttaagttcaatctcatgagtgttattcatgttctt

SEQ ID NO: 88484 - DNA, 777 bp, Cannabis sativa
ttttactgttgttttataaaaagatagtatttttgtaaaaatttccgtgtgatagtaaaattgtaaatttttgcccaaaatttaatttaattttcttttttgtaaaaatccctatatcaaattagttagaattatttgtactactggatgtccctaaattatataagttttggcaagttgattatcaaattttattttttgacaaattggtctccaaactatataagttttggcaagttagtcccaaaattttattttttttggtaaattagtttccaaacttttatttctttagcaacataaagtcgtcactactagatattaatatttttattaatttatatttattttacatattttaatttatttttttgtgttaaattccaatttcttttttttttttaattttaatactttgataaaagtaattatattaatattttttatttttatttttaagtactcatataatatatactttataattataatatttaattttttaaaaaaatatttaaaatataatttattcatatgtattattaaaaaggaaaaagagtataaacaccagtggactcatataatggctagagataattttagctccctcacatttttatattttaacatttataatatatcttattgttgattaataaatatatagtattataattttaataattttttaattgtacatatatttattaattatttaaattttgaatcgtaaaatttcataagttcattgtagagcacaatttaaaaataaaattt

SEQ ID NO: 88485 - DNA, 754 bp, Cannabis sativa
tccagaaagcagccagagtgacgtactcgtgtataagagtcattcatttcgtgggtgtaatggaagcttgaagcggggacgttacatgccactggtactcgtcttagtattgtgttgtgcaaaaaagcctgatacaaatgtacaaatttacatacggttaattagggtccctaatttagtttttttttaaagttcgagttctcgtagtgacattaatcctaagccttaaaagtgatactcatttgtgaataactaagtgtatgtgtgtcttttgggtaggccatagctttcttctgagagagtttcagttggtaatcatcttaaaaattgtttataagcttcaatttatctttcaatggtctccaaaaccactattcaattaaaggagctagaaataagatgggcactatatgatctcactttaagtaataataataataataatttagaagagcttgagacgttgctttgttggcaaaggaaaaattgaagaatgcgtagtggcaagcatttatattgcattaaactactattaagtttatattaaatacaatttatgcttagtgatctaagttagttaataaacactccaattatatacatgtggctctaatactataaatacggctgaattttttgtcttcacactaaattgatatgagttcgagaaacacaaaaattgacacgatacaacattaaaaaatataaaatttaaaagcagatataacatgatgttgcatatataaatatataa

SEQ ID NO: 88486 - DNA, 739 bp, Cannabis sativa
  modified_base (701)..(702): a, c, t, g, unknown or other
taccccaacctgctttgcttggggattgatttcagatcaaagagctagttggtgttgtgcggggggttgctcaccccatccctgtgaggaatagacaatgagcaaggtagataaatacttgatgcccttcggagtgaactgggtcggacagagatggtagtgatccggaattctcctgaagtacggaagcaagggcaaaatagcaccctacttagtgtgagcgccggaccaatcgcagtacctctcccttagactggtcgccagctagtttggagggggaaggaagcattcgacatcccctaggtaaccgtgcttctgcaaattcttcatctttgccctagttacaatggatggaggagaaactccccaagctcctagtgccccttgtcttctctgaggaacggcctcggtgtattcctcagtgacatagtcttcaccgacctccaggatttcactggcctcagacacaggttgtccatgttcattgcagccaccgaagggcaacctccgagttgcaccttcctcctcagcttcagatggagtatcaagacggacctcgccctgatcttccacctcttagactttagcatccccaataatgtcttcctcctcagcagcaggccgggcttattctgcgttaggcattgtggcgagccgagctacgtgtgggtcagataaagaagtgttggaatttattttannaggatcttagatctactcacaagtctgtttattaaca

SEQ ID NO: 88487 - DNA, 1205 bp, Cannabis sativa
aaacatgtatcttttggttatttttaaagttaaagttattacaagtttttattttcattctgtttcaaataaagtttaaatttcgtgcacttacccttctagtaatcccagtttaagggattagggtttcttattctagtggtcatggcgtgcctaattgttagggcgttacaagtgctttcccttggaatggcatttcatacgagagctgccatgtggcagtgctctctcttggaatgaaatttcatgcgagagctgtcatgtggcagtgctctccatgattgtctttatgcattttatgttgtgtgcgagaacatatttgtctttatatctcctttttccatatacatttttcttggttgtgtattgacatttgggaccacatgggtgggtttacttatgtccatttggtgtggagtgctcactagttgaaactaacaagtctttttcacatctttggaactttttaagcatatataacttagtttatttcacatcttggtgactttggaatttaagttgaatacattttttgcgcttgtttttattctgatgcttattatctttgtagggggtgttttaagataacattaattttgttgccaatggtggcttgtatttttgctagtttaagtgagttgtcggcacgggccttaactctttgggtactcaattttagcacgcgactcacttgtaaaagtctcaaaagtaggtcattcgagatgtctttgttaagcggaactttttgagttatggctccttggagcgccctcacttgtcttttatctcgtcagtgtactaactttgccccctgtccgagatgaaattttgaaaaaatattcatggcaaaaatttttaaaatctcatgcttgtaaagtgacatgtcggcaatgactttgagatttattttgtggagtggtggaatatagttatggtctataacctatatgccccccaagttataaaagtattaggttacttttgtaacttatttgggtgaggacgtaacattacaaaagaaacatttttgtaaaaaggtgcaaacatttattaaaaaataaacaaccaattgtctaaaaaggaaatttaaatatcgtgctttttaaaaggcacttaagaacttaaaaaaccataaaattgttcaatcttaagaaaataaataaaagctagaaacagtgggatccacatggcttctcctagccact

SEQ ID NO: 88488 - DNA, 667 bp, Cannabis sativa
  modified_base (42)..(44): a, c, t, g, unknown or other
atagaatgctctatatgctccacgatatagatacactattannnatccattgttataatcccaataaagttatatctaccaacataaagttaattcttatgataaatgagataaattttaagtaaaggaaacagacaagcatgcctctttagctaccttatttaaataaaggataaggataaagttaaaactcatgatgttgcatataaaatactaaaaaaaatacaaaatatattacatctgaaattatctatgacttttgcaagaggaattaaaaataaggctaaagtgttaagtatgacattcaacatatctaaggaaaatgagtttgtggtttgtttgtaaatgatttaatttattgtacctatatatatacttagtaggcaaaattttgtgttattgcttagtataactatagaatgttatctgtgaaactaaaagccaagtgatgatgaaagattcatcttttaaggcaataggaaaacaactacacttgatgctataatgatattcaaactatggttaaaaactagttattttttagatttcgaaaagacttatacagtattaacacctagacgactttttggtttggaattttattttgaataaattaggggcccatttggcacagcttttggaaaagctaaaagctgcttttcaaaaa

SEQ ID NO: 88489 - DNA, 664 bp, Cannabis sativa
agctgcctctgttttatttcattaacatcatttaacacattaattcttataaatttactcataaaataaagtgtaagaagatatgacataaataaataataatgttatgctagctgttttgaggctcttggctccaagcttaatggagatattcatatggtttttatattgggtaagtaaaaaagtaggtatagtgtagagaactgttctcttctctccaatattatcaccatgttctatttggtttactcacaaaaagatgctttgctctctcaccattcaccactactacttataataaaaagcatttacttcaccaatttttttcttatctaactctataccaccttactttaattaatttaagagaaatgctaaaaaatatcagtggtataaagcactctcttacgtgtcaatatcgatattcgtctaatttaatatcgggtcctatatagtttaatataaaagcttttaagaagtgtatcgctagccaatcgcaaagcgacacgtcttaaatgtgctaggtactactggtacctaatagcaatactcttaatttaagtatgtaatatcggattttatacattttaatttaaattattttctttgtgattagtatttactataaggggtggggcaaaatcgtttcaaaccaaatatctaa

SEQ ID NO: 88490 - DNA, 1769 bp, Cannabis sativa
atgcaaacatcaatcactttaaatttcttatattgataactaatcagattgtaaagagttttatttagggcatataacccaacaaaaataacatttcgtgcacaataacacttcaaaagctcatctaaaatcatcaagaacatatttcaccaacatctaatactattttacttctcatgcaatcaagaacattcaaagctcaaaaacataattctaaatctccattttagcaacacattacaaattaaagcagtaagaaatctaccttaaaatcctcaacaactcaagctccaagattcccacgaagcaagcttgaatccaagcaattctcaagcaaaaatgacaaattttagagataggtttagagagagagagagggggggtcggtttgggtagagcaaatgcataaaaatgttttctccttttgcaaataattccacttttctacaaatgatacaaataggccaaattacaataatgcccatttgggccatataacacacataaaagcattcaagggcaaaatagtcaatatcacgtaatacactattgaataaattttagattaattacacatatttaaaatgccagtaaatcatgccaaaattgtttttcggccctgaacttcggtgtgacccgaaatacccagttgtgactataccgcgccaacttgtcagtgtacaactggaaaaggacaaaacaggtatactacataataatatagtccataagcacgtaattaaattaaattcatagttttatccttctcatgtcaaaattactaaattgctcctggctcaccaacagggtcttaacatgtcatatatcataaaaattcttatataataatatatatttaattagttagggtttgataatcaaattcttaatattagtgtattacaatgagcattgtccataaattatttaaagaaaataaaatcaactttcatatcggtctcactaaacaatctcaaaattaattgtctttgactttagtgatgataccttcaccttaacgtttttttttcctacaattttaaaaaaacagttactagttagtcaaattattattaataaataaaaatataataaaaaaaaatattcaatattcatcaagaaaattataatactaataacaactaataaatttttaattactaattgctatatggtcaacatcataacaaaaaaaaaatataatataaaaaaaataactaaatcataatttttttaaaaaatcagtagccaaataaaaaaaataaataaacattcaagtttttttatcacaaaaatcacagccataatattatatgcctgaatatatactattttataatattaaaattaatattcatatcatataccttatagataaattttataataatatttacgtactattttaatcataaaaagaaaaagtcaagaaactaaaaaaatcaacattgtgactgtggtgcgtcattgtaggagatcgaggattcgacgacgacttgagaagcgaactcaagtaccatccgatatagttcctgtaacacaaaaaaaatgaagctccaacacaaatgatttgtatatatatagagtagatatacatataaaatagagagggacagatacatatatagaatagagagagagagagataaatatagagtataaagaaagattactctacttttgggcctttggctttgctatgtcaactccgacaaggcaacagtgccggctggggtgcgtgaatggcgggcatggaaagaaaatatttt

SEQ ID NO: 88491 - DNA, 674 bp, Cannabis sativa
ttctgccaaggcctgtccttaaactgtggtacggggttaaaagattatttcgtaatgacccaactctataacccatttatgtaatcgcccagaggcatcagacttttgtaatacttggtgcaatggttggttggtgtatacccgaacaaggtgagctttaaaatagagccttaacttccttgttgttgagattaggtagtaagtaagcttttctattaaaggatatcaacttttcgcttcaacgagtcttttgttgatataatagactggatgttggatgttgttttcctcttttattatcatggcgcttacagcatattcagtgacagccaagtatatttctaattcttcttcgtccaggtgttttgaaagtacatgaggtttgggaagttgtctttttaattcttagaaagtgttctctcattcctctttccattcaaactttttgttaccttgaaggatgttaaagaaaggaacatacttgtctgttgattttgaaacgaatatgttaagtgcggctatccaaccattcaagctttggacttcctttgtctttgtcggtgatttcatattcaggagggcttgtattttctcggcattatcctctattcctcgagcattgacaataaaaccaagaaactgttgggttttgtgccctaaataaaacccattac

SEQ ID NO: 88492 - DNA, 544 bp, Cannabis sativa
aacatcgacattttgggtgaattttcagaaagctattggttcaaagctgaagtttagcatagcttttcacccttatacaaatgggcaattagaaagaacaattcagctactagaagatttactgcgagcctgtgtcatggacttcaagggttcatgggtaagtacttgcctcgagtagcattctcctacatcagtagcaaccagaatacaatagggatagctccctatgagatatcatatggtaggaaatgtcgctcccctattcattgggacgacactggagaaagaaattaggtttggaattagtcagaggaccaataaagctatagttaagatcaaggctcagatgcttaaattcacagagtaaacagaaaggttatgctaatttgaagcacagagatatcacattttaggcaagggaaacatatgttcatttcagggcgggtttcacctgtaaagggtactaaacgctttggggagaagtaggttcattgggacatttcagatactcaagaaggtgggataggtagcgtgttggctaacc

SEQ ID NO: 88493 - DNA, 1356 bp, Cannabis sativa
attcaaatttaatttatttttctttgagtttggaaatttacttaacagtagcattgccaccaaaatctaccatatgttatttgtataaatataggaacttcttaaatggtattataagcattttctattttctgtacctagagaatttatattatatgctactagaaaattggattttagagataatttttaagagcttttgctgttccaaaatatgttgtaagggaaaagtattaataaccgatagtataaagagactatatatcatcggttattaaaaaataatagacgacataaagggttaattgggattattttgtatgatgacacctttatggcgtcaattatttgtaataattgacgtcgtagtattttatggcgtttgttatttgtaaataagcgacgccgtaggatgtttcttaaaattattgaatattaaatatttttatttatttttcacacatttttttgtttatttttattaatttatttaaactaaatattaatttcatataattataaattataaattaactatataactaaatgtatgttaacacagatttttgttaacaattatgagcctattttgtaataaatcaagcatagatataaagaaaataataacgatgacaccaaaatttttatgtggttttgcagtttactctgcatagttcacaagtctatcttaaattaggtttcacaatcagtttactccctttttttcttaagatttttcgtccccattttttttgtataatttgcccctatttatagtaatataagttagcaattaattacattttagttcaaattccataataatattcctcaaaattgtgggctttaattacgctccacttaaatacgtccaattaaaattagaaaatcacacaactgtgatttaagccgtttgtaagcaagtcaatgctgacatggattaggacatgctaccaaatgtacctcgctgaggcgtctcacctagtacataagtgaatgacttagtttacttgcattctagcaatggcatgagcaccagtgtactaagaaatttaagaactgctctttgaccataaggccttctacactggacaatcatgtccttcaagttattacacatagttattataatgtatattatacactaagtgttctaagaattacttcacctcatcaatgcctctttacatacagcgaggtagatgcctcgctatgcgttgtctatgtctccctcgtgattatgccttttgatgtaaaatggtttctcgtcaatacgtgaatcgatagtttgtacattctgatctcgcttacgactatgcagtcagcaagttatataaatatactctattaatttta

SEQ ID NO: 88494 - DNA, 1061 bp, Cannabis sativa
ctactttattattatattataaaataatataacaatctttctagatagaacacaagctattctatcttttgttaccaccttaactttgtgtagtagctagtttaccaattgatctttctccagcttcttcttttttttttttttccacttcttgtcatccaaacatagtacaatggacaagctaaagctgctgaaaaaacctaaaaacctgcttctttgaactttcctattttcgctttttcaatccaccgtagcagtctagtattgagcttgtacaagctttccattgcagccatatttttacctggtgtaaataatcccgagtgtatttaccctcaaaaaatagatgttgaatcgttttttcatgtgtgccacacaagacacatgtggaattatcggttagatatatatatatttatatatatggaaacaataaagtctctcttttgtttttagcctattttgaacagcaatccacataatgaagttgtgtttagaaaagcaatattgacacccactactacgaatatgagctttagaggtagtttttatggcatttcaacgtcagtttttgtaaaatttgataccgacgctgattcaggcgacattgtaggattgaaaacaactgacgctaaatgatactctatggcgtcggttatcatcaaagaatcgatgccatgtgtacactatggcatcgattatatagaaataaccgacgctattatatgcaagtataaccgactctataggcctaaaaactgacaccaaatcattaataattatattttttttagttaaaaatctattataaatgaagaaatttaatttatttaaattatatatttattaatttacattaaatattacttaatttaaatttaaattaaatatatattttttaaaaagttaaattaaatattatttaaattaattttataattaagcaatatacttaatttcatttcatagaagcaattaaataaattacaattatatattatacaaatattgtaaaattagtctaagtattaacaagcagttaataaatctaattacaagtt

SEQ ID NO: 88495 - DNA, 553 bp, Cannabis sativa
agccattctgttatgttaatcacgacattagaacctgcatattatatgtagtaattaactagtatctatattaatcacatatatatatgttctaattaataatcatatatagagataaaagtacatataattaattaaagtacttaactagtaattaattcttgtttctcacaccgcaaccagcataataataaatcgaatccgtgttaccaaaaaatttatttgagaccttccctcccttcataattatatatatatattaagagaattgtttaaaagatactattggagtctaataattttttgaataattaagtattgagtcttatataattttttaaaatataaattttagctaaagaatatcgctaacaaattataaagtgtggtatatatataaattaagtatataccaatatatttcatataatagtagtatagaaatgatcccaatttaatattatattgaagtttgtaatcttagttttctgtatgaacatgaggaaaattaggggaaaaaaagaacagtttttaatggttacattttatttat

SEQ ID NO: 88496 - DNA, 703 bp, Cannabis sativa
atatatcattaatatttttatttataatattactcaacctaaacttctttgatgcgatgatataattttgttttatttaagctgtggctaaaatgctttgaaaaatatttatttatgtagtgatttacatgtgtataaaatacaagtagtaatgattgagttttctatccattgtttctagattttcgtgattcagggtgctaatttgtacctgtaaaaattgtattgatcaatataaatttattggtatattgcaactatttttctatcaaacaaaatatattttttatattgattattgtaattacatacgaacgtatataattttattatgttagattttttttcattcgattttttattcgatctctatatatatacatatgtcaatggttgggacaggggacagggtcggtaccatctttgcatggccccctaatttttagtttacaaatatatatttatatatagtgataatatatatttatttcatcctttagaaaaactatatatatatttttcgaatcaagtttttttttttattaaactgtattgttatactatgggctgggcattgagttttattcttttttatttttttaaagaacatttaaattttattcaattaaaattaaaaattgataaaatatatatgttttgtttttaaaatagagaaattgataaaatttattgtttaaaatat

SEQ ID NO: 88497 - DNA, 573 bp, Cannabis sativa
taagtgcagaacatgaatttaaggagttttaccaccaaaattttaaaattaaaaattagttacaataaattaatcacttatagaaatttttccgcaaattacttttatttttaatatattgtggatgtgtaagatgtggtagtatttttattaaaatattaaataatatataaatatagtaaattagataattagtcattaccaaaagcaaacccgattgctaaaattttcattcttcccgccaaacctcaaattttttccctctgtattcaattcctcctatctactttagcactctctcaaacccttattcctaaatctcacaagaaaacctccgctccctaaattctaattacatcaatgaaagtttgtttattttaccttttacatttctcacctgaatccagttgcaggaattccaattgtataccgtctccttctatatttctacatttcacacaagttcttttcaattgtaatctcactctcaatcccaatcctaaaaaggaaacccaaacccaagtctggatgacaaagaaatcgtccctcttccaaaagcaatggtcggttcca

SEQ ID NO: 88498 - DNA, 629 bp, Cannabis sativa
aacactttgaatattcacacctttcttatttgtttatttttggaatactcgcgggtattcggatgaacacttcgaatactcgcatatatgccccctttaggttttctagagactttatcatttttacccattgtctagaacttagggttatatattctttgtgtattttgttgtgggaatgttggttaagtctttcaaatggtgggtgtgtcaccgtattccaatgctcatgcatgtgatcgcatgttccttggagtactgtgatacacccagccatttgcgacatacgccagtgttctccgttcccatataaccgtattctttgactagtagatttgctcgaaacggtgggtgtttcccagtaacttcaaggtcatgcttgaaaatgcatgttccttgggtcactgggaaactcccagctgttttttgaggtatatcgctagttgggtatgcgtgacatattcgcaggttgcgattggttagattcctcaaaacggtgggtatttcccagtaacttcagggtcatgctcgaaaacgcatgccccttgggtcactggaaaactcccagccattttttgagatattcttctagtcgcatacttgcgattttatgccttggtgagctgatt

SEQ ID NO: 88499 - DNA, 619 bp, Cannabis sativa
aagttgcaaagaattaaccatttatgttggtagtaaattcggttgaaactgaaacggttgccttgttgcgaatgcgataagccaatacttaagaaagtcttaacaaaagctttgtctaatttacgtttcacatgtggcttgccacattgatatgaatcatcaacttggacatttaataatatacacctaatcatatatgatatattgtgcaaaccaggtccaagtatgtattcagacaccattaaaatacatacaaattaacttgaaaaaacttggaaatgtttatctatgtatataattggacctttaataatatacataatcatatacgtactatgactattatcctttataaaattgatgaacgtgttaaccagtcaggccttctaaacagctgacatttccttcctggaagctttaacgaatatatgtacataatctcatataatatatcgattagtcatatttagtattttgcttgaaaatatagaaaatctcaagaaactgatcagcactgcttggggtactcattttataatttctttgaatgattctgaatcatagtagctagagacgttattttgattgaaacataggagaaagtacccgtaattcatat

SEQ ID NO: 88500 - DNA, 777 bp, Cannabis sativa
agatctcagctacattatcgagatacatgatactatcagcaatctcttcagaaattgcatgaagtatccaagaaattacagtactgttacatctacaccaagcatcgaaatcttcatgttcctcatctggctgtggaagcttgccattgacgaacttcattttgtttctagcaacaagagcaatcatcatggatcttctccaggtactgtaattttctccctgtcaagatctttggcacaagaactgcagctggattgtcaccattcgatagaaagaaaggattcgataaatcatttccagtgctggatctcgaattttcaccaagaacagagtacatgttcgaatcgtttgatacattaccagtatctcgattatttcgagtttgagctccaccaccgcgtgccattgaagaaggatcaaagaatcaatgagacagaaacaagaaaaagatgaagacgaaggccaaccaacaatggcggctctgataccatatcagtgatcgaaaagcaaagagagaaaagagaaaacagaggaaaggaactgaattgtttattcaatgctcaaaatgaatacaaagcaagaatttgctacttatagtagctgaagttagttacatttgatctaactaactcttaactaactgacaactaaccataaccgattctaacaacttgataactttcataacaaaaatatatgatagacaacacgaattaccactcctcattttcacatattcgtcaaatgatagagagcaccctagccaaagaaagtag

SEQ ID NO: 88501 - DNA, 593 bp, Cannabis sativa
ctgcaccataccacctctttcttccactttcctttttcttcgacttgtaaatgacgatttccctttcaagctgctcatcactatcactggaaagtattagatttaaggttcgattacacaggtacaatgggtttagggagaggaatgttgcaattgggtttcttctcctttttggtggtgcaaatggtttgatcgatttttatgtggtggtgagatggtggaggagtgcgtgggtgggtgggtggctaagtcaagtgagattagatttactcatttaagttttttttatcgtatatatttaaaattattattaattaatttatttttatttaaattaattttatgtattcacttaattaattaggtgaagaaaaaaggagcaattatcaagacagtacacgtgtccttaataataattttgtttagtgggtaccagcggtacaatataaaagtgtaattttgagtattaataccacaatttttaaaaattgagtacttattaacaaaaattcataatctaatttatcatttaataaaatagaaattcaatcaataatttttataataaaactttcccaataaaatatatcaac

SEQ ID NO: 88502 - DNA, 505 bp, Cannabis sativa
  modified_base (44)..(55): a, c, t, g, unknown or other
ttgtttatcgttttagaagttcatttttaggttgttaaatcaannnnnnnnnnnntagatctaagatcctggtaaaactaattccaacagaatttttatgaatcaagctttactttccgggaaggaaggttaaagttgcataaacattcaagcttagaattttcttgaaaagatcaaagagaaagcatcacgaggagtaggacatactccaagaagtccttccattctgggaaagagggttgaagatgtatcgtacccctagttttctttcttgcataaaaaatagcatgcatgcgagagtcatgttaaatttttatgaagaaaggctgaagttgcataaaaaattcaagcttggaatttgctttaaaagatcaaagtgaaaacatcgtagggagtaggatagaattcaagcagcccttctatttcgggaaggagtgttgaagacacatcgtacccctagtcatctttcttgcacgaaaaacaactagcatgcgagagtcacgtt

SEQ ID NO: 88503 - DNA, 1058 bp, Cannabis sativa
ccgaactgaacgggaccgaacctcactaaaaaccttatgtcctttattagttattcacttatattacacgtaaatcatatttcttattgcttattattagactgattgtcgttggcttataaataattaaatattttatatatccgccgcgaagcacgatatgtttactagttaaatatagtgttatcccaatttcggcactctgatgtggcatcacataccggtgacacgtggaatcgacttcacacatctgctcaaaataaatatgccgaacagagcatcgcatatttctacacgaacgaagccttcctagccgggcagtggacggtccgaacatcgtgccaacacttagcaacttcagcactctaatcgtgaatcacagaagcaatccctataattttgggattatattacagagatatggcaagctgtccaaatcccttaatcagtgtattctgtatttaatgtgtaatcttaccaaatatagacattttaaacaaaagggaaacttttccctcaaggcttgtagccctataaatagttatctattgtcactgggcaaagggttgaaaaaaaacttatctaagagtatactcagagatattattgtaacagatctaagaaaggaatcactgcattctttgttcttaactcaatacaaatcaaggggagtaggctattaccgaactgctcagagccgaacctctataaaaactctgtgtctttatttatttcactatattacatctatattatactacttgtcgctcacaattaagactcattgctattgaccaaaagcgaggtcaatattttggtgctttcattgagagctagaatcacaaacttgctctttacttcaaatttaatcataaatgcggtggtggtacagactcgtagaggcgtagttgatccagcaaatccactggcagtggatcccgcactacagaatccatggaatgcaagggttccaccagccaggaatcctgagaaaccgccaatcgtaggtcaagatgtgacgactccttttagtggaatcgcgcctggtgtgcaagaga

SEQ ID NO: 88504 - DNA, 920 bp, Cannabis sativa
  modified_base (27)..(32): a, c, t, g, unknown or other
tctggattacattgaaatagagttttnnnnnnggcataaaacccaacagatacgtaggctgaatgatccaaaggaatgggcgccggaggtccagaacacatcagggaccgacataaataatgtctaaagtgggaaaagtaatattcctttgcatgatctccccaccgggtagaaggcatgctaaacctaaggagacgctcatcgaaccttatgggcctaaaacgtgaatattcgcggacgggaggaacataatgtattgacaaaggggacttaccagaacccgaagtgctggcatcgggagctctggtgtttgggaccgggaccacaggcttgggcctaagcgtcatctgctccagcggagcttccaggcgcagagtcctcccagcggccgcctgaggcttgatataggccagctcctgttccctcttgaagaggtacttctactacttgtcctctgccatggcaataatatcgtcccggaacaccttttctgcggccggagccctcacgtttgggcagatgactttggagagattgaagtcatccaccgactggatccccgaaatcaacttggccttccaacagttctctgtcatgaccaactccccgacatcgagggccttcttgtcatacgtggcaaaggtcttggcccgttgaaggaatatttgagtaggctcggtctgcatataaggagggatcctaacccactccgtgagaagctctgggcgatccatggcctaaaaaccggaggagagaagaagcagtgacgatactcgttcacgtgcttctgctggttgtaagggaccgggcgttcattcaatggatgggcccgaaggccataaaaactgtccttaagtttatctccctttttggggatagaaacgagttcataaaaatacaaaatttttgtcggactgggc

SEQ ID NO: 88505 - DNA, 740 bp, Cannabis sativa
  modified_base (31)..(36): a, c, t, g, unknown or other
  modified_base (703)..(709): a, c, t, g, unknown or other
attggtggcagcgaaataatatgtctccttnnnnnnagatctctaacccttgttcctttatgtcccagagtattaacaagatctgagcctagttctccttcacgtgttagattcttcacagtcttccacactatgattgagtacttgacttgctatgagtaggcatgtactctatcagtatagactcgaaaattatgaagtgggagagagaatttcgaaaatagtaatggaaggagctctcaaaaattctagttttctgacagaatgaaaactatgtcaaatccttaaagacttggataagaatgagagcatcatattcctattatacaattttatctagagttaggatttaaattatatgaaatagaaaataatagcaaaataaacctcatagtggttggccatagttgatgggccccactagttataattttgtcattttattcaactatttatcttttctttcacttatgccatattttctaattttaatcctataaatatcaaaactacttatttaataattataattaattatcaaattaaatttctatttaatttatttattaattaaactttacaaagtgtcttaactttgtaaatttaattaataaataaaccctaaaacctcttttcttcgacattaagtcattgcttagtgaaaattcataaacaaaacgtagtctaattttagaattataannnnnnnattaaaactaattaactgagtctacaagcag

SEQ ID NO: 88506 - DNA, 567 bp, Cannabis sativa
caattagcacacaaatctggcttccattcatactttacacccacagacaccatactaccatgttcatcctcaaactctagcatgctaggaaactcttggctcatgagaacttccaccaatactcttgggtagttcaatctgtctctgtctcgagtaaccgagtccaccattactggtttgccaatcatccccactattttgaagagagacctctgcccccagtatttaagttcaagtccctctaattggatccatatgggaagagttttgacatcttccttcctgaaattcgtgttagcatcccagggcttcatgataacaggacgacgattgaaaaatatgtaccctccattcagcacttggtccctgtattccatagagtgaaatcgaataatgaacactccataggttagcatcctaaccttatcaatcttgtccttccatagcctattagcaaatccctccagaatatgtaaagggggattagaccccaaaacatagcaaacaatcgaaggttgccagaaattcacttcatcttctatatcatcacttgttatcttgacttta

SEQ ID NO: 88507 - DNA, 614 bp, Cannabis sativa
cacttttgtttaattagtattattgttttaaaaaaaatgatgtggcaagacatgtggatattaattttaggtgatgtggatattttaatgtaacctaaatattttttttttgtttttttacattaatgaattcaaacaacaaattaaataaaatcattataaaaagagaactataaacactgagaaccctagctcccctttcctctatgttcttcacccatgcttgggcttcttcacgcttgggtatttttaaacaaaaaaaaaaaagtctggggtcgatccccaaagcctcacgattttttgaaccgtctgaaaaccttcaacccccaccggccaccttcgattaaccctaaccctcttctactcaactccggtgtaaaaatggcacatttttcattttttttttttttttttgaaataggagttgaacaggccatttattttccaactcacaaatttattttaatttcttagataatttttatttattaatatttttggaataatttgttatttgttaattaaattgtaatgccatgtaggggtgtgtagaaagtcatccgatccaatcccaaccgatccaatagaattggatatccaatcataattggatc

SEQ ID NO: 88508 - DNA, 632 bp, Cannabis sativa
tccctcaagcacccaaccctataaatagtgatctattctcactgggcaagaggtcaaaaaaattatatgagagagtatactccaatacatcattgtaagagctttaagagaagaattagtgtattctttgttcttaagtcaatacaaatcaaagggagtaggctattaccgaacttctcggggctaaacctctttaaaaactccgtgttcttcatttatcttatcatatcatatctaaattatatcacttatcgcttacaattaagactcattgtcgttggctaaaagcgaggtcaatattttgatgctttcattgagagcaaggatcacaaactcgctctttattttaaatcataaacacgatggtggtacaaactcgtaaaggtgtgatcgatccggcaaattcacctacagtggatcctgcactgtagaatctaggaaatgcaggggttccactagccacgaatcctgaataaccaccaaccgtggatcatggtgtgacttcccctttcaatggaattgcacccggtgtggaagagactggaaataccagttcagtagccaatctgggtattcccaatactggagttctgccagcaacaaatgttcgaacaactattggagatgacacc

SEQ ID NO: 88509 - DNA, 887 bp, Cannabis sativa
aaaaaaaaaaattaaaaaacaaaagtgctaccaaacgacacctatatgtttagtttttataccatgtttatgtttttccttcaatatttatgagtgtatatattatatttctgtcgttcttcacttggtttttaatttagttatttcatgtaatccattttttatttacttattttagcttactgatttcaatttagttatttcatgtaattagcttttgtgtgttaatttttaatttaattgctttacaaaattgatttctttgtctcagatttttttaattagctaatacatagtttcagtttctttaattgaatttttttctaattaacatgtttttttttgtgcttcagtttatcttttcatttacgtgttttatttatataatttaattttcttagcttatcgtattaagtaactggtttctgtacatgtttaacaattgtttctttttttcaattaataagttggttttaagttttaattttttatcctgttattttaagtaactaatttttgtgtatagtttctattttagttactttatgaaattagtttttctgtgtcatatttttaactagctgataaacgtaattagtttttttgtgtcagattccaacacgtctaacttcgacaacaactctgacatgtaactctgatgacttttcggtggtgatgaaaacttcgtcgacttttcgaacgattttttttggtggcgataacaactccaacgaattttttagcgacaatgacaacttcgtgactttttcaataacgatgaaaactatgtcgactttttccaggagctatggttactctagcaatttttttggcgatatttattcttagaaatcttattaaacatatttattgtatttcaatgtggc

SEQ ID NO: 88510 - DNA, 538 bp, Cannabis sativa
  modified_base (29)..(46): a, c, t, g, unknown or other
taaaaaagagggtaaaaataaaagaggannnnnnnnnnnnnnnnnngagtgtaatttcctcctttttttttatttatgaaaatacaaattgttgtcttcatgttaattatattattttaatattattttttttactttgacaatataaatgttgaaattaaaagtcaaaaataatattttatgtgaaaatctcttaaataaatagatcatttaaaaaaattacctttatttaattaataatgtatattcttaaatttatgatattctcaattaattttacgattaataatttaaaatataaatatctttttagagacgtatcaaatacaattcccttccaaaaaagcattggatataataagtattatcacaatccaagaaagataacctactttcttccctaattgaaaattcttactatggtcttaacaagtatgatgatcttattggagattgaagacgagttccaatcctattagctcgagtgagctgaaaatagagtaagaaagaaagagagaaagaaaaagaagaagaagaa

SEQ ID NO: 88511 - DNA, 611 bp, Cannabis sativa
atacatatatattacagtttttttgccacttagtttcaatcaagtcttatatgcatttggttttactattagtattactattattgtatctaatctaatgtatcttacactattggaaattttgtccttaccaattgaatatgataatctatattagatatacaaatttggtatccataaatcacatgaattatttagttgaagattttgcaatgagaaagttgtggacactaccagtaatccaattgtgcttcacagcataataagcaactttgctaacaaatgcataagccactgatttttagacatgaaacactgacaaatgtataaaggaaagctttatagacatgaacaagaacaccctttccttggaatgtaatgtaatcagtataagaataaggtttggagtgattaaacataatctactatgagttgcaatttgaatgtacaattcctacaccaatctgacagatgcaataaacaaatttggttacttgagcgagcatggtaaaaaaatagcgagctacctggtattttgccaacattatctgatatcattgcggattttgtaaacttgaactccatgatttcttgatctggaaactttgtca

SEQ ID NO: 88512 - DNA, 532 bp, Cannabis sativa
cttcggcgaaggatatgatgtacacagaagataatagtgtgatttttttattctgattctttgagattgggcttgtaaatatagtttctattgcatctggtgtttgaggttgtgcagaagatggttagtttattttaattatttttttcttttattttttatttattttagtgttattttacagttatttgacatcatttatttatttgacatcaatttcactgttcttgctccatctcgccaaaattaatggttattttctaggagttctcgtgttttcgtagtggttctgtccgtgggtgtggaagatggggctataaattcatttcttcttcattctctttggctatttttgtggttggttctcctataaatacatttgacgagctcactgacgaaagagttttaaggtgtatggttcttttatattttcctaagtggttatatctgcttcattgttttacatttgtttttgtcttgttttagtttttttagtagtttttttaggactagacttgcaaatatatatagc

SEQ ID NO: 88513 - DNA, 1149 bp, Cannabis sativa
ttgtagacatcatcaacacttctgtggagcactcaaaaactctacgtagttgagcacaaaagctgatggaaggattaccgttgaaatattcaataattaactagtccgaacttcctttctcttcaatttctttctcagtaggtccaggcaagaagtttaacccgatcaccaaactaaactccaccctaccaaatctacatctcttctttgccaagtaaaaatgtacctcgtctggcttgtcagatttgattttgtgcaacatcaactgataaatcaatgctcttgaaaattgtaatggctctctctcgaagaactgtttgaaaggggattcccttaccctatccaatagtctgaattcttcaaatttggccttaatttttgggtagtaataactaccgtcgcgccaagtgacacagcctgtgtaatgctccgacagtgaaattattagatgtggaggtctctgcaaaaaaaaaaaaaccaagaattaaatagtttgtacttttttgaaaaagtgttaggcataaatacagaaaggctacattgggagcaccacacacctcacttttttcacaaataaaataatgcaaaaagaaattccatttttttaacagaaaaaatatatatatatattcaataattaacgcatattcttgttaaatactctaatctcaattaatataaatctcttattttctttcctatatcaataaaataataattaattaaatttgacaattaaattcttcttttctacactatcggacgggtatcggaccctattggactgggcatcagactacactaagccagaactaatggcatatttttttgaccgaatgcattggaccacatcagacaatgtatcagactgcatcgggccataacaaaaaattccttgattatgaccatcgagactacctatcgagctgggcatcggaccaattggacctataacaaatcaatgcaaaaacgaaacggacatcggaccctatcggattggacatcgaacacatcggacctcagcatatttaaatcaaatgaaaggaccatcggacccatatcggactagcattggacccatcaaaccttaacattttataatcagatgaagggactattggaccaatattggactagcatcggacccat

SEQ ID NO: 88514 - DNA, 1339 bp, Cannabis sativa
aaatctctgtgaaaggatcgtatcaagctaaaaagggaaataacctaaaatagagatcaagtaattaactcataattaattgcccacaattattggacacgataatgatagcttaatcgtatctaatctgcctagtcagcacatcaaacctttcatgggatgggcctcacgaagacaatccaactttatgtattttcatgtaaactcctcattagatggaaaaggaaaactaagtataattcatataaacactataaatacccacaaatccttcgaattaagggttgaattctcttgaaatatttgctcatgcaaaaataaagagcttatactcattgtattcccaaaagctttcttaagaaaaatacataataatattgaattgtagactaaggcttgttaacaccccaaccacgtaaaaactatgtgtgttgttctattttttttctttggattatttatatcttcagttctaatctcttataattagtttttcaaaaatctcgataaacacatatcatccaaagtgtagtgtagttggtgctacttttggaagaaactcatgtcatgccaagcttgagggcatttacaatgacaaatttcaagctatcttgtacgatgcttattatgagtgtcaattgcttattgatggggtatggacctcatgtaagtttttttctctttaaatttttgtgtcacattggggataatgtgtcagataagtttggggaagggaacttatgtttatttgtttaacttttgtgtctagtttttgtttattttgtgtttttgtgctgcaacttaaacctttgaaataaataaatgccatttgttgtttcatcttgagactaaattgtaatgttatcccaatttctgcattctgacgtggcatttcatgctagtgacacgtgtaagtgattctccatatctgcccgaaggagatgtttcgagcagaacaccacatatacctgcacggacgaaatcctcccaaccgagcagtggacaatccgaacagcatatcaacacttagcaacttcaacatttgcatcgtgaagcacaaaagcaatccctatgaatctggggtcgtatcacagatatggcaagctgtccaaatccctcaatcagtgtattccatatatgtaatgtgtaatcttaccaattatagacattgtaaacaaaagaaaaatattccctcaagcacatagccctataaatagtgatctattctcactgggcaaagggtcgactaaaaattatctgagagagcatactcagagatgtcattgtaagagctttaagagaagaatctctgtattctttgttcttaattaagtcaata

SEQ ID NO: 88515 - DNA, 619 bp, Cannabis sativa
caagctgctcaatccaagcttctaacaagggatatgttgtgccaattgaacattcctatcccaaacaaaaattgtgtggtttgcgacattgaaactaagagccacaaccacattttttctttcagctggatcttttcccgacaggtgctttctttgatctttatttggctggggtttgatggtttgtctaagaactttgaaagctggactgtttggttgggtagtactaggtcgaacatcatggacagagtgagaatgctaatgttagcagccgcgatctaccacttatggagcaattgaaacacttacttgttttccttttattctaactctgttaattatttagtgaacaaaatttaaagtgatgtgaaatatagactcttcttgattaaagataggaaatgttctagagaggagaagaacttactacaaagattgatatgtaattgttaggtttgtgtggttgttgcttctcctttgagaagtttattttgtttgtatttgcgagttgattaatgaagttttcttcttcttgataaaaaaaatcaaaatatctacattaaaataatgcaatttaaaatttaagcgggaaattattcttaaaataaaataaaatata

SEQ ID NO: 88516 - DNA, 979 bp, Cannabis sativa
  modified_base (948)..(950): a, c, t, g, unknown or other
tatatgggacccgatacttagttagaccaatagcgatattgacacgtaagagggtgctaggcaccactggtgccctttagcatttctcatttttatatatccagtaaaaaatctatttaagaatactttattaaaaaataatttctaatttgttatataaaaaaaattaagtaccaatttggctcaattataaataaaaataacttttaaattataattagttatttttgaagtccctagatacatatattttataaatttatttacgtaaaattaataattttcttctaaattgtaatgcatgtataaatattatatttattcaaaaataattctattatgaaaaaatattaatgattatttatttttattatattatttttggtattttgatttttttttgtagtgcaactctatttagttataattaacctcttaattagaatataattttcttggttctaagtgtattcttggagagaaattctactgtccaatgtatttattttacaatttttgttagtttaacacaatattttaagaatataaaaaaatttaacagtgttaataaaattaatattataaagatatataaatattaaaattatttattttatattagtttaaatatatgtaaatattgatattatttgttttaacttaattgaacttatactatttttacattaatttaaacatataaatataaatattaatatattatattattattattattattttcaatattaagaatatgttcaattttaatattttaaactttatatttatttccctcaaacttttaaaactttaaatattagttctaaaaaaaatggaaaaatttaataagtagtttctttaaatttataaatttaaaaaatatacataattaaaataaaaactaaaaatgcgtgcaatatccaatatatatatataaatatatannnatatatatatatatttatatggaacactt

SEQ ID NO: 88517 - DNA, 2283 bp, Cannabis sativa
  modified_base (91)..(101): a, c, t, g, unknown or other
gggttcaccccattggaataaacaacttagaaattctaattcactttctctttctctcttcatctttttcttctttcttctcatctacttnnnnnnnnnnnatattattttataacaaaaattaaaataaactaaattaggaaagagaaagatattccttataaaaatgggagagagtctctggaaataaataccataccattaatttcaattccctttaagtaaacataccataaaatccgatgaagagagaagagcactccctgccaattcctcgcccagtgtgcatccttaacataaagtctccttcattctcttttattatttcacattcacatagttggttggatggtgtccaatgccactttattttttgttattgaaaaggagagatggggggctacgagtgtggaatgtattattcaatgaagtacaattaaaaataatttacaactcaataacaaaatacaaaaacttagaaattgattgaatagatatgttacaccaccaatactatttgttgctatctaaaatttgcataaagttactaagaatagtgatgcattgttcctttctttgaatccaagcttgtccaatgactagtcatattctctgatggaaaaaacaacactcggacttaagaaaaaaaaaaaaaagaaataaatgtatgagaaatatttgggcctaggtggacttcttgtaatttaagtgggcctaaatatttggactcttaacatactactacaaatagaatgtgaaaattgagaagaagacaaataatataagttactcaaagtaacaaaagatagaagaaaaataggaaatttatacaatagatttatttattttttatttttttttttacatttttacaaattctattttttataggttttcactttttttttcttcagaaaatattgtagctaaacaacgaaaaaataactgtatttttgtaaagaaaaaagattcgtaaaaatgtaaaaaaaaagtaaatccatagaaaggtaaaaagtttgtcatttttgtatatttatgaaataatcgaaaaatagtgacacttgtagaaatctcaaattattgtcttcctctatcagcccacgaaactgcccgggttctttgggcttttttcctttttcccgaagaaaagaatctagctcgaacaaatgggcctaagaattattttgggggcccataaaagcccatccaaaataggaaacgaaggaacagacaccgtcctcgtccccaaacccctaaagcaaagccagcagcaaaagcttcgaacaaaaataataataataataattttaaaaaaattaatctgaaaccctaaaattgatcagaaatctctcgtcctcaacccatgaaatcccctccgacaacgaccttaatccatcattcttgttcatagggcttcatattaagctctgttactttctcactttctcttcctcaacaatgtctctcccacctgtacagtgtctgtacgttacagaagactgtctccgtgaatggaaggctgggaaccctaattttaagctcaatgatcccgttcctatgctccgctttctttacgagctctgctctagcatggtatgttttttccttttttaatttcttatgatgtattggataattgaatttgtatttatgaatctgttgtacttgaagttttttgcttaattctcatttgattgataggctcgtggagagttgccgcttcagaagtgtaaagtggcattggattctgttgtgttcacggataaggtttcagacaaagagattggctccagtcttgcagatatagtaacccaaatggctcaagatgtgagctttctatgtttttgctattattacttattgccttttaatttgtagttgaatttttcaatattaaatgttgatattgagtacaagtaagttgggactgtatgtaatttgaattttggagttatgtagtttgagttattagggaacagaaattctggattagagactaatacagctaattgttaattcaatttaactaagataaagtgagcacaaacagatagatcacttgatctaagcaaaatcatgaaaaattgaatatttcatgtcacaatctttttccatagtagaatagtacaacacagtgatgacatataaaaagtgtggatatgtttgagtaagaaataagtcttcattattaggatgacaagcatgctggcacttttaatggttgttcaagtttgtgtacagatataagtagtacacacttttatgaattgaaatgtgttgccc

SEQ ID NO: 88518 - DNA, 821 bp, Cannabis sativa
ctaataccaacattgatttgccaatcccttttgccaacacatcacaagtaaatactatgttaccagggcaataccaacctttgccagcatgtgcttgcaaaagtgacaaaatatagtatttaattatcacaaaaaaaattaattctaactaaaatattgtatttagttataaattatcactaatttagttttaattacaacaaatattgtgattaaaaatacgtttagttacaataaattgtaatttttgtgactaataaatttagtcacggaccttttagtcataatataagaatataatttataattagtcacaatttatttattttttgtcacaaattttgttgtgattaaaaatcatatttagtcacaaaaaaattatattataactaaaaaattatcactaaaagttgcaattttttatagtgaataacttaatttaatggtttaaaaaaaaaataaataacttgtttgaattaagatgtattattttttatttaaaaaaatatttttaatatcatattattatttatactattaaatatcaggtataatataaataataatttttaaataaaatattactaactaatcataaagtttcaagtttcagttctaaatgatactaagcactaaatatactcacaatatatatataataatgttcataaattaaaatgattttatcaaccagaactatatagtttctaataaatatatttatgaactatatatatagtactagttgttcaatcatttttaaccacgtatgtatgtacgtgtaattgtgtgggaccaactattatttattagtgtttttg

SEQ ID NO: 88519 - DNA, 566 bp, Cannabis sativa
tggtgatgatcttcatagtgaaagcgatgaaccaaatacacaagctaaagaattttacaatttgattcaagatggagagacagaactttattcaggttgtacgagtttttcaaagctgtcgtttgttatccaattatttcatattaagtgtataagtggatggagtgacaaatcgttcgaaaaggtacttgagttatttaaaagagcattaccgaaaggtgaaacattacctaattctttttacgagacaaaaaagttaatcaatgggttaggacttaattatgaaaaaatcgatgcatgtcgtaatgattacatgttgtatagaaaggaacattcaaatgacacagaatgtgaagtttgctctacaccaaggtatgtttttaaatataatatatttttttcttttatatttattttaattcacatatacttggtagattagaataacaccattttatttatcaaaataggactgaagctaaagtcttgcgccattttcctttaatactaagattataaagattatttatgtcatcaaaaatatctgattttatgacttggcatca

SEQ ID NO: 88520 - DNA, 718 bp, Cannabis sativa
ggagtggaaatattagatgttttgtaatatgtattgcaatatgtatgttattttattttttcaaatcatgaacaatgatgtgtaactgaaaacacaaagtgtgtatgatgttgatcgatgaaagagtatgaaatgtagtcatctttgttgtgatataatctccttttccataaataaataccagatgttcatattatgtgcatacttctgcatcaaacatggcatcttaatacaaaatgcctaactgaaaacataaattaggcttaacagttaacacaacatcttgtgcactaattcaaaatacaacatcttgtgcactaattgtttctgcaatcctaacacattcctaaggactaagtcaaaataataattcaaaatactacatcaaaatgttgcatcctatgcattagaccctgctgtattgtttggtggagtagatggcccatctccatcaccttgtgcagccttcttagccttttcctttgccattcttttcttctctttagagtttccttgcttggactttggatgggtggcctgcctgctttgttctttgggccctaataaacagaagaattgaatcattcttgctaagtgaaaactaatacaaaaaaaggtaagctttagacaaattcatacctgtggttgaggttctgcatcattcgggcaatacctcctattgtgtccagcttgcgtgcaattttgcagttttatcttt

SEQ ID NO: 88521 - DNA, 699 bp, Cannabis sativa
aaaatttaatctgtccaatctgtttataggtatggaatttgcatgaaaataaccaaagtttggagttggtggatccatcactagtcgagtttgatgcaaaagaagctattagaataataagagttgctcttttgtgcactcaaggatcaccattaatccgcccatcaatgtctcgtgtcatcggaatgcttacaggagatagtgaaattgaaaatgctagatcgaagccaagttatcttactgatatggattataaagatacaactactatgagtactatgggtttctcaagtgagccctacactcctggttcatcaaatgataatagttacattttcaattaatctatgtgatggataatttcaggtttgatccctataaaaatgactatacagatttatataaataccacgccatgttacttggagaactttggtcttcaagtatccagattaaagatccattcattcattatatctctatagctcatgtatcaatttttgtaagttcttgtatgtgatgttaaaagaaaatattgtcaaatactccaattccaatacatcattttgcaagggaaatttcattttttgaccctactaaaatacacaatatcaaaatttataccatccattatttgtacaaatttagtccattgattacatgaacttcccattttaccttttttttttttaaaaaaaa

SEQ ID NO: 88522 - DNA, 1053 bp, Cannabis sativa
  modified_base (653)..(657): a, c, t, g, unknown or other
  modified_base (794)..(798): a, c, t, g, unknown or other
aaaaatcaaggaaaaagctttctctcccctctcttgcttctctctttcgaaacccctagaccagctagggttagttgtgttttcctctcaattcaagtaattctcagcaagtatagttatttccaagccaaggtaagccccttgtggctttctttttagtttcttgaattataaggaatgagatttgggttgttgtagttgctgctagtgtttgttattatttttagtggataaattatgcttagatatgttattttaggcttattgtgatggctggtttgatgcttgagcaagctttgggttttagaactcaagcttggctctttaatggaatattttgtttccgagcttgtggaagtgttttgtcgctttgatatggttctttgagttctaaatagcaggtctggaagctttctttgagtttggggttgaattggttgagttatgaattttcgttagattcctgcactgaactggaattccagttcagagggacctgtaggaactagaattccagttggtccccaggaaaccccgcacaaccggaattctggttgggaaccggtctaccggtaggggaaattttgggaaccctagtttttcccatttttgtgatgtttagggtatttccatgttattcatcgatagggaannnnntagtttcaagtttaagtccccagaaagtgatttagcgtgtctcttacctatgttatgattgatgtgatttaggagctcgtaattcgccgagcagttgttccactcaggttggacggcacacctgaattcggaatcannnnnagattagtataatgttatgcatatattatacctctttagcgtacatgttagttgccgtcagaataggcaaatctatagccctcagattagcatatcagggcaacagtgaggtgtacatagagttgtaccgagatgccagcagatatatgctaggctatcagatagtatgagttaactgctaccacatccaacgattagagtactgggtataggctagattagcgactaatcatactttgtcaaggacgttcctga

SEQ ID NO: 88523 - DNA, 667 bp, Cannabis sativa
cgtacaaggacttgcgcgctgcggctgggattgtggcttctatctcggagggatcggtgttggaggccatggctgtcatttttgaatctgaacagccgctggaggcggagatgcgggctatgattaatgctgtcaaatggtgtatatgcagggattggaagcaggttgttattgtttctgactgtcaactgttggtgcacggattacacgcacggagggcccccgattggcgtcttgctggtctgttctggaggctggtgcagatgctcgatgacctgcctgaagtggaaacggtgtggcagccaagggacggtgttctggtggctcacaagcttgcgaaatggtcctttgggagctctgtttctggttttttcactgctgaggacttggcccctcttgtggccatgtgactgtgtgttgtttcccttggttttctggattttagagaatgttttctccagcaaaaaaaaaaagataacttcactacatatctacagtactacgcctatatattaatcaatcgttaattatttaatactgtaaataagtatatatgtaaatgtgactatctttataaatgttggaaatgttgtgaatattttaacaaaatatataagtgtcttagtgtgtgtgagttggaaagagtcccacatgggatatgagccct

SEQ ID NO: 88524 - DNA, 608 bp, Cannabis sativa
ctttagagtgacagacttattacttagcgtattcaactatgaacttaaaagaaaaagcttgttaaaatattagtcagaaatataacacaaaaaagaatagggagtagtacttctcctttaatttgtttgtctcttcctactttctttacctttaccctatctttttcgttccttctttataaaataaatgaacaaagccaagatctttaattagtttgtttgaatattatttaatatttatattattgttcgttaaaatgtatataataaatacaataatgaggggctttggccaatgtgagttggtgtaaaagcacgtgagtaagaaaaaaacgatatagagtcgtgcaagcatatggtatacttggctttaagctcctcttgccgtggagatatatataataataataaagatgaaaataactaaaactaaaatgttatatcaccatcgtagagctttttttttaatctttttctctataattggttatttatgaattttggtcactaatcactattatagtattatcccatcacgaaattttatatttattttaaaatatgtataaaattaatcgatttattttcaaaatattataatgtaatat

SEQ ID NO: 88525 - DNA, 825 bp, Cannabis sativa
tttctctgataatggttctttctctgtaaagagtggatattggagcactgtgtccaggttggggtggggccaagcttcgggctcctctggttcttctcggtggtgaaaaattctttgggaacttaatctcccgcctaagataaaaaaatttgtgtggaaggcatgtctgaattttatcccagcttatgccaacttatctcgccatggtatgaaggttttgataatatgtccaatttactcttagaataacaagactactattcatgctttgtgactctgtccttctcctaagtctattcgttcagattggttgttgagtggccttgactccttgaaggacgcttcttgctattatgagttgttactggggtgtatggatatcttgaaaagacaggaacttgagcagtttataacccttggctggcgtatttggaataggagaaatacctttatgcatgatcacaaactccaatctgataacatggttagtgcctgggccatggattatttatggaaatatcaaaatgctaataatgttgagccagcttctatgggtccggtctctggcaatgcaagtaatcgactggcctcaactgagactgatctggttcttggtgagttcaatctttttgtggatgctaaggtgtgtgttgagaattgaaaaatagggatggagctttggtttccaatcgtatgcgacatgtcttattctcgagtgcggctccttgcgcgggattgttaatgggaaccttacgttgccaaagccaaagctctgctctatgggctttcttgctgcatgcagatggggtatacggtgattactgc

SEQ ID NO: 88526 - DNA, 548 bp, Cannabis sativa
  modified_base (122)..(124): a, c, t, g, unknown or other
atgatgagcacaagaaagttcaattccaatccaaatagcacatttaacattatttatcaatacataattggctacattatgtgctacttaattagcatccctacaaataaaattcaaaccannncacaatcatatgtaatattaatttagtttaatatgaataaaaaaatattaattaatttattttgagtaatttgcggcgtaaattcttaagtttaactctttattgcagataaatacctaagtttatttttttacggtaataatacctaagttatatttctggaactttcctagttacctggtccttaagtgtcaagtcattatccacgtgtcattttttattagtatatttaaattaggttttaactaaaaaataaaatttaacgatcttgactaatcaaggtcgatcatgtggccattaacttgacacttaatggccaagtacttaagaaagttccaaaattttagtttagatattattaccgtcaaaagttaaacttaaatatttatcggcaattaggatttaaacttagatatttatgctg

SEQ ID NO: 88527 - DNA, 755 bp, Cannabis sativa
  modified_base (726)..(729): a, c, t, g, unknown or other
agagtttgggttcggcatcgagattggggtgcggttctatgtcccaaccctggttttgtgtccctagtctggttccatgtttgggtctaaggtcaggttcggattcgggtccttagtccaggttttggttggcatccgagtccgactcccaattccggtataggtctgatttggagtccaggtcctagtccggttctagttctggatcgaggtccaatttcagttatgattccaagcccaagtcctagttccagtcccggtcaacttccggttttgtttccaattttgggtcacagggtacgggttcgagtccacttttgggttttaaacaggattcaggtccgggtgtgggtttgggtccttgtcaaagttcagtttgagggatgggtaccaaatccaaacacatactacgcgttttgtccaagccctgggtccagatccggatcctaatctcggtcccggtctggttccatttctagtgccgggtcacaagctgggtcctaggttcaagtttgggtctgggtcaggtactagatcccggtcctagttctattttccaagtacctatcctgattcttgctctaggtcccggttattgtgtgggtttgggtcccggtctaggttcaccttcgagtcctagtctcggttcgggttaaggtctttttcagggttttgatctgggtttgggtttaggtttaggtcctggtccttgtcctagtcctagtnnnnttctagttccatttgcgattctgagt

SEQ ID NO: 88528 - DNA, 779 bp, Cannabis sativa
taaaaatcatttgcattaaactttctacaactcttctcattctactatttaattggttgctgaaaacctcggttaacattttggtgctttcattgagagctgaaggaagcattgtcagatagacaacagttaaaggaaaagtcagattaacaatggtggaaactcataataatacacgtcagccccgtcctcctcaggatgctcaaaacccagaaggcgaagaagtggcctcaagagtaaatgtgcgctctgaggagcgagatgagacgaacgacgaagaatacgaagaaaactttgaagagtacgacacttacgacgaaggtagctatacggaactactggtcttgaggcaaaaggtgggtgatcatgaagccgagcttgcagttcaaaaagagcagaatagaaggatgcaagaggtgatggttgccatgcaaaaagccatggaaactgcagggatacacatacatcccaaggccatcccagcaggacctgaggaaacaccggaagagtcctcaccgagcactcagaagcccaagaccagggaaccaagccctatacggtacccttccgaggaaaaccctacaaaaaatccaacttcaatccctaggaaaaagaaaaaggtgctggatccgcggaaggaccgctcacatttcccaaaagggaaaggtccgcagaggggcaagctccctcgagctggtcttggccctcaagatcgagaggaccaaaaaagtgtatccgtgcaccaggaacccgaggagagagggaggaaaaaccagagg

SEQ ID NO: 88529 - DNA, 1106 bp, Cannabis sativa
gttgtcagggtctgggttcaggtcccgagtcccggttcagattttgattcaggttttggacccaatcctagagtgggtttgtgtccgagtctggctcctagtctcgttatagttttgggtctgggtcctgtcctggtcctggtcctgttcctgggtcctaatcggcttatagtttcggttccagtttcaagtcacgaggtacgggttcggggcgaggttcaggtccgggtttcagtctcgagtagggttcgaggctgggtctggttccgagttcgggcctgggtctaggtctcggtcccgttcaaagatctcggtccggttcaagtttaagtttcggtttttgttcccaagtgtgggtctgggtcttggtatgtgtctgggtcctgatttgagtttgagtttgggttcgcgttctggtctacgtcctagatctagacaccgacaacgaatcgggtccaaccatcgagtcccggatccctggtgccgaggtgggtcctatgtccaggtttgggtctagggtctggtccctgatctagatccaagttctaatgcccaagttctaggcctagttttggggcccaattcttaggtcttggtcccccatctatattcgggtcctaagggtccgggttcgggttcgggttgaattcgagtccaggtcctggtttgggttcaggtacgagttctcgtcccagtcccagtcccagtctagctctcagtttcgggtctaaggtttgagtctggttcttgggtcctaggttcggccgcggttttgggatctgggtctaggtcctagtcccggtgtgggtccaggtcccggtcttggtttaggtcccaagtcacaagtcgtagtctgtgttcaagccccagtatgggaactggtctgagtttgggtttaggtttgggtcctattacagtcccaagtctgggttctcatcctagaccgggtttggatcccaattttgggtccgagtttaggtcgaagtacgggttcaggttcgagtctaggttcgggtcctggtctgagtccaggtctttttttgggtccaggtcggggtcccgatcacggtcctagttaaggtctaggtcccggaccaggttctgct

SEQ ID NO: 88530 - DNA, 609 bp, Cannabis sativa
aaacctgaaactggcacgaaacgaaacgacaagctgaaaaaccaattttccctgctgaccaattttccctgctgcaaaatccgggtaaccggttttacaagcattgtacaaccggttaactggttttacccagaaaactaacaaaaaattcataccctaacctaatcgtttccaaactttccagacctgcatattataccccaataaacatattccaagtgatagaacaacaatcaaagctctgaattaattttcaccattaaagcttcgagcttgagttccaaaactgaaagcttgctaaaaacttcaaacaactactaaatcatgcttaactcaacataataaatcatattctaactacagaaacgtgattcaaagaacaacaataaccacaacagctaccaactcaaaatcatgcaaaaaccatatcttaaaattcaaggaaactagaaagggaagtgctagaaacttactttggcttggaatcactaagaactttctgaaattaacttgaaatgctgaagaaaaaaccaaaccctagctgctctaggaattttcgagagagagagacagagagagttgaaggagagggtgttttctaattttcca

SEQ ID NO: 88531 - DNA, 578 bp, Cannabis sativa
aaaaatataaccatcataattataataaaaacgtaaccattgagtagtcaccctatattatatatatatataaagataaattagataaagataagggaaatttacaccctatattgtaattatcaatttatttctttttatactatgacacagtacaattaacttttatactatatatgttttatatttttcctgtatttattttaaaactttaattttttactatcttgagtaatcacatcagtgacattgagtttttttttttttttttctaagctaaattcacgttacctcataccaaatccatttatcttcttcatctttaaaatatagtcacatgctagcgttttcctgatataattttttttgtttttataaaaactaatgatgaaagtgataggttgtcttgtctcttgtgacaatttttttttattaaactaatgatgaaatgaaagtgatggattgtcttgtcacttgtgacaattttttttattaaaactaatgatgaaattcttaaaaaaatttctcctacacatttttttcaaataaaagtttctcttctctctcaatacccctct

SEQ ID NO: 88532 - DNA, 605 bp, Cannabis sativa
ctcatttccaagaatgatggattgtttgttgttgttttgttgttgatcacattcacacacaatggatacgttgtgaagttaggttccttcagttttagttgtatgtagaagtataggctttgatcgtcttttaatcttaacggtcggtatcctttcacttggtatttcagctggaagtcaatgttttcttagttgcattccatcatttctttcagcttgtgtattagttcatcatatttacaatcaattgagatgaattgcccactagcttcgtaatttgcataatttattccatcatcaaattgtccattgcaaaagatgaggaatggaattttgtcttttttatgaaattataaaattttaatttatgtaagtcaacttgtggaaaactgtaataaacctgtaatgcaactgttatatatgttgagagcaaattatcataaaaacttaaaaaagaaaaataataataattcatatgaagtagaaaagaaacttacttctatcaactttcctctatgcaagtcatgtattgccaattctgagccctgtatttattatagattattattgttgtagctcagctattatgcaactgaaatgcaact

SEQ ID NO: 88533 - DNA, 816 bp, Cannabis sativa
tattaaaatataattacatttttttatgacatgatagaataagtaaaatttttatttttagatttaaataaattatatacttaaaataaattaattttttaattaaaatatttttaaaaattaatatttataatatctttttattttaagaaaataaaaaaaattaagttagtattaggttgtaagtaatttattaattatttttaataaatttttaaattaatactaaaagtaaatgtaatcatcatggttacatatttaatgtgatcattgaaacctacttcatattatatatattttaaaattaaagaaattaaatatatttatataattaccgcccaataaaaatatttattcaaaagtataatatttttaaatagcattaatattaagtactttaagatgtgcaatattatactaatatggagtattgtgagtggttagcaatttcttatattatttagtaaattaaaacatgtgggatctcatgttgaaatacaataataaaagtatgctgtcttttatgactttgtttggcgtaaattctataaactattttttggctctcagaattgaaaaaaaaaaaattcttctaaaggtgtttagataaaaaaataataaaaaaaaaaattatttgagaaaagttaagatttgtaacttcaaatagtaaaaatgaattttttttgtattaatatatatttgtaatattttttttcaaatttttagtctattatgtaaatttttcattttttttttacataccaaatatgagaatttataattatttattttccattttttttggtacattttttt

SEQ ID NO: 88534 - DNA, 1386 bp, Cannabis sativa
tgtggaaaaaaagagagtgacttaggaccggtttaactttgtattttattttttatttttaaaattgtgcttttagatttgagaaaaaactagttttttaaaatagaagacgcatttggttaatattttctaaaaaactatatatatgtatatatatttaaataataacaatattactttattactctatactttgtacctcaataagaaccctaactcaaccaagatccaaaccttgggaccgggcctaggaacagaccaaaccttagcctcggctttgactgacgtgttaactaacacaaaaatactattttgtagtaatgaagcttttgtctttggtgccaagtaatttagcctttaccgcaagcactatgcttgcaagcaacactatctaatcccaaaatgttgttgacgagaaaagcttgactatgtcctccaatcaccctttcagatcacacaaagtgtctttacaagagaagtcgcactaccatctcaatctcataattgtatcatacaattaaggcataccccatcctctctcagccaaccgctctccacaaattttagcgccaaccctagccaaaaaatgggaagaaacgtaagaaaaagccttagtgtggttaatggaaaaagaacgaaatgtttagaaaaagagagagtgacttaggatcaatttgactttgttttctatttttttttttaaatcgtgttttcagatttcaggaaataagtagtttttaaaatatattatgtgcttggttaatgttttctaaacactatttatatatatatatttaagaagaatattacttcattactgttggataaattcccatactaattgtctcataaataagttataaggaaaaataaaataagacattttataagcctcaacagaccattataactcttagagtagtcagttctgttttcataggcttagatcttaagctctttaccaataaagaagtaaataacaatatctcaagactctaactaactttcagcaagacaaggaaaaacaataactgttttctaactgttttctcagctaaaaaacacaacacatcacagccaacaacaacaatataaatagaggagcaacctgcccttttgaagacacacattcggcttaaccatagagagaggcagcaacttgtttttcatgaagaaaaacacctcagaaataagagagaaaaacagagagagttagtgagagatattgtaatacaaacttaaaaatgaaaggaagaaaagagagaaaacttgagattacctattgaactttgtggctaggaatctccagctccttacaatcggttttgacatggattgtgaagaatcaagtgtctttgagggaagcttgacggagatgtagccttg

SEQ ID NO: 88535 - DNA, 586 bp, Cannabis sativa
tgtcaataactataatgcttctcatatctctcttaagtagtctctatttttgaataattagctttcataattattcaatttcatttatgttttggttgctgaagaacttcattttgctttcatcactctcaaaaaggttgtcaccgccattgatgaaaatatatattgaagctccaaaatagagtagggcaaaatgcacaagacatttttatctagcagagtgtgattactttcttatgtaacaaaattaaaaatgaatgaattattaaaacgatatgtttatttatttatttattttaatttgaattattaaaaacgatatgttttcaaggtaaagaagcagttttttattgtcaagagagactttcagctacaaggaagcacgcagaatcggttgcagtgcttacccctaaacttagaaagaaatttcttgaggtttgtttacgttaagacaaactctttagtatgaaaatgattatcagtattagttacatgttatgtatgtgagcttacaagtttttcttgtgtaattattttggttcattgtgtataaacaaattgttacagtacataaattacacgtaca

SEQ ID NO: 88536 - DNA, 543 bp, Cannabis sativa
gtttggttggagagaaatgccaagatcttcgaaggggttgaaaatgattcgttagttatttgggagaaagtgaagttttggacagctacttgggtgtttaaaactaaatattttgaggatttgtcctttttagatttatgtcaggagtggaaatcccttttgtagcggctttgttttctttgtctcttatatgcggtaggatgttgtcagtgcttcgttttttgccgctagttttgtaaccacgggtttcctctgccatgagtgatggtcttttattcttttcgggtggggactagtctaagactttggcctctctctctttttcaaaaaaaaaagatgttcatgtgagaattgttgttcttgattcgaatccaccatcgtggggaccctctcccttctggtttgacaacatgtgagaatgagtttgtactatggtggaatagtgtgtgagttcaagggtggtcaggttttagattcatggagaaactacgagaagtgaaaggaaaaataaaagaacgtaattagaaagaggtgggaagtaaa

SEQ ID NO: 88537 - DNA, 585 bp, Cannabis sativa
gaagaagacgcaaggatggtggattttcttcaccatgaccctctggtcatagagactcccattgccaacatgatcgtggctagaatattgatcgacaatgggagttccatgaatttgtcgtttaaggaagccttcacagcgataggcctcacggactgagatttgtcacccagcggttcccatctcacgggattcaacggaaccacgcttatcttgatgggaaaagtgaggttgccagtcaccctgtgcccagactcaccccagagtactttcaagtactgcacgtttgtcggggtggattggccaactgcctataacgcaatcctcggccggccgaccctggtagactttagtgcagttacatccatccgacacttgtgtctgaaattccccacccaagaggttggggcagggaccgtgaggggaaatcagggtgaggccaggcaatgttataacgtcgcagcccacctacaagtattaatggtccgtgagggcaccgagccagaattggcagaagaagatgagttggatccccgtgtgggatccgaaaaaattgtagaacctatggaagacgttgaggaagta

SEQ ID NO: 88538 - DNA, 788 bp, Cannabis sativa
atattattttatgttatttgaattgaatatagagatgtaagaaagaaaaaataaacatataaattgagagcaaaaaaataatttatatatttaaacttttattcatttttggcatttttgaattttttctttgaacttttcatatagagcaatggatacatattatctttagaattagagcaatggattttctcaagatttatgtgtatagcatcgtgttgtaaattaacaatcggaaataataattgttaaaagaaaaggaaacaagaatacaagattaccgttatcattgaatgcatgtaatgattatatattactacattacatttatacatttatagtgcatttattacaacgaggcatcattaatttatttacggtatcctactatttttatttgtattttatattttttttataaaagctataactacaataattctcctatttaattacatattaaataataacactaaaaaataaaccttatttaagtattagaaaatattggtatttagttgaggtagtgtccaatacagtacacactgttgtgacactcaagaaattttatgccaaatttagctttaaaaaatgagccctatttctatttggtctaattcacaataaataaaaatataaaaatatatatttacttatttctagtagaccaaggcattattttttaggtaaatttaacctgaaatcttaaaaaagagactcatttttcttaatcttagttcaatcattgatctttataatagtttgtgaatttattaaattttgattaa

SEQ ID NO: 88539 - DNA, 670 bp, Cannabis sativa
aaattttttaattttataattataagtcaaaatagtaaaaaaaacccccacaaaattagataaatttagtaagagtgattataatgtagctataaatattttttttatgataaataatttgtattacaaaatgaatttttgcttttttttggtctattactctttattaagttccaaatagatttttatattcttggtggaatattgtatggcataaacatagtaaagtctatattttttatttcttagaatgagaatttttgggatattttgtatgaataaatagaaatttttattgtgatcttgattctcttgtgataatgacatataatattatcagcaagtacacaatgtttttttaagataaaataatgaagaaatcttgtgtaaattaaagactttatgacatatcccaatactatatgaaagatttaaataataaacatgattaattagtgtaaaaaatattaaatataaattaaaattatgtccaaaaggagaattgtaagtggaaacatataatgtggtcaagttgtggagaacaaacaaaaaaatagtgttctctaaggagaagagaaaaatagctaataatattatattaggcacttctagaaattttgatgctttctctttccaaatatttgtagatatatttttttttttatttata

SEQ ID NO: 88540 - DNA, 502 bp, Cannabis sativa
taagagaaatagtgcgagagagacaaaatgggaaagctggtcttgtactgtacaaccaacaacctcgtcctaccaaacaaaagagcgatatttttttttttttgacaatgaactttcattgaaaatactcaaaagtttatacatagataaaagatgaaaaatcatctatccaaactagtttatcatccaccctgagtgcacgaactgctaattcatgtgtacaataaacatgaatcagagatgcctcaagaaaactggatagcaaactagcaaaataaatctacaaaaggtcctactttaaaacaaagaagaaggatctcctagaaaataatcaactagacttgaaagatttattaggtagcccaatgcaagagatcaatccagtgcaaccactaaaactacataagtttaacttctgttaacctgtgaaccttcctacaaaaccaaagaaaaaataataataattataacatattataccaatgaaaataataataataat

SEQ ID NO: 88541 - DNA, 8936 bp, Cannabis sativa
aatattatcatgtcaaacttaattttcccatttctttttagaaatttgagtcttacaagtttgttgccacttcatgggaacgtttttatcaacaatttttttttttttttcagccgtattacctatatggaagtttaccattaataataaaatatgatattattttgatgaatttatatgagaaaaaaatttacataattttaaggtttatttggatttttgcctcctaaactttaacatgtatcaaattatgtctttgaattttttttaccgttaaaaatttctctaactattgagattgttagatttaaggacttttgtttaacttcattcagttttactattttagttattgtttatgtactaaagtatcctccctagattttaacatctattaaattatgctcctcgaacttttacatgtactaaatttttaaagatattttcaacgaccttaaaagtttgggggcatgatttgatacatgtcaatgtcaaagttcgggataaaaattttaattagccaaattttaattttagtatgcttttgctttatgtccagtgaaaacttgacaacaaagaaagtcttacttgcggtaattttcataatttaatataatatttatatttttttgataaattatttatattattgagaaagtaataactaaaactaaatacaatctcaaaaagaaaaaagaaagtgataataataaataaaagaataaaactctttcctaataaagcgctttgttcttggttttgttagatccccaaaacacattttggatggatctctctttaccattcatctctttttgcacaataatcattggtaatgttcttgaagtttttcttaactattatcatgatcatcatcatcatctaaataatcatggcacataataataacaataatagtaataataatccttcacgttcgcctccaacggatttctacagtattttgggaataacaacaagtgcctcatccatcaaagaaatttgcaaggcatacaaatcccttgtcaccaaaaaaaaccatataataataataataataatgattcctcacatcatagtaaacatggcaacgccaatgaaacaacccacgataaggtacgtaatattttatctttcatgcaaactattattttcaaataatttgttgtttcttttttttttttgaatcaaaatttattaataaatgttcatccaattctttatttttgagatttatatgtgtgtgtatgaatgcatttttagggtatgaatggcaaaagattagagaaagaagctcttaccataagtgaacctattaccaagttattagggtttgataatgggaagaagagcatggttgtggatgatgataatagtaatgatttctttccaatgccgaggcctaaaaataaatcaaagagtacgagtaatactcctagaagaagtaaaacaccaactccgacatcatcattgtcaagtattagagctaataatagtgaaagcaggagaagcaaaacaccaaacttgacaaggaatagtagcaaaagtaggagtaactctgaggatttggatcaacaattctcaaactttatctcagggaacaggagcagaagatgtacctctgaaacccaattcaacatggctgcttcttgttcttcttctcctgcccattctagttttacgaccggtttgtcgagagataagagcaagaggagcaccactcctattgttttctctcaatcgacggagagaaagaaacctccgcctgtcgagaggaaactagaatgcactcttgaggagttgcttgatggctgcctcaagaagatcatcattacaagaaatgtcattgcagaaactgggtttgtctcactctttatacattttactccttgtttgccttttcaatcattattattgtttttcatttactttcttcaacagcctctttagtgaattaaggttttgtttcttaagatataagatataacatatatattagataaattcttatatagtttgttttacaggataatagtccaaaaagaagaaacattatgggtaaatataaagcctggatggaaaaaaggaacaaagattacatttgaagggaaaggagatgagaaaccaggctttcttccagctgatataatcttgtgtattgaagaaagaaggcaccctttatatgaaagggtaggtgatgatttggaaatagtggttgaaatccctctagtgaatgcactcactggctgttcaatcccaattcctctattgggaggagataaaatgactctttcctttgatgatatcatataccatggctatgaaaaagttattaaaggacaaggcatgcctaataaccctaaagaacatgccaggagaggcgatcttcggattaagtttctcgttgagttccccgtcgagctcagcaatgaacagcgagctgaagctgctgccattttgcaagatagttcttgatcttaattcatcttatatttgtgtaatttgtttgctttttgaacatgtgtgtagaacatatatatatctgtggagaataggtggaaaacgctaaagaagtttctttatgattgattataaataatagtaagtgtttaaagatcaaaatctcaagaattatattacaaatattatgcaaatgagtagagtttgaaggggggttatgttagtgagaatagtgcatatgatttgtattaaaaaaaaatacttgaaaaataatatataaccatcatatgatatgtcatattgtaattgatgcatcctaatatcgaatcattgaatggtgttaacttaagcgccataagatgaaaaataacaacgatctttgataaaaggttacaaatttttatgtaaagattaagataatacactttgtaattgtctggtgattcatgtcattagataatgtactccaacatttctgggacaccaaaaggtaagtaattattgtatttaacaagaatatgagatttgattttgagacatttagccatcagttagcactgactgaataaagtgccaaccaattatttaatagaaaagacatcatgtgcataagtaaattatgcatctgacaattaaactaaagctatctgctttagtattattgcatatagattttgatgatttcggattctatttataatctacattgctgtggaaaaaggttcaagaacttgaactgttcgataaagcttgttgcctagcaagaaaaggtacctcaaccagggtaccagtaacagagtctcctacaattacagtatctccttctgaagcagctcttctcttaacgtagcctaggccaacatactcggttccatttcttccgggtacacagctagtcagcttccccacctacacaaatgctatttatcgtaatatcatgatgaagagcatattcttattttgaaaactagaattatgctaagaaacaagcaacacaaaactaggcgtgagaaagtgaacgaattcttttaaatctgctacaacagacctaaagggcaaactttgctgaatggtgtttagtttttatgtttatgggtattgtgtagtgttttgcaatttattttctttttgaggaagccttgttattgttattttggtttagtaaaagttttgtttcttaaaatataaaataaaatattgacaaagacaaaatcaattgcccacctttttaccatcaacaacaatagtgctgccgggttctgttgctgaggaaagagaaataccccataatctctgcttaacaccatcataggttataagtctagatatagtctcttgtcccttgtaacaccctgagaagtaaaaagttcaatataagattaaagatgctgccagatacttttgcccccttattataagcaagaactgagatacctttgtttagagagattgaattccagagaccggcctccaagacattaaattcattggtaagctctttgtgaggagcaggccttcctgaaaagattaatttaggctggtgtcattgaatcagaaaatgaaacttcccaaagcaacacatattacagccaagcatttgcctcaagttctttcaatgtttattttcaaagcaaccatctcttttaaagacttttgagttcaaaattcaaccaaaagttacttaccggatataattataataggaaagcatccacaattttttttttgttagggtgccacattacaaattatgaatgttacatgcaacagacaaataaatcaaagttgcaggattcaatatgttcaaccatatggacacttttcttcacaatttgtatcacaaagcaacaagacttgacccaaaaaaaaatgttaattacattatcaatggatcaaactaacaccagatgtcgttaaactatgtataggctgctaaatttggcaagataaagcttaatgagcaacaaaaattcatttcatgttaatttcaattcagcattgaaaaaaaaaagaagaagaagaagcaagaaaatgaaagaaatgacaaaatataagtaaacacgtacatatttattcgaggatgtagttatgcagacagcacattcaaaaaaaaagtaatagaatacagcaataactaaactcaagtatttttggcaagagcaagaggataaaaaagaaaaaataaataaataaaactatatcaccttgaaaaactcttagcttctcccaagcattggagcccattgggatagcaccttgggaaagaagtgtcttccagacagtctcagctgcagctggtgacattaaaagtgaagagccttcttcagaaatcacatttcccacccccacagttatgggcatcccattaacctgtaaagtgaaaaagggtctgaatcatttatgtattcaagttgcacaagtaacctattaacaggatggcaagtctcttgatattgtagtcgcttacgctgaaatgttgatgtgctccgtatggttttccaacaagatcaccaagattcaactcttccataagctgtgctcagtcgacatttaaaaacatcaaacttaggaagtcgaacaaatactcaaatattggaaaactcgtgatgccacttacttgattgcttttaggtcccaccaaaacaaagaaggctgtttgcttagttatatcttggatctctaccttatcagcaaaaaaaatatatctacaaaaataaggaaagaaaaggtaatgcaaaagatttagattcattgtaagaggcacttcttatgtcaagaataaaaacttatattgagattaaacataattaaactcttggtaaacacaatgtgatgaaattgtgaatgctacctaactctatcttcagactgttatagcgacttaagtaagactcactcccaaaagactaagatagaaagggaggtgcctcaatgtttataatccagcaaatatgaccatacttagttgatgaaggatcctaacaatacatttccttttagagtcaacatccacgatgatccactttgaacttcttccattccatgccttttatgactccacatgtgactttacccaggtccccctttctgcgatgttggtctcgctacagggtaatgattctgctaccattgttacaaccacttactacaacctaatcccaaatgagtagcctattagagaagggtttccaagtagttttaagacactcactaagcacatacttagctaatattagatcctaacataaactttctggatagttatagcattctaattgataataaaaatggcatctcgttttcccagtcaaatcaatatacttttccatccaaacactacctaatcaacagtagtgtagaccaagaaaaaaagaatgacctagaactcaaacttacaaccaacctactttttcagcatttcagcaatgctcccaccagtctcgggtgaaaccaatagagtcacagcatttttctgtacacacaacacaatgacatattcttgattataaaacagaagacttatatagacgaaaaataatatacaaaagacaatcaccaagaaaaggattaccatgatccatgcatgtgcaatatctattgtccgagcagttggtgtaacaaagacagtgtcatatccctatggatttcaaatagaaatcctattacttaagcctgtatggttgcattaatataagaacaaaactgaaattcaaaatcttacaactctatgaatgaaatcaaataaataatacatcccatcgaatacctctccctcacgaagacattcaaaatttgcagttgtttggttgtgaagaaattggatacgatcttctccactgactgcatgtcagttgatcaatgatgtttatatgtaaaactaaaaatgttacagcatctaattatactgccaaataatgaaagagtaaaatcaatttgattgtgatacctaaaatatgtagaatatttatccacaattaaattcaaaggtttatcactcccatttgactgaagacgtaaacacaatattattgaatttgtaatttcataaaagaataaacattctttgaaaaaaagagccatggacaaggaaaccttctatagtatctaatgtcataggtgtttctcttccaaaccaaagcatctacaggactcaccaacagacgactcaagaaacatctttgcattacaataaaaatgcctctttacaattattttggcaagaacaaaattgttgatatttattaatgaactggacaagttgacaatgtatctgtgtgtttcacaaatagctttgcaaactgataagagaattaagttgagtttatatttatcctgaagatttcgctgagattaataccactgatttggaaactaagatagcatccgccaaacattagtgagtggctatgaataagtatacatgtgtttgaagactaactgacaaagaaaagtggatagaaatatttatttatacttggattttctagcaagggctaggaataaaaaaaaacctgcaatgcataacaattttttctacatcaaacctcctccaccctaaaaattgattaagataaaaaagctcctcttaaaagtgagtgatcagtcacaatataatgcatatgacataagagtttcgttatcttttggatttactttgggtggctcagatttctatatgcatacatataatgaaataaacgcacacaagatatagaatcataacccaagatataaaagatatgagcctgatcagagtttgaacatttcagtttataatactgttatataagaatgaacgttccctcacacgagtataagagagagcatttggttgtctgcagcaggaagaccacctctagattttagaatattataaaaacctttaagggaacattctcttcagttttagacacatctgataagaaaaccagacatatttgtattttgttgactttaaaatttaatcatctcttccaatgaagtttactttctggccatttttctaaatcccgactaagatgataggcataaaatggaaagcattagagatagagaaagtacctcttattcttccaaaatgtgaaaggtcgaccacctaagccattaagattgcaaacatgatatgaacataagtgaaaaaagctattgtcataaatcacataagcaattgctatgaacacaacaaaagcaccaagttcaaaacagccaaaggctgcttggcttatgcaatgagtaggccctccttacgaagaaaaacaaatgaaaatgaatctataatatattccattcccgaaataacgatatgcatttaaaaacgaacaaatacccgataactaatcacaggttgatctaatgaatctgacctttcaaaactaaggaaaactatagcattacaactaagaatgcgatagtaattgaaactaattggtaacctgattcatttaactgaaaaaacgttttgagctttgccacacacaatgcatatgccttgctgtgtacatatataggtagatttacataagttgctataaaataaatgcctcttttctggaggaatggtagtgtcattgctacatattgcaaaaatgaaaatgaaaatatactgtcattatccattggaatggcctttcctcccatttgtggaaggaataaccaatcaaagcaatcaatgaaaatggactatttttattctatcagttccaacaaaacataccccagaatttaaatacaggttctgcatgattaatatttacatatatcacaataaaagcatagacaaacattcttcacaagaaaattttattattaatcaaattcaaatactcaccgcaacaccattatcgaccgcatccagtgcttcatcgtcattatcaaatgactcgatgatccccttctccgagacttttgccccagcagcttccatggcgtcctgcaacattaaattctttaatttcctgaggtttccaagaaatacaaacaagacccaggtaagaaaataggaagagaaagcttacaacaaggtcgtgatcaatagggggaggagaaaggtcaaagggcaaggcagctaagttggtagagttgttcgtgctcttggaaaagtacgagctgctcttcttgaacccagaagagaaaaatgaaccatttcggcgggaactggggaaagaagaccatggggttggatgaagaaggtcgggttgagtaaaagtaatgggtgaggtagttatggttgcagtagtgagaatagtcattgtggattatttaaggattttccggtcttcacttgtggttcactaggtattttattgcctgaggtagttatggttgcagcaagggacaaacgatataccgagtattgttaatgcaagctatccaatattaacctaaataacttccttttcaattagcaatttttccaaaacaacttttcactagtactaaatcaagtcctgaacttggttgattatcgttgtaacggg

SEQ ID NO: 88542 - DNA, 645 bp, Cannabis sativa
ttaatgttatagttaaatttattagtaaaataataaacatgacataaaaataaataaaaaataataatttatagtgatataaattttgtttcatagtaaatgttattctaaatttagtacaagatttattatgtgataaatttaagttacctttcgccatattattgaaacatatattatgctatgagtcataattcagctttgtattacttatttctatttacattcacaatattcttatttttgtgtaattggatgaaaactaatttgagttataatttagtgcatatctcaaaagtaatactgtgaagattctatactaattttgtaaaattgtagaccattaaatataacattatagtagctcattgggatgctagatacccatttgcatttcccattataaccagattagtagtacttaaccaaaacaggcaatagtagtaggagtaggagagggtgtgggaccagaagttgagtacttttttattttattgagtgagagggtaagaatggccacatgttactcttggagatcgccttaccaaaataatttctgacacatttcacacttaattttatctcttttctaatttggtccctctagtacttttctcttttctaatttggtccctccagtacttt

SEQ ID NO: 88543 - DNA, 586 bp, Cannabis sativa
tgagttatatactcactcatttagtttttttctccatcaaaaaaattttgtcaaacccaaaggagtttcaagacaattactccatgtatggtgaggtgttgctcttacaatttggcaatctaaaacctttgatcctttgtgcgaagtgcgagaatactcattttttagttggggtttagagaatggtccctggtcctttagaggctatacctttatactatatgtttggtttcctggcattgaaagatcgtgttctgtgaataggttaaaggtgtgggtgtaggttcataacctcccccacgagtactactcgctcgacaatggtatccttttgggaggtatgatcggcaaggttataaaagtcgagttggacgaggagaagccaatgacctggggttcttttttcaggattttagttgatctaaacttcctcaatccgttgatgtcgggttgctattttgatctatcctctggggagaaaaagtggttacagtttaagttcgaaaaaatcggcattttttgttataactgtggtcggtcgagtcggtggttggatctccttttccgttatttggtccttggatgt

SEQ ID NO: 88544 - DNA, 506 bp, Cannabis sativa
cttccaaacctactctaagatgtcgggcccaggatgagtgggcttcacagggaacttaaacagtaaaggtgggatctttggtaagttagtttggaggcgctgatttagcttagatagaattgttgaggaggttgaggccgagattgcttggttgcctgaagttttgcggggtgtttagattggttgtattgtttttttgactggatttaggtcaaagtattggtggccacaaggaccagctacctttcattggcgttgtcatttgggggttgagttgatgagggtggttgtttgtttcgggaaggaaggcttcctgctttggtagattctgagtccccggaagacgagtgcctagccctcttatcctcccttctgagatgaggagcaatgtttgcatgtttcaatgcaacaatcgcctttggggataccaatccctctacgaagtcttctttgcctaagggaagcatgtgttccctctctttaggcacagcgcctgatggagctag

SEQ ID NO: 88545 - DNA, 678 bp, Cannabis sativa
aactttcagcatcaagaatattggaggtaggtgcaacaacaacaggtctagcctaaacagtggtacaaaggggaagtacaatacttcccctacaccacaaaaccaaaaagacaaggaggagaagtacacatgctttgcccttctacccaaaaaatctaagaccatttacatgaccacttaggttaccgtcccatacaagaagcctcctcctatcaagaaggataatagtaagagggacacgtccaagttctaccaatttcacaataatttttaccatgacatcagcaagtgtcaacacttgaagagagatattgaattcctcacaaggaaaagtaatccccacttgcatcgttatgtgtaaaaaaaccaaactcaggcacaagctgcccaaaatggagaccatataccatcagtagtggtgggtcattttagggtcataataggcaaaccccaaatagaaggcgagacaagcaaggctagggagcactatgcttggaatctccatcacgagcctaaaagcgacatcatagctgtcaaagaaagagactccaagaaactcaggcttggagagcctgccatctcctttatagaggaaggatgctgcccaggtcaggttccctcagaatgaccctctggtcataactaaacaaatagggaacatgacagttgctaggtgca

SEQ ID NO: 88546 - DNA, 1839 bp, Cannabis sativa
tggagaaatcgctctaaatgcaatccaacgtcggcatgcgaaagtttctactggcgatgctgtaccggtgatcaggttatcttcacattactgttgaaatttcgatattatgcattggactatatatgtttaaatatgtaattatggtttaattaaatcggtgtattgtgtgtgtgtgtagatttattccacctgatgaatttaacctggcattgctcactttagagttagaatttgtgaaaaagggtactaaaagtgaacaggtacgctgtgctgtgcttattgagttttacatattcaattggttctaaataagcatcattatcatgagtttctggttatgtgtttttaggttgatgctgttctcttggccaatcagcttagaaagaggtttatttaccaggtagattttttaccattttattttgttattgatcaaattgtagtttggactttggagtgtcatgatcagatgtttttgaactggaattatgattttgatcaatgtcataatttgtaaccctcacaagtgatggatttttttgatatccttcttctctatagctttgttcatttacacagttttgttgaatttcctaaagtgatatcttgttaaatcgttgattatgtttttatttttgttactcaggttatgacttcaggacaaaaggtatcatttgagtatcatggcaataattatatattcactgtcaatcaagctgctattgaaggacaagagaaatctagtggccctgaaagagggatgatatccaatgatacatacattgtttttgaaacctctaatcaaagtggaattaaggttagtattttttattttgatcattcgttcatccttatttcctgctttttgagagtgtttattgtagcattgttatgcttcgaacttgatagatcagttgcattgggtttagttttgtagatagctcagttgttgtctgttccttattgtcgtgaattaaattacggaatttagaatgaaagcatttactagttactggcaagtgttttcttaaagaacatgaatggctatattttctgaagtgtgaacctgctctttctgatatatacttaaggttaatggtgttgaagatttgcacttatggttatggatctttttagttctcaagtctttatttataagctgttgaacaggcttctgatcaattttactggataaatattaatagaaatcacagtcaacaaccaataaatagtcatttttgaaaaatggtgcatataatgtgtatttattattacaatttaacctttttgggtttccacagattgtcaatcagcgtgaagctgccagtagtaacatcttcaggcacaaggaattcaatcttcagtctctaggtattggtggattgggtgctgaattcgcagatatatttcgacgagcatttgcctcccgtgttttccctccacacgtgacaaataagtaatatatttggttcctcaagctatataattaactgttatttgtagaccaatctcttatgttgggaattttaatgatgtttagattggggataaagcatgtcaaaggtatgctgctttatggaccacctggtactggaaaaactctcatggctcgtcaaattggaaaaatgttggatggaagagaaccaaaggtttgaatggctcactcttttcttttcctaaaattaataaagacatcttgctttgtccttagagttttttctcaatggccgtttgtaagggaagttgagctctaatgagattcagacttttttgtttttggattcaaggttttaataatgataaaattgtgaaatcggtattttgaagtcatcattt

SEQ ID NO: 88547 - DNA, 1449 bp, Cannabis sativa
ttgattgttatgtttcgtgtacggatgtgtttttccaccttacgtgtttttatggctctccggttgactctcttaagcctcacacttggaatattctgaatcggattggtaggagtaatcctcgggatccgtggcccctcctctgataaataagggggaaatcccgacaggggcccctcctctgattttagacagttcctcgactcttttaacctctccccgcttgacccgtctggccccttgctcacgtggaacaataatgtagcatccccaaaaaacattcaagaacgattagactggggtattgctaataactcttggaccgataacttccctgacgccgctcttactcatttaggttttttcggttctgatcaccgagctcttgagcttgtcacttccaatcctccgggcactcgtcccaataataatagtaaacgttttcacttcgagaatgtttggcttaaggacccaaattggaatcatgttttcgtccagtcctggactagccacccgacccagcatgagcccatccttaatttcgttgctacccaagcttcttgtgctaaaaacctcaataattggaaccataaaaaggattttaattttaaaaagcacattagcaagctcgaaaaggacctggagattgcccgttctaattctgtttgggatgataatattatccggagaattaaagagctccaatccaggcttgactctctcctgtacaaagaagaaacttattggaaacagcgagcgaggacccaatggctggcccagggagataagaacacaaaattctttcaccgctacgcctcccacagaaagaaaataaacaaaatccaaaagcttcacttggccaacgggggtatcgtcaccgacgaggagggcattacccgtgaaatagaatcccattttaaccatcttttcacatcctcgaacccttcggaggaggatgtgaataaagccttggacggaatcacgtgctctctctcagagctggataaagccctccttgccgaggagttttccttggacgaaattgaaaaagcttttttccaactccccttggataaagctcctggtcctgatggatttaactctaatttctacaaagcaaactggacctctgtctgaaatgatgttctcaaagcagctgtcagttttctcaatgaaaatggggacatcgctcctctaaataccaccctcatcaatcttattcccaaagtcaaacaacctacttccctctctgaatttcggcccatcagcctttgcaatatcatctacaaagttatctctaaggctattgcaaatcggcttaaactcgttctcaataatttgatctctcccaatcaaagtgctttccttactgatagactcatctcggacaacataatcattgcccaggaagtagcgcactccatcaaacttaagacgaggggcaaaaaa

SEQ ID NO: 88548 - DNA, 1120 bp, Cannabis sativa
tatgaatttttgtaaatatgttttgaaatgtgtatatttttaaaattgtgtttttttgcacattttttgtaattatttaaaaaaatgtatacatttatgtaaaatgccctttttgttatgtattttttaaatttgacatgttaaatttaatcaacttattagaggaatatatttttagtagatgagttgtttgtttatggtgtttttatttttattataaataattttgtatttatatacatttacttactaactagttgcttaaatttttttcttttaataaataatattttatgtaatttagttgttaaaatagaccatatttaatatgatttgattaaataatttttaataatggaactccctattatttaggattagttaccgttaaccataatgaaaataaaaatcagatgtaattttttgtattgaaaaaagtgatgcaattctttatcactaattaaaaaaaaatcattataaaaaaaatagtaatgcgtcgaaaatcaaactgtttttcaaatagtattctacatcttatatatgatattggctataatataatacaaaattaacctcactcaaacttgtcaaaaccagaatagaaatgcacaccatagtgattagaaaaaacaaaaattaacttttaaaaatatatatttatatatagtgtttctataaatataatattaattggtaacttaggccaagaacccaatatataaaaaatctaaaaatttgaaacatatttaccattatattgagcacaaagatcataaataataaatcgggtttgcatataaaatatgttctctcatacattctctagccagagatgaagttacatatacattacatttgagatagatcataaaaaaaaaaaaagaaaacaactaaagcagccaatactatacacattagaggaatatatttttagtagatgagttgtttttttatggtgtttttatttttattataaataattttgtatttatatacatttacttactaatgtataatttttatttatttgcggtcaaattaatttttttcgttggagctatttttggaaaaaaaaaacaaaaaaaaaacaagttttcaagcacaatgtatgaaattaata

SEQ ID NO: 88549 - DNA, 1158 bp, Cannabis sativa
  modified_base (61)..(73): a, c, t, g, unknown or other
aaggaatgaccattccaatgtaacaagaaaaaaaaattaattatttttttatcaatttttnnnnnnnnnnnnnaattttattccattctattcctattcttaggctgaagtgagtaatttgatggtctagaaatttaggtggcatttggttcgatgtaatgaaatgtaatggaaggaaaataatttttattttattcttttgtttggttttattttaaagtattgaaatgacattctactagaattatttttttattattttagtagaatgactattagaatttgaaatagaaagaatgatactctaatgcaaaatgagaaaaatttaataattttttttattaattttttatgcattgatttgatttttatttctattttatgttttcgtttcattcaactaaaaagtcgaaattttatgtatgattcataggaatatcactttctatatttgattgtgcataaaaatgttttaatttataatgtattcataaaattaatttaataatataagtataattagcaaattgcattctaaaaaattatcaatttttttagattataatttataaataattttactggtgaaatacttttataaaataatttaaaaaacatttaataaaatttgtaaaaatattttttttttacaatcatattttattaaagtaataattaaaatcgattcatgcatttttttttttattttaaaaggttaatccagttcaaaaaataaaataaaaataatcaattagaatttttcaatttatgagtaattcaaaaaagaggtatgcgtaatccacaccctctacccaaagatgtagtcggttaatattaagctcaaattttggtccatttaaataaatacccaaattttacaaaattaaattaagtcataaataaataaacacacgaattggtaatccaagaaatagcaaaaaaaaaaaaatgaaagcaattagtgataataatataatcaagtcataaaaataactctaaaaaaatgatgaaaatctgaaattgtaagatttttttttttcttaaccactcaccaattactacacaatgaagttcatattggaaaaaaaaagtcaataacaataataattaactaattaagccaaactcactagtaatagtattacttttgaccacata

SEQ ID NO: 88550 - DNA, 576 bp, Cannabis sativa
atgtgtcctgtttaagacactaactgagtttatacatataaaattcgagaaaaattatacatttactaatactgagtacttgtaccgttaaaaaaattattaaatttatatactttcaaacccaacaatttagatatatatatgccactatttatatttttaaaatttttctcacattttcaattttcttaacaatgaaatgattttttctttcttatgttataagaactgttatagaaaaagattgaagtatttttttttttttttttaaatggtctacaatttaataattgtcaaaaatttgaaggatatacacaaataagaatttacaatcacatgtcgctatatttaaaggaggttcagtaaatgtaaaagttaagggtataaatttgaactagtaatatattttagaagcacgatatagtagtgctccccataattttttttcatccttttaaccccttcttccaaagttttccttgatcatgggtttgggggaaaaacactaatatgcttcttttgatttcaattcaatttctttttgtgcctatttaattataattaagaatttggtca

SEQ ID NO: 88551 - DNA, 533 bp, Cannabis sativa
aataatagaaatatatgtttttttttcgcaaattattgaaaagttgacccactttaatttgtgtgtgtgcatggtacatcagattttaccatagataagtatacttatttgtaactcataaaataattatactttattattaaaaaaaaaaaaattaaataattttaaaaattacttttaatatttttaattttttattcttctattattttatttttttttttagagaaaagctattaatattaatgaacaagttcatttacaacgaaaaaatcttcttcatgaagtttccaccaggcctgttctgaaatatttgggttcctaccttcactatttgttccttgcatttaatgcatttttgacttccactcttctacggtgatgattacacccctgatactcaaaatccaaatctttcttgcattaattgcacttgttatcttgcatttacactcacgttatttcacatttaatctggaattaggactcacgttatttcacatttaatttggaattaggaaatttatggctct

SEQ ID NO: 88552 - DNA, 745 bp, Cannabis sativa
tccccgcagataaggagaggcaactactccgaattgccaaatacaactacgccctagacgagttcagccggggacatgccgaggtggaagccctaaagaaggtcttgcgggaggagcaacagaatactttacgcgaggaggcctttagaaatccttgggacttaaacatggatcccctgacggattggttcaacctcttcgtcgatcctactctcacccccttcgcctctgagatgactagccagtttgtctcccatctgactcaattcccggccaaaagatacgcaccctgtgcctccgtgaactctatttaccaggttcaggatatcagcgctgccctggctgtggtgagttcttgtagttcattcctctctttttgtttatattttgtcttaaggcatctgatttcattcctgcttctttttctttttttttttagatcactgtagagaccggccgcctctctaagaccctgattgaccacgggtacgtcatgtccgagtttgggggcatggacgaggccttgaagagtctgcgggacttttcagctaagaggagggcattctgggaggaggcccaacagagggaggctcaagcggaggcgaggcaccaggaggagctgaaggctcagggcgaggctgtggccaagaccaagcgcgagttgcgcgaagccaaggaagctatggacgagctaaatgccaagttaaaatccatggaggatctgcaccaagcggatttgcagtcg

SEQ ID NO: 88553 - DNA, 780 bp, Cannabis sativa
  modified_base (267)..(271): a, c, t, g, unknown or other
  modified_base (365)..(373): a, c, t, g, unknown or other
taatcatttattatatagtcttatttcatttaagtatttaataataatggtgagtttattggcttgttaacatgagtaatatttaatgtaactaaaagtgaaaatgttatgactaattatatatatatttaactaaataatatatatatttttttatttttttttttcaaagtggacgagtgctccactacaaaaaatcttacaattagtcacaataaaacttgtaactaaaagtgaaaaagttatgactaattataaattattatnnnnntgttgtgactaaaatgtccgtgacaaaaagtattaatctcaaaaattataatttattgtgactaaatatatttttagtcacaatacttgttgtnnnnnnnnntaaattcgtgacaacttgtatctaaatactatgctttagttacaagtaacattttttgtgactaaaagtcatatttaataaaaaaaatatattatgactaaaaaattgttactaaattaaggaagtagtttttttaagtaaaatatatatatggaatcttaataggtattactcattaatagataaaaaacaaatataactataattattaattttaaaaatattaaatcattagattttagtccgatagcaaataataaaagagaaaatttaatttttatatttaatttagcttcttaattaaaaaaaaaatcaaaaaatacatatttgtacactatatcacaaatatatgtatatgaaaaaatacttaagacaaattcaattttttttaatcatttttttgtcga

SEQ ID NO: 88554 - DNA, 579 bp, Cannabis sativa
ttttctctttccttttatactttttcagtgcactagttcaataaaatatatattttttatttctataaaagtgaattatctttacaaaaattttgacaataataatatttggtattttgttttccttcccatttttatatatactatcatcagggcacaagttgtgggttggccacctgtgaggtcctacaggaagaacataatggctcaaaagagcagcacagttcagcaagagaaaagtgatcatcagaagacaagcatcagcggaggcggtggtgccgccgcccctaacaacagcggaagcggcgcatttgttaaggtttgcatggatggtgcaccttatcttcgtaaggtggatttgaagatgtatgagagttaccaagagctgtctgatgccttggccaagatgttcagttccttcactatgggtatgtattttgttttcatacatttattatattaatacaaaaaaaacatatgtataaaattatttattattacatcatgaagataataaaaaaggtcagtagtagttttaggggaaaaaaataataattaatcgtgttaaaattcgaggtc

SEQ ID NO: 88555 - DNA, 777 bp, Cannabis sativa
gtatgcgattgcatcgaagtagaaaatcacatgatgttagattgggacacactgaaattctaatttttgatattggggattttttttttgataaagaaggaagatggttcaaacgattttgcaaaaaaaaaaaaaaaaattaaatgtcatttgtaaaaactaattaattattcaaaagtttattttagaagggatgaaagtctaatatttgtaaaaaaaaaaattatgttttattataaatattataattaaatggtttgatttttaagaaaattataatatgaatttaaatataaaaacaaaatatttataaatattaatttctaaaaaggatttttcttaatatttaaattaaaaataaattattttaagaaaataattaattataattaatttaattttaaaaaagaaaattttacctattagtaacttactattataggttaaaataaatgtaaccatcatagttataataaaaatgtaacaattaaatagttactcataatttctttatatatatatatttatagataagagtgctctaagatatatgtgtttgtagtggcagacacatgattgaattttatggtgggcttagttatacatttaatataatccaaaacaataaataactagctaaattgaagtggaatgatggtgttcttttcccggctggtgcatttcccttggagagtgtgaaagctgagtttgctgcgagatgagagtgagagagagagagtctgtgagttaagttgagagtgctctgaaatgagagtg

SEQ ID NO: 88556 - DNA, 973 bp, Cannabis sativa
gagtctgaacatctctctctctctgtttcctttttctcttttgcaggcatgttctaactctgttttggtaattgattatctaaggagatatctggttagtgttaccctgtctaaattgtttttctcctatttcttaactttttcctttttaatttttcccacataatatatcttttttaaaacatatttttgtaagcattgcaaaagacaaaaatctataaaaattacacattttcatgtacatactagcatatgttaaatataaatatatattttgttttcaaaaaaaatatatataattatagtatatggaacatatatcttatatatgaaaagtcgtaaaaataaaaataccaacggtaacattttcttctttgcttatgagttatgaggcccattcctagttggagaagatatgtactagtatcgaatattttttgtttgttttttttttttttttgagaaagtttcactgttattataaaccacaatcttttacaacaacagagaaaataggaatttctcccatccaacaagtgtcaacatccaaccccaaagcatgtttggctaacccatgagcagtttggttagcagatctcttaacatgagagataacaatactagggaaagaggatagaagacaatgaacatcaaagattaaatttgaaaaacaagataaatcccaaatttcatgatttaaaaaattggagacacgaagagcatcagcttccacaagagtaaccggcaatgccagttgagatatccaattaagtgcatggaagagagtttttgcctctatttcatctgatatgaagcaaccttggacaggtttcgacatagccacaatgacttcacccttatggttcttgacgattgcaccaactcccaaaaccttagaaataggattaaccgcagcatcgacattaaacttcaatccaaacatattacgtagtttccaaggaattccttcagt

SEQ ID NO: 88557 - DNA, 734 bp, Cannabis sativa
ctagatcaaggacatagaccagaatccgaacccaaactcgaactcaaactaagacccggacacataacaagacccagacccacactcgggaacaaaaaccgaaacatgaattagaattggaccaagatctttgaactggaccgggaccaggacctggacctagacccagcctcgaaccctacctaagaccgaaacccggaactgaaccttgccacagactcaaatcatgacccgaacaaagagtcggatccaaactcgaccaaaacccgtagcccgtgacttgaaactggaatcgaaactagaagtagattaggaccgaagaataaaccatgaccaagacatgaacatagagccaaaactgtaaccggaccaagacccaaactcggtcaaagagccactctgcgatgggctccaaaatctaaatccaaacccgaaccaggactcgagacccgaacaaagacctaaattcagaccagaacattgaacatgactcgggaccccgaattgggatcgaaacccagactagaccccagtctaagtcttggacgaagacccaaacccagaccctgacttgggacatgaattgaaacaagactaggacccgtgatcagagaaccagagcttggacaagacccataatcgatgtcttgatcagggactcggacaaggacccgaagctggataaggacctagacccaggcccaaatctaggacccaaaaccgaaacttgaaca

SEQ ID NO: 88558 - DNA, 824 bp, Cannabis sativa
gtatctatcctaagcataatcagtgaagagaactaatgaagcataacttcagaaattctgctctgcattaaagctataagccataagcaggaaacataacaacgtggcaattttgtcataatgggtttgtttgcttagaaagtctactctgcattatatattgatatgattttcatcaaagaagatgaaagaaacagtggatttttatgtttaactaatgcatatgcatgtaagagaaagagacatctgttttgttcatttcctcactgctttgagaatttttaatcactcatataagggagaaaatattgtacttttggccacttgggcaaaccaaagagcttcctatttccaaagataatactattagttcacatttgatttcagaagaacaaattactgcgttttttctcttaaacaggatggctaatatgagagtttagcagtcttcgtaatccaccattagaggttgaatgaaatacaaactgattcttcaagttttgtaaatgtaatgtatgagaatatataataattaaattctattaccttccataacaagcatatatcaagaattataaaatgtagaaactatgtcctgggcacaagtaaaaggcagaagttagagtctttcactgtacccatcttttactttgataaccatacacaattctgagccagacacttgcttttaattttctagtgtatcctactatttatgttatcactctatgcaaaaatcatcaatatgataataacatactgaatcagattggattttcaatttgatagatgcaatcattaggaaatcatgaacctcaattcaa

SEQ ID NO: 88559 - DNA, 665 bp, Cannabis sativa
ggtattcttccagctttatggctgagctatttttatttaccttcacatttgaagtcttgtttctcctattgtgctatatttcccaaagattatgagtacaatgagcaggagatgaccttattgtggatgggtgaaggtcttttacttcctaaagagggaattagaaatgaagatatgggaaagaagtacttcaaagatctaatttctatgtcattttttcaccaatcaaataacaactatgaggtggagccgatttttctcatgcatgatcttatacatgatttggcaatgtttatttctggtgatttttgttcaacgatgaataaaatcaataaatgttctcgcaaggttcgtcatttttcgtacatgcagcaatgtgcaaaggccgatgaccctaaggaatttgaggatttatttaaagccaaatgcttgcgcaccctattgtgggaacaaggtccaagcagtgatcaactaaggttgttaaagattgaagacttgaacaagtcattcccatgcttgagagtgctatccatagaggacaatgagatcacaaagcttcctgattcagtaggcaatttgaagtatttaagatatttgaagttagattgttataatcttggagagatacctaatacaatatgtaagttgtataatttggagacact

SEQ ID NO: 88560 - DNA, 933 bp, Cannabis sativa
tcgatatctcgtctcccttggaagctgaagccttctggtttactaatggcagtggagttttgcaagagatcaggttggagtgatgtctgcttcttctctgattgtcaagttttggtaaaggctattgctgacaggagtgcccttcttggagactcaatcctttattttctaagttgtttgatctgttttgtaatttcaatagtgtgaatttgttttgaatttctagagatctcaaccaagctgttcatgatctggtaaattaggctacatcccttaatctttgtcaatctttgactgctgaagagatcacccatgttgttaggtgtttgaactttgtggtttgatggtgtttgttatctgtttttggaataaagcttgactttcataaaacaaaatattttaataaaatcaataaaaattaatgtaagtccaaataaaagtctaacagtagcaatctattttcgacctatacttaatttttttgaccataaaattcgtgtcgtgttcatgttgccatgtaaaaactcgtgttacaacttttgttttttctattggtgaaaccacacaaataatagtttctcatggctttccaaaaattaaaaaataaagaacattttcctttccttttctttttttttttttaaagaaaaaaacttctttgttccagaaagtgtctctttctttctgcgaagccatgagctttcgagaggccctaagctgaattaaacagcagccaccgtgcccagtttagattgagaccgattatctttcggttgtccaagctgtgaggagttttgtgaatatgatgtcggtgtttggatctgttattcaagagtgtaaaactatgttggttgagcttaatgttacttttttttttttgtcaaacagtcaactaataaagttactcatgagtttgctaaagcatcgttatta

SEQ ID NO: 88561 - DNA, 626 bp, Cannabis sativa
tagcgatactctctaaaaactattgtaattaattatatgagactcgatacttagttggaacaatagcaatattgacacatataaaggtgctaggcaccactgatattctttacatttctcaaaattataatattataatttataagctttttactacgcatatgttaactgtctttactacgcatatgttaattgtcttagaatttcgatagccaccaagtatttaaatatgagaattacttgaatagcattttctctgtaaatataaagaatttggaactttgaaaagattctctcatctcatatatattttctctagtcatttctctcttatgtttagagccggccctaggcataggcgggctaagcccgtgcctggtgctcacttattttaggggccgaaataaaaaaaaataacttttaaaaactatacatatattatttaataacttgtaaaaatatcatttatctttatagtaagtccctttttttatcctatagcccatttcaagtcaggaccgacctgtctatgtcctagccaatcccaaacttctacgctatattcttttctgtaactgtaagtggtgtatttgttgtagttgcaacaggtgtgcatgattatagat

SEQ ID NO: 88562 - DNA, 3088 bp, Cannabis sativa
  modified_base (2916)..(2916): a, c, t, g, unknown or other
accatgacctcaaacatatcagaatcactgaacgccgcaaatctagcagcaagggagctgccaattacaacactgctagaatgcttgagagcattggtacaaaaatggacacatactaataggaaaaaagcacacaacatctttactaagctggcaccacctggagaagacatactgctgaaaaattacacatactcattgaacctggaggtaacatttacatttctctaaaaaaaaaaggaatcctaaacatacagtaaatgcttatgttgttctagtgttgttttaatatttttgtattgttgttgttaaaatatcataaatgcttgtttttaaaaaaaaaaaaaaaaaggttaaagcaacaacagattacttgtttgaggtaacaagaatgaaagaatcgtcggaagtagacctcaaagaaagaacatgcacgtgcaacatgttcaaaatagatgaaatgccctacggacacgccatggctgtgatgagggagatgaacatggacccatataactactgttcagattattacacaaaaaaaattggctagcaacttatgcagggacagtgtacccaataggacaccaaagtgagtgggaagtaccggaagaagtgaaagacattatagtcttgcctccgcatgaaagggttaaatctggaagatcaaaaacattaagaaggaaagctggatgggaaaatgatcaacacaaaaagtgcagcaaatgtggggagctggggcataacaagagaacatgcagcagaaggcgtagaagggaataaaaacaacaacagaacaacagtggaaaaacaggagaaaactgaacatacatttgagcatgagatattgaggaatttaaatttctgaaagacctagcgtttaaagtttttatttgaaaatattgattacaatgggatttgttcatactttagaagagttattaaaagaaattggatactaaattgaatatatatatacatgaaagttattattgatacagtttgtttttttattacagtaatggaaatttttattcaaaaaagttaataacgtaactgaattgatattaatcacttaaaaatgaattataacaactgcaaaaaaaaaaaacagaataacaatagaacaacaatattaaaaaatccaaaaaaagaagaaatatgaaataagaatactaaacaatttaacataacaacttgtttatacataacaaaaacaaaaaaaaaaaaaaaggaaataaggattacatattgtccacagaaaacttaaaaacataaaagaacaccaatgtttgttccaaaaacaacattaaaactactaaaactaaaaacaagtacgatctgattgaaaatgatatatcatttcttcggaaggttgggagaggcctcagattcacctttaatgttctcaagttgcttcttcatgccataatgataaaaatgacacaaccaaatgatcgcggtgaatttccacatcaaaatcagaggatgggatgggttttccatcaataaaatactcagcaaaagatgctacgaaaacaccacaatcacttaacaacaacaacaaaaacatcataaaaacacaaaaaatacactagaaaatggacaaaatcacataacaaaacataactttacaaaataagaaaaaaaaaaacattgagcattatgcacaaaacttacgatgtgacctgctcgggtaaaccatcaacagcaacaatcggaaacggttctatcgtgataaacttagattcactgcgaaggcctctaaagtctaacatagagaaataatagggtaaaataacaaaaaaaaaaggcttgcaagcctctttggcagttgtcatatacctgccagaatgcaatgaattgtacagatatatttgccgctcggatatgtttaaacgaccacaaatccaatgatcctgtaatttgacattaataggcataacaacgtgatcgaccaagtgccaaggagtggcacataatagcttaccaccacgaatgtactgtgccacattatgagaaagagacaacattgatatatcattgtttttctcaacaaacttatcatacaagtttgtaatgctagattaaaaaagacaatcagttgtggtgaccttgattttcggttcaacagcatactttattttcttacgaagatagtagaaaataatgtcaatgtgctgcaaataagaaaataaaaatgtcttcaatcagataaaaaaccaacagaacaacacttaaaaacagaaaaaaggaaaaaaaaataaaacagacaaagaacaacacaacatgtaaagaaaaaaacttacagtattcgtaaggaaacaattaggatagctaaggttgtgcaaccacatcttgctgctaacttcctcaaccccaaaacgaaatggcgaaaatattgtgtccttacccttacaatacacattagttgttgtgctaaaaagaaaaaaaaaacagacatcaaaacacaaagaaaaaatgaaaacaataacagatattgaattgaaaacacctaaaaagacttacttagatttttgctttctaagaccattaccaagccaaatgtcaaactcagatttcaattggggatcaacaggttcaccaatcttgtcgtccaaggggcacaaaccacccacatatttaaccaccttataaacagacttatcaggagaaacagaagatgaacctgatttggaggcactagaagcaagctcaatttgtggagacttcaaaactgttactttcttccgatccctcttctgaggacgtaaaataggagtctcttaaaaaacaatcatttcaagatcattatgttgggattttatgccctaaataaaacccattacaatacaatctgatatgttatcaatagaagattagaactcatgtatgtttacatgtagttttcatgtntatggtttaatgtgtacaaaatttgttaagtccagaacatttatccaagtgatgtcaacaagtggaatgtaattgtgattatatgcttcaaaagacaatgtcccttgattcatcagtgcactggatttacactgatgtgatagtcaggaataaagtatacttacaccttgga

SEQ ID NO: 88563 - DNA, 581 bp, Cannabis sativa
aacgtcaaagcatcacaaaggcaatcctcaaacctcggttcggatagccaaagcttatcaaagatgaatctaggaattggattagcctggccagcttgaaaatgaaaggttaatatcaaaggtcgatggtcagagccaaaaaaatcaccatgaagcagataagggttagggaaatttgcatcccaatcagtattggagaggcactagtcgagtcgctcttgggtgtgagacggttatttttgtcggttagtccaagtgaagggactacccaaaggacaatgagggtgaagcccgtagtcatcaacgaaagattgaaattgagcagaaggactacgagacatgtcaccccctattttgtccgatagagaaaggtaatcataaaagtcacccattatgagccaagaggataaacgagggttagagccaagacgattgattaatttccatgagtgaggtttattatgggggttaggcgcaccgtaaaaagcagtaaagtttggaaatttaatataacagtgaaagtgacttatacgataggttgaaaatgatcaattcagttgctgtttccagtaactcttctt

SEQ ID NO: 88564 - DNA, 604 bp, Cannabis sativa
  modified_base (291)..(297): a, c, t, g, unknown or other
gtggtttttgtagttttgagattttgtgatgtatttgagaaattgtaaaatttgcatatgcaaattaattcggaaaaataactaaaaaacacaccacaaacgcattgaatagtaaagtcaagagtttcttaatttagaggttatccccattgttgacacggatttagcttgagcatagatcatcattctaatctattgcatcacttttaggtggcgtttggttgggaagaatgaaaacataagaatataaatgagaatgggaatagaaatgaaatggaataaaatttaaannnnnnnaaaaaattgataaaaaaaaatcattaattttttttctcatgttacattagaatggtttttccttctatttcaaaatggaatagtcattctaccaaaatgatgaaaagagtattccattgaaataacattccaatactttaaaatgcaaccaaacaaagaaatggaaagaaaattgtttcctttccattccattctatttcattaactccaatcaaatgccacctttatgtttatgttctaagtataacttttatatagcattatatctattctatataaagtgtgcctatataactgaaattcttgg

SEQ ID NO: 88565 - DNA, 695 bp, Cannabis sativa
acaaaactggagaaaaattacaattttataaatttttggtacttatgtcgctaaaaatattattagatttatgtcacttacaaattcaaaagattgggtacttatgctgcaatttactcaaaaatcttcttgtgattctctcatactgataaaataagtcatcccttgttgtgttatctctataaagatccaaaactgatgttatcatcgtactccacctgatgtaataaataataaaataattattcaaccaaactattaaaaaaatttatcaatatttttaatttgtgatcattactaatttttaatgtaactgttaacgtggattttcgttaactaataaataagtacttttgtaataaatgatctccaaaattaattaagtaataattaataataataataatagtacaataaatgaccagagaatttttatgtggttgaagttaattcttcatagtccacgagtccatcttattctacgttgataaattttatatagaatacaataaattattttacagaatgaataatagatataattctctatctatttccgaaaatggttgtcctttattccttgggttttgtctctatttatactagtctaggatgtaagttattctcttgagatcttatcacttgtaactattcgtgaaacatggataattcctacgtttcatctttacgcacat

SEQ ID NO: 88566 - DNA, 623 bp, Cannabis sativa
attttggatgatcttttggctactgaagagcaatattggcagcataggtcttgtcttgattggatgcaattgggagatcgtaatacaaatttttttcatgctaaggcttcagctagaaattctaataagaagatcaattttttgcaagattccaatggtaataaagttacttctcgagaggggatttcaaacatcatatcttcttattttgaaacattgttcactgctactgaggaaggtcattgggcttcatcacatgtgttatcgactattcctattaccatcacagatgctcataatgattttttacttaaggaatttacgacggctgaggttgttttcgctttaaacaccatgggttctgataaaagtcctggtattgatggtatatcggcaatgtttttcaacataattggcatattattggaagtttggtttcaaaatttgttcttcatgtgcttaatgagggtggtaatcctgctgagttaaacaagactttcattagtttgattgccaaagtcaaaaagcctcacactatgaaagtctttttcccttttagtctttgtaatgtcatatacaaattgatttccaaaatgctagttctttgcttgaaggaagtcctc

SEQ ID NO: 88567 - DNA, 841 bp, Cannabis sativa
ccaaagaagactcctctggctagacggtggtctattacgcttccaacctgctctcgaatagtgctcttccttgggctagtgtacttttcaggatagcagcattgcccatgtatgaaagatcatcattagagttgcgcagcttgaactcatagatgatttttgaagacaagttgacgtactcgtcccttatggcctgctgaccattaagcattgccctcagcttctcctcacacctcgtgaggtcagtccccaacctggagatgttagcatcttgcatagttttctcctgattcctggtgccaagcatggcctccaaaccagaaatcatgctccaattctgcaggctaagagcttttatcttagataaagcctggccctttgctagaagattagcctccttcgccagtagagcagcctccaaggtctttatctactcacgaagagtgcttggagacccccaagagttgtcacgtggaaagctcaacttcataaaggcctgatagcaaaacaagatcaaaatcagtgtcagaagacaacactagccagcagcccttctatgaagttgccaaggccaaccaacccctcaaagacacaacattggtcgaccaacttcatgcaatagtcactatagctagccagcctgtaataatgcctagatatatgagcaaagttaactgtgcaactcaccgcagataaatctcgaaggctagcagaatagagtctatttggctcgttgtcatcaagctcttaaagctcatcatccacagaaaggctctctctagatgcctacgagttgcctccatggctctctgcctcatggctgagtctactccccgactag

SEQ ID NO: 88568 - DNA, 1110 bp, Cannabis sativa
aaaataatttccaacaaaccgctcacactgcacaaactgcccgcacaaaaccacattgcataaaaaatacagtttgaaatcctttgcgatgcgattgcgatttgcattttttccaaacagcgaggtgcagtgcagcttgcggttttgaatttaataattgcggttcaaaccataccgcactatatattacaaagttaccaatttttacaatatgatttttattcttttttcatataagagcaaatctatgtaatatatgtatacattacattatttctctagagacaattcagtataataactactttatgattagtatatataatatgatgttaaaattttaataagattttttttgtattgttaaaactttatagattgattttaaatttttgttataatgttcgataatgatgatagtttaaattgctcaaaccgcaccgcaccgcaccgcattttcgcggtgtggtttttgtggttataagatctcacggtgcggttgtggtttgagaaattagaaaaaccgcacatgcagtttggtttgaaaaaaaattacaacctgcaccacccacaccgcaaacacctctacctataaatactctcattttctttgggtagggggaggacaatttttaatttacagacactttgctaaaatttctagagagcattctctcaagaaaaacaagaggaatagagaagcttacactgtaaacacttataatatctaaaccggtgcccagagaggccaatactactaactcgtggactaaggatcattaacgtctgaaccacgtaaaaatatatttgtttattatttattatctattatttccttaagttctaaatataatcggtttcccaaaatattggtaaatattttggtgctttcattgagagctgaaaagagagaagcatcacctactagacccccactggccaggcgccgaaggtgagccttctctctcccctccaaattctgtgcaatatgagacaaatgtactgttggggattatttaccaagatttagatttactaccatgtatgttatttaacatcctaattatgaatttctaaaacaatgtaatttaaatacatataaagtttaag

SEQ ID NO: 88569 - DNA, 732 bp, Cannabis sativa
tgtagaaccccaccagaaccgagctattagcgcttgaatttcgcgaatcagacccttcgtcattctaaaactgctcattaagtagaccgggatagcttggataattgatttgatcaaaacctcacgaccgacttgagagaaaagtcccatcttccatccttgaagtttctcccaaaccttattctgaattaaaccgaaagcctcttttttgtttctacctacaaacgctagaagtccaaggtacttagtgtggttttctataaaggtaacccccaaagaagtagctagtctttgaccttccatatggctaatctttcggccaacacataagttggatttgttgaagttaatgcattggccagaaagtgtagagtaggttcgtagcacctccgcaagggcatttccctcttctattgttgcatccaagaaaactagactatcatcggcaaacagaaggtgagtcaatctactatccaagttaccaaatcgaagaccatgtagcttattggctcgactagcttcattcagtaagcaagacagaccttcggagcagatgagaaacaaaaaaggtgatagcgggtccccttgacgcaagcctctttctcgaatgatgtgacctcgagcttctccattaagtaatactgagaaagtgaccgtcttcacacaacccatgatcttttttatccaccgctcgtcatatcccaagcacttcatcatttcttcaataaaatc

SEQ ID NO: 88570 - DNA, 817 bp, Cannabis sativa
  modified_base (559)..(567): a, c, t, g, unknown or other
gtggatccggtcgtcgattgccctcgtcgatagggtcatgggttctggtcgtcgattgggtccaccgtgggtcaaatggggtgttgcaccgtcactgtgggtttgagcgtggtttgagcgagagggagagagagaaggctgattggtttgggatttcaaatgtgaggggtattatgggaaaaatggtaatgtggtcatatatggccaattttaatacatatggatttacggaaaaaatattaaggtactttatgcatatttaatcaaatttcttaaataattattgcgttgaaaataaaattcaatcatttagttactaaacttaccatgaaaattaattattttaaaatttatttttaatattataaattatttaaaattttacgaacatattataactattattatagacgaccacatatgtattttattattgggaaattacctcatatactttttttttatttttttttttaaatttacggtttgaatttttaaagtagttgcagcgctaattgcaataggggtttctgtttgattttttgttgcaatttaggtnnnnnnnnnagttgcaataggagtttctatatagaatttcataaaaatgtaaaaaaaaaactattttgaagtgtaaaaatgaaaaagtccctttattatttctctaagtactgaaaataaaaataatattcctactttatttgtacctaaaatttcattaaataagctttattaaattgttttgtgagagtaatgtaaattaaaataaggctaattagtaattttttttccccgaactttgacatgtactaaatcgtac

SEQ ID NO: 88571 - DNA, 1246 bp, Cannabis sativa
  modified_base (1081)..(1083): a, c, t, g, unknown or other
tgtatattaaaatcacccataataaaaactaaaaatatacgtgtgttatgtgtatctttttgggaaaaaaaaacactaaaataattatatagaaaggaaatatgataaagaatgaatagtatcacatgagaatgtgaaagaaaaaattacaatagccttttaatcacttttcatgaatctcaagagcctataattaaaaaaaaatctcaatcaaataatttatgctaatgaacaaatcatgaataattcgaagtcatcaataatagcaaaatataaaaaaaaaattatgtctccaaataattatggagaaattttaataagtgagagaaagattaagaatctatctatttatatttatttatatataaaaaaaaagaaatagagtgaatattgacaataccaattagaaattaaaatcttaatgctatagaggcaacattaaaaatactatcgttgacaataaaattcgatcagtaaataggataaatggaacattacgtaccatagcatgctctcttcactttattataatgctaatcttttgatcaaattataaataaaaatcaactaaagcataggaaaacaccatcatcactatcatcataaataataaatcagatccaatactaatgtaacagacatttagtatacaaaaaatatcactgaaatataaaaggaggtacggtatcaaatcgcaactttccaaaaaaaaaaaaaaacaatatacataggtttaaatttacatgaaatatcattgaaatataaaaggaaggtacctgcaggtgtgaaatcgtaactttcaaaaaatatatatataggtttaaatttacatgtattttaaaaattagaaaaagtctaaaattagatatttaatattttttttaatttatatagagaaaatagaaaattcattatttatatttataaaatttaataaaaaaaattaaaattgagaaaattaaggagagaataaataaaattatttagagcaataagttactcatgaatttctcataattaaactattttatttttaatataaataaaaaatcacccttaaatttctcataaaccaagaatnnngttatataggcacactttatatgaatttatagattttgtataaaggccgtcctcagtccagccgcatcaatattttttttttcttttctttattaattagttgttgtatataatgtatatatgttacagtataatttagtatatatattttggtttaaacaat

SEQ ID NO: 88572 - DNA, 1280 bp, Cannabis sativa
  modified_base (289)..(308): a, c, t, g, unknown or other
  modified_base (1239)..(1247): a, c, t, g, unknown or other
aaccctaggagaaattctatataaggaataagatggctctcattctcatccaatctaagttaacctagttttcattctttgtcagacaattaaaaacttgagaccctccttctatagatttcgaattctcctctttttctcttcataaattttgagccctttagtgatagagtacatgtccattcataccaagttaagtacccaatcatagtgtggaagactgtgaagaatccaacacgtgaaggagaactagactcagatcttgttaatactctgcgacagaaaggannnnnnnnnnnnnnnnnnnntggaaggagacatattattttgctaccaccaatgtaaggttttcttaactttatatgcgtttctttttattattttagagaattcatatttagggtatttatcaacatacatgttagtaaatctagatcctggtaaaataattttcaacaattttcctgaaacaaaagagaataagcgtaaaaccgaaacaaattgacaaaaaatactctaaaatatgttctaaactaccctaataagaaagtataaatctcgtttatcaaactcccccaaacttcacactaactcgccctcacgtaatcatactaaacactaaaccagacacaaaactaaaactgacaaaacacataaaagtcaaatcaatcacataaagtaaaatttgagcctcaacctttccaataagccaggcaacaaaattatcaaaaatctcaactatttatcaaatctaacttctcagctcaatcacatcataatccactccaatcctttttcgaaatgctcacgaaaccataactatcaaataacaaacatttgaaacaatttatacatgtcaaatcatactaacaatccatcaaacctcttattccatatgtttgcactacttactattctccactaatataaataatgcatgttcaaaaaatcaaaaggtcttttaggcttaagacgtggcttaggtaagggtagatgagattgtcatttaggctaaaagtataccataagcacaaaccaaaaactttttcagtgttcttattcataaaattaaatacaattacattactgtgagataacttagaagaagaagaagatgaagtagtagttgtagttgtagatttcattttcatccaagtttagctaaagtgatccccactacactaatgccatgttcaacttatagtataggggtcatgcctgttgggttttatgccctannnnnnnnncaatttcaatgtaatccattttattcaatatca

SEQ ID NO: 88573 - DNA, 1217 bp, Cannabis sativa
ccattgcataagcataaggagcttcaaagggctcgtgagagaaggtcagaagtcgctcttacagatcaagtagttaatggtagaaaaccactggttgaggtctgaaatttgtttgccatttttctggattaaacggaccaagagaacattcggtttacattttgtagactttacagtgttccaaatggatgacatttctttgagacactttttttttcatgtgttattatcattttgatctaaaattttgtccaaagtaaccgtgtttgcatgatcatgtgtaaattatatcctttattattaatgcactcatttttttctatggaaataaatatagtttaaagtgctattatagataaaaatcattgctgtttcacacatgattttgatatataatatattatgattattgcatttttcattggaaactagttatttgttcttttaataattgtgttggggttaggtacattattcttgtcattcacataaagttaggttgtagaagacgaactgcatattgcattactctcccatcgacggtttctataagaataatattggtttaggtagaaagtgttggattaaattttttttattgtggagatatatgtataatgtatctttatatattaaaagtgtctatttaacggcaattcttggtttaacagaatattcttttcttattctgttaaatttaacgatatactttaacatcaacgttaactccaaaaaagaaataaaaaaaatattaaaattaaaaccatagtaagcctactttcctaaaaaattgtaattttttttatgaaattataggtttgatggtgatgatgaaactaattccactaaaatcttaagtttgttgatggcaatgagaaaattacgatttctttattgaagaaaatggtgaaattacgattctggtagatgtatatttccttgtctctgaagcttatctcaacgtcttatctcagaagcttttagccaaccccatttgttttgttagggtattgggtctcaagaatgtttcagtttaacagtagataaaaaaatcggtggaatggagacatttggggatttaataattgggaaagcactacaagagaattggggttttaatcacaactttttagtctttgtgtgcctcccaccaaatcgcatgcacggtgatttattttcttgtctttctttactttgaaccataatggtaaaggtga

SEQ ID NO: 88574 - DNA, 689 bp, Cannabis sativa
ttattttatcatttattacttatttatttctgtagtgaatttattgcaaaaaggctattaatttggttaacaaaaatctacgttaacagtttgattatttcattgagagccttggtgataaaaacttagaaaaatccctcctcataaatgcaaatctatccatattcaatggctgataacaattaaaaagacggtaatctcttcaagaaacaacccatcatcctggtaaagagcccatgggatctcaaagacacaacacatttgaaataccacgtttggtaatgatgatccaaactcagagaggagaaataaggatgtcaataactctgccagatacgtgcctaggagtgagaatgtttatgatccaaccagatatgtgccattggtagagttagagaatagacaacttcgacaatgattgggtgaatctaatcgacgaaacgctgagttggagagagaagccgcagcagctagggctacacaaaggacaatcccttagaaccaacctgatcctgcagtaaggagaccacgatgaagacttcgagtctctaaaaccaggaggcaagaaacaaaccaagagaatcccccaaatacctaggaggaaaaacctaggaataccagagatgtcctatggactgaacaaatcaaccgaatcctaataacgcgaggaaccaagaacaacaacgaga

SEQ ID NO: 88575 - DNA, 1116 bp, Cannabis sativa
gtttggagatgccactttgaacctggttctcattggatgagttttaggagctgtagggacaactttgttggtttctagatcatctatactagtttcagctaacacattgggtgcaaggttttgtgcattatctaggacaattgatgatgtagtaggtaagtactgggtgcttgatgtgggaatagagacaagttggacatgtcaagtaaaggctggttgcagtgtataggatttgatactggagacatgttctgtggtggaatgagacactgtatttaggataagtggtggaattatagaagtatggtgcaaggtgtgggtttctggaaaagtttgtgtaataggagatgtgtttgggacaaagggctgcaatgtagattgagatcctggttgagaaggagatgtctcaggtaaaatatcagatgacaacaagaaaccaaaaacttgattagtgtaatgatgattaggtatagttgaaaaaatagtagcaagaaaacatggttgagaagtgttgtttacctaagagggaggaggagcagtggtagcagaaaaatgatgtttattaaaaatcatattcctagtattgtagatcttgccttcagagttctcatagatgtaccttttgtgatgaggagaataaccaaggaacaaaaactgctcatatcaaatcaagtttgtgagacttgtatggtcttaagtgtgaaaaacaggcacatccaaagagttttagaaatttataattaggtttggtaccaaatagagtttcataagggcacaagtaatcaaatacagttgtgggaagcttatttatggtaaacactacacttagaaaagccagccaccaatatgacaaatccaaacttgattgagccaaaagagtaagtctagtttctgctatatgcctatgcttccgttctgctcttccattttgttcatgatcatgcgggcatagatccataaacatgatcccttgatcctttaagaaccttgcaaaaggtctatattcacctctagtcagcttgaacacctttaatggggaggttgaactgcttttcaactatactcttgaacttaagaaacacatcaaaagcttgagttttaagggtaagagagaat

SEQ ID NO: 88576 - DNA, 541 bp, Cannabis sativa
ggattagtcttttggcagctggtttcaagatgttgttagcaggtggaatgaggaagagttaaaattagcggttatgctctgttggtcatacgattaagatcactgttaatgttattttcgaagagcaaaataaatacagttttggttaggtagctagaaactgtaaaggtaaaaatctagtagcaaaatgggcaaaattagctctgagtttgctaaagttatgataattaaggaagttttaagttggataaagaatcaaagcttttctaatatggtagcggagttagtttggttactattcaagctattagaagctctatttttcttagttttgcttttggttttgtgttactgattgtcaaacattactttagtttacatgatgtttttttttttatattttgtaaacgatttgtgaatcgtattactcactacttaattagagttactattttaatagttgattttacttacagggagtcactaccctgttaagttgattgatatactttgatatttaataaaatttgcatattttatt

SEQ ID NO: 88577 - DNA, 827 bp, Cannabis sativa
tttgtctatcaaattaccaaaaggggagattgtaaaatcttttattggcatattttataaaatagataaaaaaaatgtttgtggtatttttgaaattatttttatttgtttattcattaaattcgaacatttagtttccttttcttgtgtgagaaggattttcaaaatcagattttataccttttgactttgtgtgaattaaatgagtttttcttttatataatatttgattttattttttactttttaagaaaattcttattcatattttattccttttgatctgatttcttgaccaataaaccgtgtacaactatgtgtattaatgtagttaaagttactttatttatttatggaaactttgctgaaattctgtccaggttcagtgtgtctgtttgaacagactgactgcctgtttaaacagattttgactttcctttttagggagatttttatttaatgacctgattgttttttggttgcttgatcacgacctagagagtttctaaagtgtataaatacacccttaagtcgctagtattgcttagctctcttggtatattaattctatattacttttcaaagttagagagtgttttctttgttgtctgaagaacttgagttcaacaagttcttagtatgttattcttgtgttactctgtattatttcttgttgaaattgtgcaggttgaacaccttggatattgttaatcaagcttcaagagaagtcttgtttgtgagttactttgtcgggaggaaaaagtgcatgtgagtcactcttcgggaggaagattacgagttaatcactcttcgggaggaagattgca

SEQ ID NO: 88578 - DNA, 862 bp, Cannabis sativa
taatcaccattgtacatattgtgggtatgtgtatgatcaatggtgaacttagtttctctacaaatcttccttgctttggtgcaattaaacaaggcatgaccaatcgattcccacgcattattacacaaagagcaagttgcagaatcaatcactttcctacggcacaaaccagtagcaacagggagagcattttgcatcacccgccatgcaaaaattttaacctttgatggtaagttcaagctctaaaaagttttccaccaagtgtaatgagagtttgatccacttgactctcatttctctgccaaattctcatcaaggtgaaagcatatgagttaaccgtatagcagcccgtagtagtgtgatgccaaatgagacgatcattggaaggaaagaagttaagagaaatggtgacgattctgtccacatctatataggctggaagtattggatttgtcaaatgggttaagtgttggcgatatggttcgacaagattaatatataaacaataaacataaaatagaataaaacaaaagaaaattacattgtatatccactttattttacttgttttaatttttatctctatttttatattctttaagatatatccacttttatagatgatgtccttattagaccccttaggttaatgtaagatattaaataatttaatattgaaaagtaactaatctaaaataaccgatccaatccttacagattggattagattgtatttgagctattatgcgaattgaatttgatccaaaatataaaatccgcacttaatgcggatcgaatgcactataaacaaaatagtgcgaattggattacattaacacctttaattttttttatttttttt

SEQ ID NO: 88579 - DNA, 597 bp, Cannabis sativa
taattatttaatctaaatattattatataaaataatataacatattatgcatctatgttttcaccctaattttaaaccacaataaccattgatataaagcaaaaataattttatacacaagtatcaatacataattatagcaaaacaaatttaccaaaatttttcctttgaattgaatgaacattccaattaagaaaattccaacaaccatactgacatgtttacatatatatatatatatatatatctaatatatacatcaataaattcgtattaatcataaataaaaaaaaaatctaaacaacccaatttaaaaaatgaaatcaataaaaatacccttacaataacattgaaagttcttgcctttatatggaaagtgaccatcttaaaagaaaaaaaaataaaagagataaaataagaaaaaagaaaaaaaaaaaacttttacatctttaagatgaagagaagaaggactaacctataatttatatgagggtaatatttcttaacttctgatgtccaaggctcagcgtcgtccctgtcgtctgcctaaaaattaagaatacaaaagaagaagaagaaaaataaggaaacgctaca

SEQ ID NO: 88580 - DNA, 521 bp, Cannabis sativa
attaaattttattgaaataaatttaagtaaaataattttttttctccaaaaatttagatttgtttaaataaacataacattctttttagtttaatttctgttttttttttctaataattttatatttttgttgaatttttaattattatttttattttttaggatatgaatttgtaaacacaaattatctccacaaaatcttagtttttttttttttttttgaaatcacaaaatcttagtttatttaaattatttattggatttttaataattttgtttgatttcttatgtgtttagaaatgaaataaagtttaaaaatactttttttttgggaataatttaagttttttaagtaagtttaatttgttttttattaatttattaattttattagatttttaataattcttttagaattaataaagaattataatttttgaaaataatatttttttaataaaaagaggcaaaatttagcattcgtcaaagtttacggagtcaaatgctaatttttaacggta

SEQ ID NO: 88581 - DNA, 1043 bp, Cannabis sativa
aaaataatttccaacaaaaacaacgatatttacattatcaacctcgaaaagacatgggaaaagctccagctccctgtcatggttgttgttgttatcccagcgagatgccctaacgagatgcaacttgtagcgtatctgaatttacgtcagtcttgacccagtaaaagtggataaatcacagctgcatgattatcaaataataataatcgtatttatttacgtggggtgtaattaaagcccacaattttgaggaaatattattgtgggattcgtatctgattgtagttaactgccaccgtatgttactacaaataggggaagaaagtattgaaaaagggatgaaaaatccttgagagaaaagaaccctagtttgtatcagaatactctgaataagattgactcatagactatcctcctagccaaaagaaaaatctttctccatggctgataacagagaaaatgttgatactcatcctgaagagactactcaccgtcctggaaaagagccaatgggctcacggaggcctctcaattcacgatctacacggtgaaggtggccagaacccaaaaacagtgaatgaagatcccaacataagtgttggtggtagtcaacctatgggtgatggcgcctaagatcccacgagatacgtaccgattgtcaagttggaaaattatcgcctcaggagatgtttggaagaggcaaatcgaagaaacgctgagttggaatgggaggcagccgcagacagagcggcacagggaaacaacacacaaaacaagcctaatcctggagtgaggagaccacgagggaggccttgtagctcacgaactaggaggcaggagacgacccatgagaacccttagaacgctcaggaagaacaacctggggaaactgaggtatcccttgaaaatgaacaactaaatgatcaatcatatccttctcacagaaattagaacatgaggcaacctgggactagggaacaggaaatccctcatgaaaatgagggaaatcttgggagttaacctaggataggtgggtcaccacc

SEQ ID NO: 88582 - DNA, 528 bp, Cannabis sativa
  modified_base (355)..(365): a, c, t, g, unknown or other
ccctaatgctaaggcacgctacagtgtctttttttaattacagtgctgtctttgctaatcaaagaattttcttgaaaattgtgtcaaattaaaaacttttatattagacattaaactttataacttacaaaatcatttacaagtatcgggatcccgtttttaaacttttatacaaaatacataaccaggtcgcacagcgactacaaaataataaccccagatgtcccgagaccaaacaatccaagtcacgcttccacgacatgtacaacctcatctttgcccaggctcattcctgttcaactttcgcctttcctttacctacacatggaacagaactgtgagtcgacaaactcannnnnnnnnnnatataacatatcatataataccaacttgtatctaggcacccatacacctatttataaggctgaacaaatgagtaagaacgttccatactagggtacgactattatatcacatacactacgtacctcactatacgagtgttggtagggtttgtttcgtaccctg

SEQ ID NO: 88583 - DNA, 1182 bp, Cannabis sativa
gtcaaagtctgtcaattcatggccaatcctcaacatactcattagaatgcagtcaaaaagaatactgagatatctcaatggtacagtttcacatggtttgaacttcaaatgtcccaaagattatgatgtcactgccttttgtgatgctgattgggctagtgatccagatgatcaaagatcaacatcaggctttaccatttttcttggtcctaatctggttgcttggcaatgcaagaaacaacatactgtttctcgattaagcactgaagtcgaatacagaagtctagctcaagtggtatctgaaataacttggttgcattccttgttttctgaacttcatattcgacttcctcgaccacctacaattttactcactgccaatccaatcttacacgctcgcactaaacatattaaacttgacctctatttcattcgagagaaactgcaatagaagctcattcaagttgtgtcaagacaattaacagttgacgatattaactgtttttctgttacaagctccttggtttgtgttgtatagttgttaggagtttgttgggttggttgtttgcttcttggctcaattgagcttgtatataagcttgtaattgtgttcataacagaataagattgattcttttcatctttctctttctctctctttcttctctcttttcactttacactgttactcttcttttactttactctgtttctttgagcttgacaacaatggggagagggaatcaacatttcaacatagtcaaccaataaaaaatattttctacaatatatgaaatttggtgataaaacaatcattgaaaatttaataatttttagtcaaatttctaaaaagatatatattaattgcttgtaatatattgataataaaaaataaagtgtccaccataacacgttatttcgcattaatcaattaagttttataattttagaacaataaataataaaaaagatgtgaaataatgagtattagtggagagtaaatagtcaagataatttttttttaaaacaaaagtggttatgtcaaataaaacgagaagcaacccaactttttttctatgatttacggatttcgaaaaattatttttaataattaaaataatttttcaactgcataattatcattaaattaataataactattaaacgtagtcaaaaaattaa

SEQ ID NO: 88584 - DNA, 638 bp, Cannabis sativa
tttagcaaccaaccgagctttgaatcttgcaaaagtgccatcaatattgtactttatcttgaaaacctatttgttcttaacaatgctatagtcaagtgaaggtagaatcaaaatccaagttttatttttttatcaaggttgtgttttcatcagatattgttcttctccatcctacatgcttcaaagctttaatgattgtgctaggttctgctatgctctctttcaattttttcttactgagatacacatttggtttaaagattcctagcttggatcttgtcactatgggatgaataggccttggttcactactttcaacttcctgaactgtatcaccctaatctataaggacgccatgtttgtaattttataaactagtttaatactattatatttatttaattataaaaactgtgataatattaaaacttgactaatattaaaaatgggcatcataacgacattaaaaatgtgttccaggtatccctgttataaaagatttactaaaagactatatacgaaaacaactcaaaacaaaaaattaaaatacaccgtagatatagcccaaaaataactcttagcaactcggcacgcaagccggtagggtcaatatatacattgctggagaagactgtcac

SEQ ID NO: 88585 - DNA, 981 bp, Cannabis sativa
ttttataataaatttaatccataaatatataaataataattaaaataattaatatttattaatttgtaaataaatttaatctaaatagttattgttaaaaaaattattacttctaaatatatataatagattatttattagtatataaataaaaacttaaaatttattaggtaagaaataaatcaattatctataaaaaaaaaatatatgtttcataaactaaagaaagtaacataataaaagtattatttataacctacatagataacacttatagtgatttctaaattctttcttgaaaaaataaaaaatgtaaaaattatttaaaaatacaataaaaaaatataaaatgacacataaaatctttatgtacttttcttcatattatatagaaagaaacaattcaaatcattattctaatttatattcaaaaaaaaaaaaaaatctttatcttcaacgttttctcctaaccacaacctctgtaaacatctgaaaaaaagactagtcattgtaaaaaaaaaaatgaaatcaggtattattactgccaaaaaatttacatatttttttgcaacaaactaaactgtatgggcttgtttggtatgcaagattgaattagattagacatgtgaatttgttcaatccagtgtttggacatattagaactctaaataactaatccagcttttatcccatgtagcaaggtgggataaataattccatacaggtgacttttttttatcattttttttttaattttgattttgttaatatatatatatttttttttgaaacaaataatatatatattttaaatttaataagaatttaaattaaagaattatttcaattaatttatttataaactttttttttatcaaaaatttattcattaaaattattgaaatgtgtagttttaaattattatacataagttactaaaatttaaaataatattatttaaacaatcgattagaagatctc

SEQ ID NO: 88586 - DNA, 677 bp, Cannabis sativa
aatataaattagaagaaaaaaattaaaaaaaaatagtataatcaaagatataaattttataaaaaataaaaattattaaaaatggggcatctttagaaattttttggtataaataaaatttccctaaatagtattttggtttaatttatttttagaatgctaatgagaataagtagagtattttaaaatatttctactcaaaattattttggtaaaggaaggtataaaagaaaggtgtcaagggagtggagtcgtgtggggcactcaacttttaataaattaattttttgtatagttttctttatatatttttttcaccacaaaataaaaattttcattattgcatcatatatttttatttttgtatttataaaattataatttttatttttatttcacatattttcatatttattctataaaaaatttatttttattctcgtgtatttatttatgttcccaaaaaatttatatttttcttttctataaaaatatatattttttatttatttatttttgacataataattagaattactcataaatttaaaatacataaatatgcaatcatgacccttctcaaatcatgttttgtcaaagtaggctgtacatcggtcggtttgggcggtttatcctatatattttctaacccaatctaaagttcgggttgctaaaat

SEQ ID NO: 88587 - DNA, 521 bp, Cannabis sativa
ctcccaatcaagccaactcccattctcatcttgtaacttatgaatcgtattttgacgtttacgagcactcgctgaaatatggaaatacttactatttctacctccttctttgatccaaagttgcttggagcgttgtttccaaaacacttcccttttagtaagcacttcaaaaagatcttttttcgctatgcgatgggcctcaacagacacttgatcattcttcccttttaatcgccgaatcaagctcttgcattcagagatttgttgattaaaattaccagttatctcttttccccaagttgcaaggacctcgccacatttagaaatttttgaactgagaggaaaagtgtcatactcacgccaacaatcactaacaacttggagacaatagggttctctcaaccaatcattctcgaaccgaaaatgtttcaccccaataaatatgtttcgaataatagggtccaaaaaaattggacaatggtctgacgaggatgcatgaagattaaataatttggcagtca

SEQ ID NO: 88588 - DNA, 516 bp, Cannabis sativa
  modified_base (26)..(39): a, c, t, g, unknown or other
aaaagagggtaaaaataaaagaggannnnnnnnnnnnnntatagagtgtaatttcttttttttttattattttttatttgttttagaagaaattagactctatactttttttatattgtcttttttttatttttattttttttttaaagtctattatttttagcttcttttttaaatactttactgattttatccatgtcacttcaatatactctctatgtgactcctttgtgtcaaagtattttgggtatagtacatgtaaaagtatatttaaattaaatataaaattaaaaataaatttgattaattaataaataaaagatggaatttttaatatatcccttttggttttgtacactttttcttcttctttgttcgttccattctcaattataactcccacgtgcattttttgtatttctttctctcaaccgctgcttatagagaattagatcaaataaaatgaatatataaataaaataaaatataatattatattgatttattatgtttttt

SEQ ID NO: 88589 - DNA, 829 bp, Cannabis sativa
ttagcctcaagcttatctttggggagtttgcccatttttaaataagtaatgattgggtcatccaagtgacttgttcagttacatcgacctgcataatttcttcacgatgaattgtcagatgagccaacacatcaacaggaattacgttgagtaattttgcttctcttgttgaggccaaacaagccaaagcatctgcatgagaattataagcacgaggtattctactaacaataacttttttttaatttagacaatagctcacaagtatcagagaggtatttcgccaagcgttctcctctggccagatattctccattgacttgacaaaccataatttgggaatcggtgaatgcttcaagttactcgactttcatttcaagagcgagctttgaacctacaaatagagcttcatactcgtcttcattgttcgaggcagggaattcaaacattaaagcaacatgcactttaaatttgttgggacttatcaatattattcaaccgcctgaactctcactatttgatgccccataaccaacaaagtccatccttctcccgatggcacttcaggatcgactggctcttctgtaataattgccacctcgtcatttgtaaattcgagaatgaaatcagtaagggcttggccttttattatcgatcgtggttgtattttatgtcaaattggcttaactcaattgaccatttatgtaatgccctgactctcatgaacgccacgtgtatgcttttacaatcttattatcaataacctactagcttaggaaaagtgtggtttaaataaagtttgataatttaaaatatacatataattttt

SEQ ID NO: 88590 - DNA, 611 bp, Cannabis sativa
gaccaccactcatggggtcaatcaagcaaaatttgacaccttgactgctttagtgaaggggatcacgacacctaagttgtatgaatttgagctttatagagaacaacgctcaccactctccaaacgaatcaaagctcttcccattcctctgaagttcaagaacccttcctggcattaatacaccgagaaggaagatccactttctcacatccactactataatatcctaagattaaggaaatggattagtgaaccctaactagttgattatgtattattatgaaattatattattatataatctattatatgtgaattagtttgataagtgacatgttaagactccgttggtgagccaggggcattttcgtaattgtcctaagaagggtaaaattgtaattttaatattatgacgtgcttatggactatattattatatagtttacttgttttgtcccatttcaggtattttctgacaagtcggcgtggtatagtcataattgagcattttgggctgaactgggtttagggctgaaatacattttcaggattttatattggcattttattgatatatgaatattctcaaagttatttgaataatgtggtat

SEQ ID NO: 88591 - DNA, 834 bp, Cannabis sativa
tctctctcttatctatatggtaattaattattatggcttcacacatgcaaaacgcgtttgtattttcaattatttgctacgtacgtatataaggaatcttgtggtggtccatttttataagcctttttacactatactgaaatttcactttttttttttatttttttttatttttttattttgggctgaatttttttttcaaaaatattgtattttattatcaaaaatattgtgtaagttttatactgtgtaccgtgttaagttttcacagttattttttagttgtttcactgttattttaattattctattttgttattttacagttgttttataaaaaaaataatatttttataaaaaattccgtgtaatagtaaaattataattttttttttaatctaatatttttgtaaaaatttctttttataataatcttattgtctgaaagaaaaaattaaatttgttcaagagtagtggtccattaatcttggacagttggacaagttctagctacttgtgatcacattaatacttcttattttctttgagctaaatcattacaaaagagttatacatgatcatttttagaaatatctataaagatgaccaatataaaaggtagtattttagtttttttgttatttagttaatcaataaataatcattcttttttacactacaaaaaatacaccttttactggtgtatgtgcaaaagcatttggtttaaatttttgaaatttttacatgaaaaatcctttttacacactttattacataattaccatcacacgcctattactacatttctacttacaaacttatttttattacaca

SEQ ID NO: 88592 - DNA, 809 bp, Cannabis sativa
tttcaggaagaatattgttggtcaatatgatagccacacctccttcactcttcctaggctcttttgagttgtaaaacccagtggaaggaaaatggagaaaaaattatcagtgaaaaataaaccagtcatgcgtatcactcttcaccactatttctaaatcttttctataattactgccaaattcttaagaaatttccaagttggtgttgtggggttgtgtataataaaaaaaaattgactactttgtgaataggttaaattttttttattttgactttttgtatttcactaacggttacattatatcttgaatatatgggtgtaatcacattaaattattagaattaatatattccaatcagtatttacttttagattttaacaccatcatttaaattatttgaatatacataaaaattactacgcaaaaattttattttattttttgaaagagtactacacacaataataaaaataagtttttcttgaacaaatcaccttattataaaaattcaattagactaaacaataaattaaattatatgattatttattgaattattctcaattatattataaaacatctaatataaaaccatactaatatacgtgctttacacgtagttttcttctagtatacataaatatatatatatatatatatatatttttgtaaggatataaattaataaaaataaaattttatgtagccccactatagctattataaaagggaaatttgttaaaatatacttaaaaatttagattattcttttaatataccacctttaaataaatactctaaatat

SEQ ID NO: 88593 - DNA, 913 bp, Cannabis sativa
  modified_base (873)..(875): a, c, t, g, unknown or other
tccgatctagatctaagatcctggtaaaataatttccaacacaaatatattaggaaactcacacaagatcagatatacacagtgtgatagatagaaaaaagatgagtcatccaacttaacttttatgccttattttctataaataaaaaatctagacatatctccttccaaatcaattaatacaaaaatatgaaagttaaatacacactttagccgaatttaataaatcaattataaaatatttttgttaaatgaaagatgctaaaaatagaattaacaaataacacttaaaaaagtataattatatgcattttataacactttataaattaaaaataataacatttaattacatttttacatgttattaaatagcatattataacattattttggtgttatatattataaatagtttacattaattttttttgatcaagaaggaacaaacttcattaatcacaagcaattacaaccaaaactaagcaacaaaaacaagcttagaccaaccgagccccttatttataacataattgctctatgtacattcactcaaatctatctattttcctcttttttgctatattcaacctatacaaagaagcttttttaatttcctgcaatatcttagacaccatccaagtatagtcactaaagatacaattgttcctattaatccataagttgtaaatcacagtagctatgatcaccatatgaatcatgtgtagtttgttccttctgtcaagaatcaaccaatttttccagctatgaaactcaatcggccatttcttttttcctagccagctcccgatctgatctagcaccatttgagaatagctgcactcgaagaacagattgttgggttttgtgccnnnaataaaatccattttaatataattagatttacttatta

SEQ ID NO: 88594 - DNA, 710 bp, Cannabis sativa
agaagattgttaggtctttttatggcaatttagttttcaaaatattttttaattaatgtgtatttttattgagtatttaaattatttttattacattgattttgtgcatttatttattcttttcttctatggaaatattctttctcaggtggtctctttttggtttaggaaacttcttgtaagagaaggaattctcttatggaaaattatctaactttggaaaacttgactattcctttttctaatggatgatttcggttttgcctttactagaacaaatcaaataaactttatttgacaggtttgaagtctaatttcgtattcttgattcaatttggaaagtatcctttctggtcctaatctcctgctgcaaaacccgattgtgatgctgcaaatcaagaatttttttaagaaagttttgtacagttgggaaattatttttgtggctgtctctagggttgttatgttcaataaataggacatagagagcaaccaaacaattttatctcctctgttatcatattttcatatctttctttgtgagaagagtgtttcatttgtaaaaacctagagtgttcaactaggttttggttttcttattatgatctcatactattcataaataggttgaagagaagtttgaacaagtgtgggtcttcgggagaagacttttccaagtctcatttcgggaggaagtgagcatatatctt

SEQ ID NO: 88595 - DNA, 749 bp, Cannabis sativa
aacgactcaagccattatcttaagaaaatagtaaacttatgaaacatataattaaattaattacttaagaaattaacaatcattacgatctaaccaaccaaaaattattgcttatatatatattaatagaagcacatatatacatatttataatttagtttgcatttaattattagaaaacacaccaatagaccatcgttctttaatactgtatattaacattaatatataacagaagcaccacctcggcagagcccaccattgaagctgtgatgaaactagaccaaaaacccactaggaattcaatttcacataggaaaattcaagggaggagaatctcagacgcagcaagaagctcaacttctctaaatttaatggtatagaaatatctcttcctacagaactctaaatggttaaactaatcaataattatttatatatatgttaatctgaactgtggacgaaggaaagattaaacaaagataaagagtgatgcatatgggaaattctcaaacgatccaccaagagacaatgcactagaaaaacgtatacaatgttgagaaactaccagccacacaaaactttcaactttcaactttcaactgatacatggaagaaaaaaaacaacagaactgaaaatcccatagaaaaccaaagctggagcaaaaaatcatacctgaaatgagagagtgattcggtggtgaaccctagagggaagatttggaggtggttcttcttgctggctataa

SEQ ID NO: 88596 - DNA, 513 bp, Cannabis sativa
aaggaggcgcatcacattttgagactcaaaattattggctttacaaaaaacataactatcgtctgcgaataacatatgagaaaccataggagcacctctagcaacacggcagccagtcaaccaacgttgtctctcataatgtttcagcaaagaggaaaaaccttccgcacaaatcaagaacaagtaaggagataatggatctccttgtcgcaaacctctaccaggagtgataggtcccattagatgaccaccatgagtcacgttataagtaaccgtagtcacacaaaacataataagttgcacccaatgactactgaaacccatatgaagaagcatattttcaataaaaggccattccacacgatcatatgccttgctcatgtcaagcttaatagccataaatccctccttaccaactcttttacgcttcaggtaatgcataatttcgaaggctatcataatgttatcagaaatcagacgccccggaagaaaggcactttgattatctgatat

SEQ ID NO: 88597 - DNA, 541 bp, Cannabis sativa
tatattaaataataatgtgtgagatcatagtaataacattcttaaaaggtgttatgctatttaagtatttttaaaagtaaaaatacaaaataaaataatgtaaaaataaaataaaataaaatattattgcaaaaatttggctgtcctactcatattttttttagttaaaacaaataatatatcaaataatctttcaaaaaaaaaataataaaataatatatcaaataatgtatgagatatggtagtaaatttgagaaaggattaatattgaagtatttttagaagggtgaagaagagtataccatctctgttgcgcagtgtaattaaattaatcaaataacccccaaacccaagcttagattttgaggattgaattccactcaatttccactttttgagaggaagaagaagagaatatgcactctctgcatcaaatttctcctttatcttctctcaaactctccatttcaactcacacccaacccctcacattcttccaccctagtttcacatcacctctttcaacttcaccttattccac

SEQ ID NO: 88598 - DNA, 860 bp, Cannabis sativa
  modified_base (747)..(751): a, c, t, g, unknown or other
gtgcacaggcaaggaggcaagcaactcaaaagacaataccgagccaaaaaaggagcaagaaaaatcaccccactagaagaaagcattgaagataagccaatttgaaaattacacgtgggcggatcatctactgattagttgtccagagctaggattactctcatcacacatgggggaaacccctgcacagagcaaccaagtttgggttcaaagcatccaacaacaaggtagaatatgaagtacttatcgttggcctaaacctttctcgggaggtgcatgctaacaaatctccacctaaattttaaccagccaacaccacaacaacaataaatttatgagatggctaggtttggatccctcacttcactaacttatagcatgacattctatgcagtaaaattagagacttcatacaaccatgcaaaggaagagattgaatggctaacactaatgttcaagaaagaatttgagttgagctccaattcagaaggagagatgccacaacttggaagatatcgtaacaacccaaacattattcaagaccccaaagttgtgagaaccaagggtacaggaaatacaagggaaggactaagcagggagaaaatccaaggaaacttaagaaattgttgcatttgtcgctcactcacccatgattatcgtcggtacccaaactgtcaacaaaataatggatctcaggggccacaatctaccaataatcaagcaagagtttgttgggttttgtgcccnnnnnaaaatccatttcaatataattagatttactaattaataaaagatcagaaactattttatgtggcatggttcgcatgatttatttcatgattaaatatttaatgtataaa

SEQ ID NO: 88599 - DNA, 1056 bp, Cannabis sativa
tttattttcttaatgatcactccataatcttctgctctccatttggtaggtcttaagggaactctcagatattttagagggaaattgccttccaagagggccatctctctcagtattaactatttttcagcttctccaacccctctaaaatagatctgagatttattggtgttgatgaaaagccttgttgtagcactgaattcatcaaggatgtccttcagcacttgaaccgagtgtttattacctttgctaaataacatcagatcatcagcaaaacagaggttgataatttttaggcttttacacataggatggaatctataagcaaacttaccggcaactaactaaagcctccttatgagataatcaaaacaaacaataaaggggaaaggggatcaccttgccttagccttttctctcctttgaaacttctctacactctaccattcatcatgatagagtaagatgtagctctaacacaagtcatcacccaagagacaatctagctggcagattataagcagtgaggagagcttcaagaaattctcaattcactgtatcatacgccttgcttatatcaactttgattgtacatctagggaaaacattcttccttttgtaattcttcaagagaacttgaagaatcataacattgtgagcaatagatctcccttgaacaaacactccttgatttttattaaccgaatcaagaagcacttgagcaagcctagaacagagaagtttggatatgcatttgtacatagtagaacagcaggctataggtctataatccactgccttggttggattctcagttttagggataagagataacatggtagcatggaactcaagaggcatattacctatttaaaagaattcttcaatggctttggtgaactcttttcccaaatctgtccacatcatcttaaagaacccagctccaaacccatcaggtcttggagacttagagtctggaatattgaagatagccttttttatttccttgctggtgaaaggcctaagcaagtttaactgcagctcaaggttgagtct

SEQ ID NO: 88600 - DNA, 788 bp, Cannabis sativa
  modified_base (288)..(289): a, c, t, g, unknown or other
tttaaagcatttttagaccgccactcatacttttcctttatatagatatatagatttaatattcttaatatcggaaactaaatgctacttgttttaaaaaaaaatatcattctcataacaattttcacataatatgggcacttgaattcgataatttgttccatatactgcattggttcactcagctatgataatttagtattgcatctctctcttattttatttaacggtgtgagagaattgtaacataaggtatttttgcctctaaaaataaacattaggtatttnngtgtataaaatctaaaacattaagtatttatgccgtaatttacccttttctttattatttaatttgccatatataattaatacctatttaatttaattatgaaacctttacttttttttcaactaattttcctacactttcattttataaaatttgagagatattcagtattatttttatttatttatttatttattaaccttccttattttatgtagtctaacattaatggttttttatttttggtatttatttagttttgactttttggttttaatgtcgtttttatttcatttaataataaaagttttatttattgagttttccttttgattgtatatttttagaagatacattgggctgttttttcatgcttatttttatcttaattttaaaggaaatctcggcataatatatctattctatataaagtgtgtctatataactgaattcttggtttataagaaattgatgggagactttttatttatatttaata

SEQ ID NO: 88601 - DNA, 633 bp, Cannabis sativa
gtcttttatttcaaatatatattaatatttcacttaattattaattattcccgattcactatgtactatatactgcataattaagcacttctttaattataatattcttagacaatattaataaacaaatcatgttaaagctatacttgttaaattaatttatttggtgcaaattcattcaaacagccatccgtcacccgtgtatatatatattgttagcatttttcatatataattacatcaatgcctttatgtttgatcaattaagttatgaagaagcacaaaaattatttaggtacacatctcatgcatccaaattataggttgtttaaaaatatatatagttgataatataatgtattgcttaaaagagattcattgatgtatcctatttacaaaatattttttagcttaatttttattttttatatttgtgtatgttattgttatttaacatattttataaaattaaatctaagaaatttagaataatttataatagagaaagtaatgtttaaccagttatgcgtatataaaataaaataatcactcatacaacaaatatttaactatattttcggcatattaaattttttaaaattttacaaaatgtttcaaataattataacgtac

SEQ ID NO: 88602 - DNA, 1033 bp, Cannabis sativa
  modified_base (1005)..(1007): a, c, t, g, unknown or other
ttcaaccatctccgcatatgatgtcacttcatcggtagtgatcaccagatcatgtctaatcttcacattcaaaccgacaaggtacttttctttcttactgaaatctgttggcacaatacccatggcgagtttggccaaacgatcaaacttggtggtatactcagtgactcacatcccctcagtttgtactaactcagcgaactctttctgcttagcattgcggacggcttaattataatacttggcgttaaacaactctcagaactcctcccaggtcattacagtgatatcccaggtgagggacaccaattcccaccaaacaagggcgccttcctggaattgaaatgtagcgcaggtcactcgatcattaccaaccacacccataaaattcaaaattcgctcaatcacagtgagccacttctcagccttcatcacatctagacctccaagaagcacaggaggtgcttgtttacggaatctttcgtataatggctccatacggtcgccagcaacaggttgttctgctggcaccgctggagctacaacagcctgagcttgctgtggaggcaccgcaggaagaccctgctgccttaatctctaaatttcttcatcttgttggcagattcgatcttgcatttctgcaaacctctgctcctaatccagaggagcttgtggtggatttacaggacaaccaccttgagctcttccacggccacgaccgcgactacggggattctggggaattcgatttccctgaccacctccggtctcaaccatattaccctgacttcttgtatttcgctgggcgtccatttaataggacttaacctacgaacccataagcctgccacgttagacagcgatcataaaacttgataccgctcttattgaattaaaggcaatacacttaaaacaaataattctaatctaatatgcctcctaacatactttaataatcacatataatactaaacaagtatgggcttactgaaccgtgaaccgagnnntctctgatgaagattgtacatgtatt

SEQ ID NO: 88603 - DNA, 813 bp, Cannabis sativa
caattaccacgtagtaagttgatcttacccacggctcgcacaaatgctccaccacttgtataaaggctccacgactcacacaaatactccacgactcgcacaaatttttcctagatcgcacaatagctcatgggctcacacaatggctcatgggcttgcataatggaacatgggctcgcacaccccattgtcacatttcaatgatattagtattttggccataactctcttgatatatgtttaaattggacaattcaaaatgcgttgaaaagataagacagagatatatagataatatgtttatgacaagatctaattctaaatgtagaattataaaaatcttccaacaattgccacttagtaagttgatcttactaactccactcgtgagttgttacatgttaatctttaagttgtgttaataccctgagaattgaaagcaacgattctcaggattaatgagccatgggccatacatgttgattcaatcattcctcgactgactcttaaagttaatgttttagctccttgagactaattgttgactaatctcgaaaatcaactttatcagtttttggggttaacacttgctccctagtctacaagaattcttttacgtattcttacttcactaagtgaattggggttttgcttggctagagtgcaagccttaccttctatgctttttttgaggctgtgcccactatacatatggagcctcccttgcttgagtttcacttcacaatcagcaccttggagtagtggaaaattcttctaacatagtctaggaggtcttaggtttgaacctcatct

SEQ ID NO: 88604 - DNA, 617 bp, Cannabis sativa
aaagctgcattgtgaataaaagtagtctatgagctcccataaagtaaataaatataggaataacttgtacaaggctacaagttttgcccccaaattaagataaagtagtccataacttcccataacatatatatttatacatatatacatatataaatatgatggtacgtaatatgggttgtttatattaccgcgtagaatccaacaatactaagttgtcctagagttattcaacaattgagggtaataattatttttttttattattattattattttaactttcaagctaattataattattaacctttacttaatttaaaagttactatttttacatgtttttcaggaaaagcatactgaaattgttagagctaaaaagcgagcaggggagacagatttgaattgggatgaataatatattatatcttttatataagtttaatatatcaatgaaatgattaggaagaaaacacataatgtgcttacaggtaaagcttttatgtattccaatataagcttaaagcttctagggtcttgcttaactcctactgcaggcccttctgcaggtttctgtagaagaatattaaagagaatcagctgaaatcataaaatgt

SEQ ID NO: 88605 - DNA, 772 bp, Cannabis sativa
tttttgtaaaaaaaaaaatcgtgtggcattaagattctaaacttttacccaaaatttagtatttttttgtaaaaatctctattttaaatgagtgatttattaccattaaccaaatagtttaattttaaaagaaattgtgaatatcttttataaaaattagctattttgacttcagttatatctttttgaatgatccattatacaataccatattaataaaagaaaaggtaatattaataattttataatacagtagtattttttttacctataaatgaaattaatttataatttaaaaaaatttattgtttattattttatctaaagatgaattctcatatatattttgagataaaaaataaataaataaaagtatcatatatcaatatatctctctctacaaagagtccttcaatacaaattatgatatttaattaaaccaattcaaaaagaataaagaaagaacttttaaattacataataattaattcaatttcaaattattttttaaattaaaaatttgaatagcataataattaattacattttaaattaaaattaaacaaaaaagtaactaatttttttttttaaaaaaaactataattatagaactacgatataatctataacaaatatttttattatcatttaaattaataaattatatattatatagtaaaaatataatgtaatttttatagggtaaaaaaaaagattacttgatttatagtgaatattaagttcatttatatttatgctaattacaaatata

SEQ ID NO: 88606 - DNA, 640 bp, Cannabis sativa
tcaataatatacattttatttttttttatattagggtaaggggattcgaattttaatttacacatctaagaagagatgtaaaattaataaattatgtctatgaccacatgtatatatatacatattttaataacttttatttttattgtttgtgttttatatttattattagttttgtcttatttttttaattaattagcttagatattgtgagagtttttttttttatgggaaaaaatgacttcattaaaaccacaaaaataaacccactagaaaaatctcaaaagagaaaaaagtaataatagtgaggccatcaaataataatcattcaaggaaaagactaatttagctatagtgtgagccacactagtagcaatcctagatacaagaaaaaaatatcaataaaatggttacaataaataaaaatatctctaacgatgcaagcctatcaaccttgctaatgaataatagcattgataacaaaatgacagttagatattgtgagagtttttattgggaaatttacgcctagtactgtcttttctacttttatttcatttttactgttaaacgttatttattacatttttactgtatctttactttttgctaaaccaatttgttattccattttaactga

SEQ ID NO: 88607 - DNA, 994 bp, Cannabis sativa
taaaatatgtaaaatatactagggctgtttgcagtgcgagtgatgcaattttgacgatttttttaaaccaactcgcacatgcgatttttctaattttctaaaccgcacccgcactgcgaaactaaaaaaaccatagaaactccatcgcaaaaaatagtgcggtgcggtacagtttctacagtttggactattaccaaataattaaactatcacaaatacaacaaagcttggacaacacctgtcaaaaataccataaggcttgaaaataagtacgaaaaaagtttcaagtttcaacaatacaataattagtggactttgggctgagtcttcacatattggacttaactaaataaaaaaaatggtatttttataatatgcggtgcgatacagtttgaaccgcatattaacaattcaaaaccgtaaactgcaaaccgcaccgcaccgcgcgatttaggaaaaattcaaactgcgaccgcactgtaaagaatttcaaaccgcattatttttgtggtgtgagcggtttaagcggtttgataaacaactctaaaacatactactctttgaatttaaatctgattaggtataattctatttattttctcattattaactaattaattttattggtatatttcctttatagaaaaatatagattctaatattatatttaagttttagttttgattatcactaaataaaatacagccacacgtgaagcgcagttatttcttagtgtatatataaaagagagatatcagaaggtgacatgacgcttttaaattactccaaataattttatctattctctctttgattctcccactttttaatttttttgttaggtttataaatataaataacaaattttctattttctttatatatattttattaaaaaaaatcttaaaaatctaactctaaaccttctccaatttctttttatatatatagggtttatctattgtaggcccatttgtttctacctcatcacat

SEQ ID NO: 88608 - DNA, 602 bp, Cannabis sativa
  modified_base (26)..(31): a, c, t, g, unknown or other
aaaaaaaaaagccaaaaaaaaaaaannnnnnaaaaaaaaaaaaaaacatgcttttaaagcaaaaaccataacaaaataagcagtttcgaataagaaatccggtccacagtacatattattaccactaatagtagaatacgcctcaaatacggactttgcatgttgctctattatggttcgaactgccatagttgttgcagtttcgaggtatcacgacacttttatcactagatgggaaatgtttctcccgtcttcttccagcatttctcttccttggacaacatattggtttcttctccataggtaccccaaccttcatgttcttgatgtgttttgggagaacccaatcatcctcatcaccaacaaaattgatggtaacatcgtgagtcttcctctatgtatctttcgaataataaggagagcacaatgtttaaacactcgtatttgttgtaaatttcgcagtacatgcatgagtacaaggaagttttagcaatgtaaacacgccacatgtgttttttttttcaactaggttcacattaccgtctctttcaccattaggccctctactaattttgtacaaattagctctattttgttggatg

SEQ ID NO: 88609 - DNA, 1661 bp, Cannabis sativa
gataattgactgcttcagtgttatctgcgagattaataatttgattggaaattgaaaataacattctttaataggaattaggaatattgagagtgacgaataacctttaactagtttctcatatcataatctcaattttaatttgtttgttttatttttatttatgttattttgatctcaatctcaaagcctctttttctaactgtcattaattattgaataattgaataaacatagtcctcgtacgttcgactcgtacttacttttatactgaaataattgaaagtattagaaaaaaaaaatagtaaatttaatacgacatactacacgggacaaaaatcctcaaattcttaaaagttcaaaaatcctaaaacaaaaattctaattaaccaaatagctataaactattttaggaattaagaaaatttattaaaaacaatttgaagaaatctctacattaaactagtgtatttattatagagtaaaaatatataactaaatagagatataaattaaagagaagtaataactttaaaatactttgctcctttacttagatcaaaatattaaattaataaaatggtcaacaacactacaaactcaaccttgattatggaagaaaaccaattcacaaattttccttctcaattttccaagtctttcccaccaaccaaacagttttggaattggaacagagagtatatcaaatcacacttagcttcaacaaacaaacaatccaacaaaaatgtcgtaaccaactactgtccaaatccaattaccctttaaattctctccactccaaaccatgccactcctccacttatccaaatccatttccttcctattctcaacccccaaattattcaaatccccaattccaattccaatggccactctctcatcatccatggcttccactcccaatcccaaacctcgtctcaggggagtcgttttcgacatggatggcacccttaccgtccccgtcatcgattttccggcaatgtaccaggcagttcttggtcaggaagagtatctcagaattagggctgagagtccttctgggatcgatattttgcatcaaatcgagaattggagccctgagaagcagcagaaggcgtatcaaactatcgccgatttcgaacgtcagggactcgatcgccttcagatcatgccgggtatgaatttctttcttgattattgtttcgagagaaaattttggatggattataaatttataattgagctttgtttgtgtattgaacaatggtgcaggtgcagctgagctttgtgggtatcttgattctaaaagaataaggtctgttgtgttaatatgataattattctctttccttgagtcaaaacctttttttgataatttggtaagtgtgaatctgaatggatcttgtttccatgctttgatctttactcattaaagtaaatattaacttttgaattcaagttcttatcatttgtgtttgtaatgagattgaatgtgtagctttggtgattcttatatgtatatcaggagaggtttaatcactcgtaatgttatgacagcagtggatttgtttcatcaacgttttggggtaacatttttcttgttgtgagttttatcattatatgatatgattgattcaattgtgatttttttcttttgttac

SEQ ID NO: 88610 - DNA, 668 bp, Cannabis sativa
aaaaaaaaaaaaaaactacttatgattttttagattgtgtttatagttctaaacaactatttttatctatcaaaacaatagttaaacaacttttttctaacagtcaactgtaaatgagatttaattcaacagtagttgttcatttacaaacaaacaaccattttaatctttaaaagtaacatatatacaactgtttctaaataaaaaaatagttgattatatttgtatgtattagtattatttcagttataatccaatttcatttgtttattaagattaactaattttttatatgattgattatttatctcattttcaaaaacaaaaaatcatttataaccatgaacaaaactttttaaaaaacttaattaggaagaaaatcattattaattttagtactttgtatttgctctttaattcatgtctgggtaagcttcaaagtttatcgaatcttcttgtattcaaattctctaaccaatacgattcaaattttttattttaggttatttttgtgttttttctaatcaataaaggtagaaatctctattttttttctttttttttttattggaattattacatgaaaaattgaaattgacaattcatttacaaaaatacctccataaggtgtgaagaatatttataccttttaagtgcttttaattatc

SEQ ID NO: 88611 - DNA, 539 bp, Cannabis sativa
taaacttgttccatttttaatttattatagaaaaaatcccttttttaaagctattttcttaaattatatgggactcaatacttaattacaccaataataatataacaccatcattaaattacatattatcataagagtattgttgtatatatattaaaactgaatatattgtatttcaacttaagacataagttttcatgttataagaaatataattttaaattttaacacttgctcgaaagatacaaataggtaataaattaaatagaaagggcaaaaagaattaaatatcttttcaagtagatgaaagggcaaaaagttacaagaattcataaaatagtatgaatgataatttttttaagggaaaaattatctttattgatcgttaaactttgttactaaactaagtaatataaattagctagaatagacttcaaactaaaacgacaaccgggtaaataatagaggttttagcaaaattatgaatcactctattagttgattgtttgataaactaaattaaaacattactcaactct

SEQ ID NO: 88612 - DNA, 601 bp, Cannabis sativa
  modified_base (554)..(556): a, c, t, g, unknown or other
tgatttggatgtgttcatgctggtttatgtgattatttgatgattgaatgtgatttttaaaatttttccatgaaaataattttgttttgaatctgaaaaatatcttatttttatggaattaagcaatttttatggaactcgattccgataaaaattaaaaaagttatgaatttttgattttttgggtacaagaggtgtcgagtgggtgctcgtgtggaccaagcactccgacagggtgaagcaagtgcgtgcggaatttagaaaattcctttttgaatgtgcccaacgctcggacacgagctcctcctggatgctgcaatccgcccgtgtgcatcctgctagcgccctattctctcgcacgtcccaccttgcagattgtacttgcgcgtgcgtagggaggctgcatgcaaccttcctgggcagccaagttactctacacaaagattgcgaatttttgtgatttttttcacaaaattcaaatttttgttttcaaaaacctaacaatcaaaataaaatattatttttaataaatttaaacttaaatatcaattttnnnttaataatatttaatttttaataattttatgatattttgaggttt

SEQ ID NO: 88613 - DNA, 692 bp, Cannabis sativa
  modified_base (145)..(147): a, c, t, g, unknown or other
attgttgtggaattcgaatttgaatgtaattaattgccaactatattattataaataggggtagaatgtacagaaaaaggggacaaaaaaatcgttgagagaaaagaaccctagtttgtatcagaaaaatctgaataagattgannngtggactatgcagagttaactgcaaaatcacgtaaaaatttggtgttatttttgatcttttattttttcttagatttatactaatttctatgctgatcctatcacgaaaataggcttattatcgttaacaaaaatatgcgttgtcagtttggtgatttcattgagagcctacgtgaaaaaagctaaaaaaaaaccctcataaccaaaaggaaatttttttctccattgctaacaacagggaaaatgataataatcaacctgaagagactactcattgtcctggaatagagctggcgggctcatggaggcctcccaattcacggacaacacgatttatgtggtcaatacgttcgaggagaagccaacgtgaaggtgaccaatacccaaaaactgggaatgaagtgcccaacacagacgttggcggatctgtgagtgggggtgcttatgaccccaccagatatgtactgtaataccccggaattaagagatggattagcaaaaccctaactagataattatgtataattgaggaattatattattat

SEQ ID NO: 88614 - DNA, 594 bp, Cannabis sativa
tttcactttaatttgtacttttatgtacagaaatgagccacacttcacgtaacgtatacaacttctaaacaaaaagttgaaatattcaacacaaacacaaaatatgtgttattttatgtacagaaatgagccacacttcacgtaacgtatacgacttctaaacaaaaagttgaaatattcaacacaaacataaagtatgtgctattttatggtgtcaagcaccacaatgtgacatatattattatcgagcttcacactttattaatttaataaataatataggaaactattaaccactcacagcgtgccttatcaatatggtattgggaaccataagagtattataatcacactttttaaggccaactcaaatgggcgcgcgtgacctatatagttgaccaaaatattgtgggttgcattgtataatgtgacaggaaagaaagaaaaagaggtaataaatagataccaaaagtggcagaggtgctattttatatttttaattaaaaaataaaaaaaaaatgtaatttgctaaaccaacaaaaatatatcacgtaggaccaatgggaaaactatttttgttgacccgattagaaa

SEQ ID NO: 88615 - DNA, 600 bp, Cannabis sativa
actatgagaagagattcatcgaagaaaatatctaatgttggtctcaataagggtgttgaccctagtgattgcacaaaaaggcctaatgaaccgtcagctacgggaccgaataagagattctaaggtaaccaaggtttttgacgtggttgaaacaaaaattggcaaacttatctagagtgtctgatgtgtaagatatgccatcagggcgaatgtcaagctagaacctgcttccagtgtggggtagcgggtcatctgaaaagaaactatcgtagctacaatgaccgaatgaaaagaaggatgacactttagctcctgcttgggtatttgccttgacctagggagaggccgatgttggcccttccattgtgagagttcaacttactattgttggtactttattgaccgttttaattgatttcggtgcgacgcattcctatatttcaagtagagtgattggaaatttgcatagacctagtgatgttttaccgagtggttttggtaccttgctagctactggggaactggtaatttctagcaagtgggttaggtccctactagtgtttgtggaaggaaggaaattgtcagtttatttggttgaac

SEQ ID NO: 88616 - DNA, 773 bp, Cannabis sativa
ttattttttttatttaaaaaaaggtcacccaataatttctcataaagcaagaattctgttatatagccacattttatatataatagatatttgtaagcctaaaatatgaggtaacgtcattttattctatgattttattttttctattttttcacatattttttttattcattctttatttaagtgaagttatatactttgttgcctcggatttttcctaaaatatgagaccgcgactgtgtgtgacacgtggatctcaaggacacatcacccacgaaatcagctaagtcatgtgtagacgggcaggtgcacttcagggagtgagcccctgtagaagcacataaagcatgtctctcctctctaggaggtagaaatacagcaaagcatatccgggagagagagaacctgttcgaacggacacttcgtatttgatgcggcatgggggaaacgtcttagaacgcccataagaggacatgacagattgtgtaagcttcgtttacgccgattacacaataatcaaattaaagggtctagtgacggctccattatgaagaatcacatcaatcaaggaaggataaagattactctcacctaatccctatgatacctacagcataggtcatgtataccctattttacatctcttagaaacttgtgcacatacatggctggcactcaaagataagtaatccctttttagtgattcttaccaaactctataaatacccttgaacaaaatgggaaaatagataaaaaaatgaaagagagagaga

SEQ ID NO: 88617 - DNA, 1696 bp, Cannabis sativa
gttattatattaaattatatgtataattgaccctagcataagtggactaaacttgtacctaggacttacacttttttcgagaactcaaaatataaattgaaaggacgtctcattaagtttttatttaactaatattaagtatattgtaatcaacaaatattcacaatttagttagttgaggaggaatatgacatattatttccacaacaaatatcttttggctaatttaatattaattattatataaaataaatgccaaattaattaatatccatgttactattcaataatatcatgttaatcatctattttgttttgtaccatctatcacaaaatttgtgaaagtgaaacactaaaaaggtctacgtacgaataagacttttttttttttggggtcaaatatatacttattttaaattcggataataaaaaaaatatgcttttctcttttcttaaaaaataaatattttttatgaaattgtcaaataaataaaatgtaatgaagacaagagaacgtgagaattggtgtggtcatattgtgtgtgcatgaacacatgcatgattcaagcctttttttctttatttggaaaaattagttttttattttttaatatataataaataaatatatttttttagtaaaaaaaaatattttactaaaaaaatattatagagtattataattttctttaattttagttgtagctataaactgtacactaagttaattttttaactgtttaccaaatatttttacagtacattatttttaaaaaacaacttttaatttttaaaaaaattatatcaaaggagcctttagtaagatttttcattttataagatatgattcctatcttatataaaaaggcttttttttttcttcttaatattctttttatttttttactcaaacattcacaaaagtgtgttatttttctaccaccaatcatggtaagtaagtacactattttcttaatttttaattttatgataattcaactagctttgtgcaatttattctactatagttatggttgaaaatttattattttttattttatttctcaagaagatttttatttttatttttatagatttattcttgaccactcactatactcaagaagattcactctattaatgaaattaattaatttattttctagttaattatgccatttactttacgccaaaggcattccctagactctagaatctagatgatataccactattttatgatatttttttaatttttttatattattattataattactattttactttaaaattattcttttttattcatttttactatgagacttttttttcctctaagcttctatttgagaccattaaacacataattggagaccacctttattgatcctttgcattctcatctaaacccatatcttaacccatcagatactaccagtgtttcttcacctttgcatgcctatctaaacccatgttggaaaattttccaaattaaccatttgaaatactaaaatttgtaaaataacctgacttaatttactttatgcgaccatcaatgtaaattcatagtcgttttgcgatcataatggtcgtttatggtcgtacagtgtgattcatggtcgtttttgcgaccatagaagattattttgctaataaatttttttataaagttattttgctaataaaaattttc

SEQ ID NO: 88618 - DNA, 743 bp, Cannabis sativa
aattttgtccaagtcagacatatatttttcaaattcaatcaggttgtaagctttacttgcaccattgaatgcatctttcaatgccttcccaccatttctaaatttcgttttgatgttttgaaaaaggtggaaagaacaaaaaccatgcataagtgttggataaactttagtctcatcgcgatcagattttatacatttgccttctctttcccatatgcatttttcattttactcatgaaccactcccaataagcatcatttccttaatcaacaatagcaaaatccagtggaaatatccctctgtttgcattttgtgagcttgcaattaatagtgttcccccataagctgactttaagaatgtgccatccacaacaattataggtgtacaatgtttccaattttgtataaatatccctattgcaaaaaacatgtacttgaatcgaaattcactttcagttccaaaatctgtaattgttcctgcaatcattatcataacattaaaagtcatattttttttccaaatgactatatactatttagtatttaacaacatacataatatagttaaaacaatcactgtatataatgtattaatataccaatcaatataacctgttggaatgtaaaaggtattagaatttttttttacttcttagtaaattaagcaacttaattttaattttaaaataagaaacaaactagtaggaacaaatatactgtacaatatgattattaatttttt

SEQ ID NO: 88619 - DNA, 1258 bp, Cannabis sativa
attaaaaatatactaaacttaatctaaaattactactaaaaataacctaacatctgggcatacttttgagatttttacatgaaatactatttttctttgaaactttacatttatactgtaacactgatttggacccttttttcttcttcttctttttctttatgtatataaatgtagtcatttaatctctctctctctctctctctctctctctctctcacaaaattttgttatattatttttttaaagagttaattgcggcataaccctccaatactttcacttttattgcacttaatctccaaagttaaaattttggcggttaaactcctaaaattaggaaacttttagccatttacagtgtcgatctattttaggtgttaaatgtcatgttggactgtccatgtgtacatctacgtgaacgcggtatacacatggcacaattttataggtacacgtaaaacattatttaaaaaattaaaaaaaaatgttaataaaaaaatatatatggtttttgataattttaaattaaaaataaattaaagagattatatgttatctttttattgaaaaataattagggtgaaaaataaatggaatgaatttgggaaaaataattattttcgttaaaagtttattttgaatgagaaaaattattttattactctaaattgatattagaaaatatctcgggttctaaaatatgaattggcattttattttaacatcaaaattttaatttaataaaatagaaaagaaaagaaatagtataaaacaaaaattagaaaaccctaactcatctctatctccctttcttctacttgcggcaactagaccacaaaccagcccttgaaggcaccgatagtctaaacggatgacacctccattgcaactctaaaaaaaaaactagaaacctcgttatctctctccctttctcgccggttgcaccctcactcaaactctctttctctccgtctctctcgattttctcggtggagccaccctcctccagtgaagggctaaacagaggccatggatgacctccatgagtcacgaaaccccaggaactcatgttccatgatccctttctcgctctcacaccctttctctctcatcgtgtcgaactcggcccaacatcagagggtgtctccagccatcgatagaaaaagtggaagccatgaatggcttcaccatcacctggaggccttaaccccgtgatcctgatgttggaatttatttaaccaggatcttagatcta

SEQ ID NO: 88620 - DNA, 822 bp, Cannabis sativa
  modified_base (48)..(59): a, c, t, g, unknown or other
  modified_base (782)..(797): a, c, t, g, unknown or other
ttgcaattctgagtttgagtttggattcaagttcatgtcggggttcgnnnnnnnnnnnnagtttgggttcgggttcggatttcggtctaggtctggattaagctccaggtgtgggttcgggtctaggtccgggtctaggtccgagtcccaagtcccattttttatttgagtttgggtacagttctgggtctaagtcttgggttccgatcctagtctgggttcgagttcaggtctgggtctaggtctaggtttgggtctgattctaggtctgtgtctaagttcacgtcccgagtaagggttcgatttttggtttgggtccgggttcaggtttgatcctggttcgtgtccaggttcctatcctagtttgggtctggggtaggtttcaggtttgggtctgggtctgacttcagattcttgggtccaggtcaagtcctagttcgggttcgagtcccagattccgagttgggtctgggttctggggcctaggtccttggtctaggtcccccaatctatgtccggttcctaggtcttagtcttggtccaagttcaggtttgggtcttgagtcttggttcgagtttgggtcccaattcgggttcgggtcaaagtttcattcccagtcgtggtgcgggttcgggttcgggtccgacttcgagtcccagtcccagtgtaggtctgatttttgggtcccagtggttgttagttcctgggtgtggtcccagttttttggtctaggtctggggctctgcccgacggtgtggtttctgttggaaatattttaccnnnnnnnnnnnnnnnnaccaagtatgttttattaacatcct

SEQ ID NO: 88621 - DNA, 607 bp, Cannabis sativa
caaccatagtgaagtaggttctgctaatacacgtgctgcggtcggatggatgaagacttaattgttttatctattttgtttgttattaggtatgtttaaaattcttgggggcgttcaattacaatcattatgctgttgaaatttcggtagaattaggatcaaatttgatatattatatagtgttttatatagggtccactagcataatcaccatcaagacgtgatctatcgaagggaaaaggtcccatgccttgtcgaaaaggcggtggtgatcaagaagatcaattattcacacaagagatcatggcactaatccccaagtcacttaaatagattgttgaagaatttttaagagtcaaggataaacgtgatataatcccaatttgggtacctcgtggattcatagcacctcatacctagatcacaatatcaggagaatatttgcagtaggtggcgttgtgtgacttcatcgacaactagggaatgctttttgaaatgacttacactcttctttaatctaattaaccttatatatcaaattctactgaaattattataaaacactaatatttaacaatttaatgcaggcacatatgggagagcataa

SEQ ID NO: 88622 - DNA, 782 bp, Cannabis sativa
acacaatcctaaattctaacaataatactttaaagaatgtaacacttaaatactcaatttttatttttggtggtaaaaatacattatgctagttaattataccactaaaatacctaaaacaaattggcaaaaatactcaaagtattaaagtatttcactacccaaataattttgaaattattaataaaaatatattttaacttataaatatattaaaattaaagaaaatataataaagatcactcaaactaattcaaaaattaaataaatactttatttaataaaaataatatttttgattaaaaaacattaaaagaaaactgataaataataaactatgagaaaaaaatattcatacaataaaaaaatccacttactatttttattaaatagaattatttattacttaattttaagattaatttaggctattttaataatttttctaatttaaaatttatttttattttttttaaaaaaaaattatttggttagtgatggagtaatattttaatcttttgagtatttctaccgcaagaaaaaatgtctagctattcaagttttataattagttaacattatgtgtatttttaccaccaaaaataaattaaaatgagcaatttaagtgttatattcttttaaaaaaaatattaggtattttttttttcacaatttaccctttagaatataggataatactcagtagagatattaaaaatgactttatataattaaagtcatttttttaatatatgtcattactttatttatttaattttttt

SEQ ID NO: 88623 - DNA, 877 bp, Cannabis sativa
ttgatgttttaactcataaatgagtgttttataaaaaaaataaaataaaaaaaagctcataaatgagagtttaatataagattttttattataaatgtcaaaatatttggcttttattgcgttgtaacatcctaatatttaaggcacgttacatattttctaatcatttgctaacttttgctaaacaaatgtttttacaataaagtatgatctacataaaatcccgtaataattaaaacattcttaaaatagaatgtaaaaagttactattgggatctcatttctaataagaaatacatatatactataatgttctaagaatgtcatctaacaataaaaatactagttacaccagctgatcttccatagatcacaactctccaggtctattcggtgaaatatggacaatcttcactagagctctcgaaccaccattgatcagttctactttctcaaatctacacataacaaagcaactctgagtcgatagactcggtaaaaaaatcatgcataatacaatcatatatgacttgtaattgagcgtccatacacccaattaccataagtctactaaccgcatctaatgcttataagttgagatctgaacgtttttacttatagtaagattaaccatataaccaacctaagctcattactctaatcatactagtgttagtagcattagtccatactattcaatatttcccaacatattagatatcagtatcttagtacacttctatgtacacccatatcactatctctaatatgctagctacatgacaatatagtacatgtatatactaaacatgtgcatattgatagggtagtttaggtacattttataaagtacttaaatgtgtatttcaattgatta

SEQ ID NO: 88624 - DNA, 546 bp, Cannabis sativa
ctttaacagttatttgtatagttctgataagatgggaagtgatcaatttgatacctcttctatgtctctgtttgctgatttttttgactaattttagcatgtttcctgttcagtttctagggaataggtacacttggtctaataaaaccatttatgaacgtttagattgggtagtagtgtcagattcttggagtgatttttatcctaaccatagtcttcagcatctaggtttttatgggtctgatcaccgtgttcttaagctaagtttagctcccaccaatactaattataccactcataggactaggcgttttcggtttgagaataattgggtggaggacccctccttttatgatgtggttaaaaatgtctggaatagttctctggttccaggttctgttcaagggcataataactctcttataggttgttatgagaactttcttaagaagtaaggaaattgtatttcctctctaagaaattagaatagggacaataatctcctttttaaaaccagaatatagcatcttactcacgaaattgata

SEQ ID NO: 88625 - DNA, 839 bp, Cannabis sativa
taatatataaagatatattaaaaaaatgtttatatttatctatatataataaaaaataaaaataatatataatatatattttaataatatttttagtgaatttcttttgttgaatttataatacttaattgttttgtgtatttaattttatatatttgatctattttataattaacagtgttgttgattagttattttaattttttttttttttttgacaatgagtcattttaaatttttagttgcattagtattatattaaattttgatatctaattaaattggatcgaaaagagactacatcatccaccactagagtaatattttactatattttattatttaaacataaataatgaatataataaaataagtttgttatatccggttacgggtctaatgggtttttaacttcttctctttttctttttcagatcacagatagggttaagttctaatgcgttcaaacttctaatctttctactcctcttcagatacggctaggattagagatattagattctagttttaaaaattcagtcataaaatctgaacctttcttccccgactaaaaaacccaccacaagtgattaaatgacctaaagtataaattgtaagtcatggtgtcttatcttctaacatgcaaagttcgtattggttttgagtgctctgttttttttcttcttttagttctttagcagtggtaccatggcacccgacatggttgaaaatttaggcgttaagttcgatcaaggatcatgaatggcataatgttgaactcgagtccgattgtctctcaattgtccaagctattcgaagtaacatcaccatggtttcgc

SEQ ID NO: 88626 - DNA, 1462 bp, Cannabis sativa
  modified_base (1398)..(1415): a, c, t, g, unknown or other
gaaatggattcttgtgtaaccctctttcgttactgttatatttttttttttgctaagataacaatttagtttgaatttctttttacattgatttattgaacttgagaaaatatatactaatcagaatggttattgtgataggatttttaatttacttaaaaagtttataatctgttctacaagatgaacttaacacagccatgtttatttatctattggcaaggattttgtaagaaattatttttatttattttatattttgaaaaagaaaaataaatcaaaatacaattgtgggtcatttctattgctattactttgaaaaatttagggaaattctcaataatatacttaatatacaatctattaacagaaataacgttaattaatttaatgcaatcctattaacgtgacacatcatcactcctaccgtggaatcaaaataatcaaaacctgcaatctcgctcgtcaacgctccaacctactccattaatcacaagattgaatttcctaacagcgcgtgatatataaacaataaaggaaacctataaatctataactcaaattctcagaattcaaaccatttctcacaaaaaaaaaaccattaacgaacaaaaaaaaagcttcgtttgataaccgatcaaacaatctaaaacacaattcgtttctcaaactgtaataacaatctgcaaaattgtttcactgcaattataaaaaaatcaaaatcacaactcgaaaccttctctccaaaaaaaatctccattaaagaacaaaaaaaaagcttatgttacaaaaatcacacctaatcgatcaacaaaaattcagaactagcgaagctcagtcaatctacagtcgtacgacagatcaaccaaaccgtcgacacaataatgcgatcaaaaatctaaagttaagcaaagtttaccttttacactgtatttgacaacatgtccatcttcatatcgatgttttgcctttactagtcgcaccaccaaaagctaccaaaacatgtaataataaaaaatcaaaatacagaacttattaatatacaaaattacttgattaattatgtgagaaaagtaattttttgtacatatacttgtcaacaagaattttttacttacaatattcaaaactgtttagaacaaatgttacaaatctatactcgatagctataatcaactattcattaaataattatacatatataatcataattgtatatttaattcaagaaaaaatatgcatttgtttataactggttaagagttcttccattcactttacatgttatttagcctcacaatttttaagatttgcatttattgttaacagtttgatatgaaaaatccaagaacagttattagggctgttcatctgattcaatccgcacttttttggtcnnnnnnnnnnnnnnnnnnactaagtgcggatttcattttttggatccaatccaatccaatccgca

SEQ ID NO: 88627 - DNA, 547 bp, Cannabis sativa
taacatttaacggttaggtacctagagagttctaaaaatataacttagatattattattgccaaaaattaaatttaagtattcatttacaactgagaattaaactttaagtatttatgccgcaaattaaattctataataaaaaaagtttataataggggcatcatttcgtccctatgagagaaatatctcttttttttatattggagttttttcataaatataagaaaatatagtagagttcacttttatatggcataaataaataatacaaaaaaatatgagaataaaaataattaaagtttaaaatataagaaaagcaataaataaatttaataaaacttgtaataataagttttaccgtaaaagttattggcgccgataaagtcgcaagtgctagaaaagttaccaaaaaagttattatcgttgagaaagtcagtggaaaagtcgttgaaaaagtcatcttcgccgaaaaagtcactgaaaaagtcaccaaaagtagatgtctccaatataaataaaaatagaactagttctataacataatg

SEQ ID NO: 88628 - DNA, 827 bp, Cannabis sativa
  modified_base (396)..(396): a, c, t, g, unknown or other
atatatattttataaatcgtcatgtacagaatgattcaaaaatgcctgaagtttgagaattaatcgaccaagtgccacacatagtgcctaaataaacttaaaaccttgaattggtcgaagaccctacaatccaatatccattgccttattatttggtacaatcatttagagttcatcgtaatgatgtcaatggccacacatcgaattggcagctctgtctttgctgccccattcttgcatatttctaatggagaaaaatgacatcaaatttaaaatacaaaatattatctttactaaaaactttaaccaagatttgtttcaatatcagttcgaatctatcgactgcgtttcgtaatcaaatattagggatttgttttatttttattttattatttnattatatataaataaaaagtcactgaatttctcataaaccaagaattcagttatataagcacactttatatagaatagatatatattataaggatgtcgtgtcgcttaattatatatgacataatgaaattagtaaagatttttctgtagaaaacatgtatgtgactatgtacgtttgtcaaaacaagataatcactactaataagctcattgatatgtcaaatggtataaaattacaaaaatacaattttacaaaatttaaaatatttttatagtttttaagattttatttaccgaaaataaaatattatttatatgttatcactacaagaaaatacattttcagcgactagattttttgtgaccaaatcaacttagtcactaatagttagattttgtgactaatttttagtcgcaaataattttagtca

SEQ ID NO: 88629 - DNA, 940 bp, Cannabis sativa
ataacatttatctaacactttattctttatacaagaacaaacaaaacaaacatccgaaattaaaaaacaaacaaacaaataaaacacaaaataaccctagtaattaagacaattatctaaccctacgtaaggatagaagcttttttatttccgtattatactgtatatttggtatatatattttaaaaataatcactagatgaagtctatatatattttaatttgaggagcagtatataaataaatactcatcttaaaaaagaaaaaaaaaaaaagattggaccaagaactgtgattttgtttaatattgcaaatatcaatggccaacttatatatatactgtaactgctagctaaccggataacgaagtttctgctaactcaaataaaattcaaaatagaaaaagataaataaatcgccacttcaataccacaagcagcttataataattaaataaaaccattcatgaagtgacttattaatagctatgtgatcacgcaatctttaaattaattaaacattgtagtttgcattatttattcatttatcaaatatatatttttaacataataaataaataaaaatcgtaggttttcattgagatatacatttacattattcttatacatctatatatataagaacctagcctgcccttaaaactcatcatcttcttcattttatcaagtgcacaaataagcacttatgatacctaaaatttaaacacacacatatatttatacatatcaatttttttcaataattaatatagtagagagagtactatatataataatttctatacaattataatatcaataatatggcaaaatcaatctctggggttgtggtagcttggtctttattagctactcttctggcttcttcaatggcctcggccacaatagtgcaccattctctatatgtacgtaatcctaat

SEQ ID NO: 88630 - DNA, 891 bp, Cannabis sativa
  modified_base (632)..(644): a, c, t, g, unknown or other
taccgccaaaaatacgacttaggtatttatctgctactcggcataaaacttaggtatttatgccgcacattactcaatattttatgcgtggaactaataatccttgcacattgctactagcccacgtggccacgtcaaaagataagattcattagtcaatttttgtcaacaagtaaaaagtaattgacttaaacaaaacatagactctctctaataattttaccgcaagcttgatgtactcctctttgctgaatgaatctccttaagacaccaatgtttgagctcccttcaaattacttgatgaatgcttgcttcatctcgtgcaagatgtatagaaatcttctcctgaagatagtggtgcttgttttctcctgatgtaagacttgtagaaatcttctctcaaagatagcgctgttggcttcttcctgaagcaagacttgtagaaatattctcccgaagataacgatgcttgcctcctcttaaagcaagacttacatgaatcttgtctcgaaagttgttcttcacgttcttcactttgtagtttaatttacacaaaagtaatcttaaaggcacaaaaactatattagagttagtcctacattgttagtgtgtggaaataaattgtgatatannnnnnnnnnnnnctactcctcccattgccaattgattttgagatggaaccacattcatcttatcctcaaattctaaaatagtatcagagccacttgtgatccgttgtgagtccaaattaccaccggtccaaaaagccgtttgtgatctgttgtgagccaaagtgtcgctggtccaaatagatacttccgctatctcccctttaacttccgtttgggacctttcggccaatgtgtgccaatttctagtgttggggtcttt

SEQ ID NO: 88631 - DNA, 649 bp, Cannabis sativa
  modified_base (393)..(402): a, c, t, g, unknown or other
gttttatcaatatcatttattatatataatagataaaattatgataattttttagtcacaacatataatttttatcactaaatattactaagttacaacattttttttttcactaattgatgttagtcacaaaaaactgtaattttataactaatacttttaactagagcttttagtatattaacataaaaataacaatatatattttttaactacaatttttcttttcatttttaatcacaaattttattataactaaaactatgaatttttgtaacgatagtgtgatatgaatagataaattatgttcactacaaaacatcttacttttagtcacaacaaaacttgtaactaataaaagtgaaattattacgactaattataaattattannnnnnnnnngtgactaaaaggtccgtgactaaatgaattagtgacaataatcacaatttgttgtgactaaatgtgtttttagttataatacttgctgcaactaaaagtaaattagtgactacttgtatatttaaatgctatgttaatttagtcacacgtaattaaatattgttgcaacttataaaatcacatttagttataaactttatgttgtaactaaaaagttatcactaagataggtttttttttttttttt

SEQ ID NO: 88632 - DNA, 796 bp, Cannabis sativa
caggaataattaatgtttaattttcttctcttttttcgttttgagagcatatatttttgatgatcgcccagattttattaccacataaaaaatctcctaatagagatgatttagtctcgcagtattaattcccttccaaaataataataataataataataatgtcattttctttttttcctttcgaatcacaaataatgtcattttccatacccatgaatctatatagtgtaatctcacatatttttcatgcataagtaatatactcacgttagcaaatagtttatgtcatttttttttcttttgctgtatatttttattgtactgcaactattttcttctatgattttattaattttgtagttttattatactactgctctcatgttgacttcgatttaatttttggtgtttgtactttgtatatgtaatgttagtaaattatggtgtgagtattaaggtgcataaatagagtttttgtcttgctatgctttaagtaattttatgaagaaatatggactagctgctgaaaagagcagtgaaacaccatatacaatgtaagttttatataaaatgtaagttttctttaaactaccatataaaatgtgttagctgaaatgtacgagttttctttaaattatcatataaattgtcatttggaggcatgagtttattgtccttctcaatttttgaacaatatcctacatatattaaaagagtcaataaatattactattcatgaaaaggtcaaccaaaactaatggtttaatgggattgcaccttttattccttccat

SEQ ID NO: 88633 - DNA, 698 bp, Cannabis sativa
ttagggctatattcagagtttacaatattctaacatgtggtatcagagcatccctaaattaattcttgaggatttatagtagtgttggtcttccattaaattatgtttctgtctgcaattaaagtttgttttgcaaagcatttataatgctttaggattgaatatttattctgccgtatacatatatattttgttttacgattgcaatgtcagccgcatatatattatgctaattgaatatatatatatatatgatgtgctatagaaactttgatatattgaaagtttctttgcaattaaagttttctgccacaagtacgtttactgtttctgcgattaaagtattcttcttcaagttttgtttttttggtttctttaaaagagttatatatatatatatatatatgttggtttgtctattagagattatatcattatgattataatcgtacagaatattgagagttgtgtgtgtggcttcgcaactgtgagttgagaagtgaaatttttaatttttggttttatttattacatatggttgttatctatatgtggtctcattcacttttaattgacactgcttttcatggtgcgatatatatgaattgcttactgtttcgttttttacattattattattattaaaaaaaaataataatagtaataataataataattcagtaacaattaaattcaaa

SEQ ID NO: 88634 - DNA, 3616 bp, Cannabis sativa
gtacctcgcaatattaactgaaagtaatcttgctgtatcaaagaaagcacacctcacatatttaataaaactgcagtatcaataaaaaaaggtgtgaattacaagttaagcattcaaagtacaattaagacaaacgttacatactatctataagtagggacttctccctccattcaaaaggtactaggctaatctgaaataataaaaatgcaaagcaagagatctcttttcaagagtggattgggcaggccaaactcgaagcttttactgaactactatatattttgtgtttattctataatatttacatacttgtatataattatatattatattttttaagtacttgcatatttggtgttgtctaaatttctccgataacaaactcgaaattatatgttataaaacgttcagttctaatgaaatatagcaatggaataatatgaaacaagagaaagctttaaatttcattccctcaatattagctaagaactataccatttcattatacaaatgttataacaaattatagccaaaaaaacttctatacacaaaagaagaaaaaggaaagaagacatcatcatgcccttgtcttacaatttaagcaaaacttgctcaagaaaattgcttcttcccctcatcggtgccataaattcgttgaagttcccgagttgcagccaaaaaggattctgtaaaacaaggaaatcaaatgacctcattaacttatcatgtttagaacgattttcaattcgaatgacatgtagtttttcttacctttccaaagacgaaatgacttctgattgataggcgaaccggtaatggtttgaatggcatcaaataacatgttctgaggtgtacttctgagttcttgaacaatcccatagacagttttaccattctcgaaataaatatggttattcgggtgttttgttttgcaatcagcatgacgttcgaattcatatgcattgatcacctacaatgaaatcagcagtcatctaagaactcatagctcgatcggtctcaaaacttccctcaagaaacaaatttaaatcaaagcataccttagtgaaattacatgactgacagccacatagatatccagcgccttttataacgccacgaagctccttctaatatgcataggaagagccaatacatgtcactaaacataagctaattttaaaagtaccaaatgttatgtaggtacccaagagtgactcgagttttagcccctaccaattctgttacccctcttagttctaaacataagctaattttaaagtaccgaatgttatgtaggtactcaggagttactcgagttttagccccgaccatttgagttacccctcttaataagctaattcgaaagaaaggcattataacaaagtaatgttttttacctcctttgaccaggcaacatacttcacaggcactccatccagcataccagtcgatagcaaacttcgaacatttgaagggaaattgttcggttgagtcttcttaaggaatttgttatcatctttctttttcgacacactttctgcaacggaattagttaaatgggaagtagtgagtacttcagcatttgagttagcaatctttttctcattcatttcttccatcttttgagccatcagcaattcataactcgaaaccagtctatcatcatcataccctccaaatgatatgatagtactctctccattgttaaaggaatgtcccgagttgaaagcatgactcgtcgatatactactctcttcctcaaccttgttgaatgtttgatcagctgacataaaacgattatctgataagatatcattatcagtgtccctactataagcttgtcctatcgatacaaacataggattctcagaatccttaacctcactcactttaactttccttaaccctccataagtaacactcgatctaggatcatcaagggcatgaggcattgacaaaccgaacgaggaatcattattaccaaatgaatcctcctcaacttttctctccaaattcattttccccgagccatcaaaccccacagtcttagctgtctcgggttcatataaccacgaatgaaaacccggaggagtactactccaaggagaaacacaagcacttgtgtttaacatccccgaaaagggatgatgaacaccattgggaacttctatagcttgtttcttattaggaacaagctctacctcaggatggccttccacgaaccattgttgttgagatctcttcaactcgattctcgaagaatcatcatatgccatctctccatcattaccctttgccacccaaaacccttgattctaaaaaaaacaacagagggggttccaaatcaacaaaatttagaaacacattctatgtgtcctcaccaatcattagttacataataagcttacaatatgaaaccaaaaatgatacctttttcatgttacaaattttagtaactacaaaagcttacaactttatgtttgtttttgtttaaaactagggtccctcattaatcttagatacaacatttggggacaaacataaagctacataacaaatactatgtaggaccacacattagtatttggggaccatttgaattatactatatactctaactgagactgcaataataacacagcagagaaaaaaaaacatcattaattaaaaaaaaaaactcaccatattttggtggtatcacttcaaatcttcaaaaaaaaacatagaacaagaacaacgagagtagtcaagctaaacttccctgaaaacaaatgtacccaattagaaacatatatctttacaatttcaaactcattcatttcagctgaaaaacataaaaagactgaatcttttcgtgtagagctaaacaagatttgatttttattagttaaatggataataggttgatttcccaattgtacagaggagaagaaaagtaaagaatcgaaccttaaaaggaaaagggtatgaagatccattgatgggagattaattgtacggaaaagggtgttgttgttgagatctatgaaaaatggtaatgttattggagattccgagttgagttgagtttgtctgatataagagtaagagagagagagagtgggttgcacgatcatattcatagagagagaatggaagaagatgatgtaattgcatcacaagcgtacacgtgtacatgttattataatatgatgtggattatgtaacataagatatcagtactcaaatctcaattcaaatgtatatgaatgtttatgtaattgtgggtctccactaatcacattattttataatttgttttttatattttcaatttaactctttttattaatttttgaggtttttctcaataaaatcttttaaattactaaattgtatcatttatttttcacagttaactgttattatgaattacatacttatgtatatatctttgtacacgtgacacgtttatattaatatatttaatattattattagatgacacctgaatttactaatattcagtagttttgaaggttttaccactaaaatttaagtttgaaggactaaatgcaagtgaaataatagttagaaggatttaacctccaaaaaactcttaatttattttgat

SEQ ID NO: 88635 - DNA, 1237 bp, Cannabis sativa
aattgcctaatcaggcaagcctatgtcataacttggcaccaatacatcgcatcgtctagttagacgagcccgtacttacacctactacgtatcatatgtcactgacgcccgtatctatgcccaatacgtcgccaagaagaaacctaacaatggtttcaatctatgtcgtaactaggcaatttcatatcactgatgctcgtacctacgcccaatacatcccgaggaatgttacatcacctaatcaggtgagcccatacctatgcggtactcatcatatgtcattgatgcccatactatgcccggtgtcacgggccgcctatttggacactctcgagtaggtggaacgtgcggcacttgctggcacaccaaggtagcaagtcagcctaaacgcgcctgcaggcaaacaagttcaaaggataggcacgatacatgtctcgcgcatgttgagtgcaaaagagaagcatgagaaagcaaacacaaagcctccccaaggaacaatctcacacaaaagaaaacatatagacaaatggcacgcaatggcccaacaaaggcaacaaacatgcatcacaaagaccatatagaagcttacacaagaagcatcgataaacatcattttattattatatggccttgatatcgcaagggagtacatagctgggccccaatcatgctggtaacaaggtgcttcataagtcacctggtcaccaaccctaaagagcttattggggttttaaggaatttccaggaacatacatgattatagctcactatacatatttaaatggaaatacaaaagaaagaaagctaatcaacaaagtctccccaccccaatgaggtgcttggtgcaagacttgactaaagatcaagcactaaggcatgctcatgttaccaaagggccccattgtgggtgtgccatggggcaacacgccacattctcccccacttaattattcggggtcctcaacgaacctgctgcatgagcttcagtcttctgcataaactgttgcaagtcctctgccttcttccagctaatctcgtcatcagcgaggcccttccatttgatcaacactaagtcacctaccttgaactctagcggtcggtgtttctaatctacccacttcttcattcttcgtgaaaatttctctgagtatgcttgggcaatctctatgttcttcttccagtcttttttaaaagtgagggcccgcggattttttccgttgtattcatccactgtgtg

SEQ ID NO: 88636 - DNA, 1126 bp, Cannabis sativa
cacctatagtgctattctagcacccttatgagtagtaatatctctattgttaactcagatttttgttaacagtaaatgaaactttgtaataaaaaactgattgcttatatttaataaatatgtatgaaacattaagaattttacgtagttttgtagttaaaatctacatactccacgagtcactattatttcctaatcatatgtttagcttacaagagaattactatgaatatttactcaatcttatagggtctttccatcccaaaataattgatcattttccccttaggttctgtccctatatatagatttttttaggaagggcagttatttctcatttttaatttgaggaggtacgatttattttgtcaaagtttagggggtagagttgctaatttacaaagacatgtcagtatttaaatggtgctaacctagaaattgatctcggtgacatgaataacaatgtttgacacgtggcaagaaagaaaaaatcgtgaagttgagtagtcctgagtcatagcagtcgacgtgggaggggtccctagccctgcacctaggttgacttcaagaacaccggaaggggtgtttggatttcgtcaagttatttctaactcactatctttcagtattatgtaccataaagacatgaagcatccaagtccaaggcccgggagctaaaaatacacgaaacaaaaccacaaaaatcaaacccgggcgcctagggtttcacccagcatccaagttgacaacccccaagtagggtttcaattcttgggatcttcttaatgtgaatgggtcaaactttgtactgtaacgtgaagtatacatgtcgcgaacatatttgagacattagaattagaattagagaactttcatttttgagcacccgaagcactaggtgccccaggtacccagcacccaggttgacatataacctggtgcactgggttctgcttatcggattctgattttgtcttgaccattcatctagttttttatagtgattgagagctatgaagtcagaagagtaaaatttataatttcatattttcactttttcggcaaagtgacttgcttgcaaatcgggcatttttgagtctcccgatttcacaaaacaacaacatct

SEQ ID NO: 88637 - DNA, 1166 bp, Cannabis sativa
acatcggggcaaaacattgaatttcaataaaaacggtatacatataaaataagatactaatattgtttaattactgaaataaaaaccaatcaatttggttttagtatcaaaatctagcttacgtatatggatctgttatagatctcaccattaaataatactggcaatttttatcaaatggactataattgatttggtcaaatgtgtcggaatgtattttctgtatgaaagaaaaggcataatgtatatttaagaaataaatatgcacacacataatgaccttaatcaatacaaaacatatcatttatccaaattattaatatcgtcttttagttttggagtagagagagaattggattgaaatgcatttcattaattggagaaaattaatgaatttttagagtgaccatttagctcaactgagcttatatagagtgaaatgtactagtctacagtttcaactactataattgttacaactagcaaaactaactaacactcatcaaagacaacacactaactaactctcaactaatctacaagacaaaggttaatactccccttctagatggagagtaaatattcctaaatcccatcttctctttaataagcttgagctgtccagggaacaatgccttggtgaatatgtttgtaatctgttcttttgttgagatatgagttttcttgatcaatcattggtgcacattctctcttgtcaaataataatctatttctatgtacttttttatctcttgggaaataggttttgcagcaatatgttgtattatcttgttgtcatagttcattataaccggtcccttatgttcgatccttaattctttgagcatggacagaagccaaataatttataatgtggtgttcatcatagctctatactcagcttcagttgaggatttggaaattgtatgtttctttttggcttttccttgaaattagagaactttcaaggaatatacaaaagcatgtagtggatcttcttgtgtctcgacaagcagcccaattcgagtcagtataggcctctagtttcactttagattatattagacagaagagttctttaatatgaagtaatcaagtgctaggaatgtaattgagcattgttttggattattgaaaatgtgatgggatattctcagaagtccatc

SEQ ID NO: 88638 - DNA, 582 bp, Cannabis sativa
tttcaatttgtttagttgctctgtctccccaaaattgaaatttgttagagtcggatactgccattacttcccaaacaaaaaagattgattggattgtcgtattgtcttataatcattctttaagcaatatatagattagtaaacgacgaagattggaagaaagatgattaaaaaatcaacacaaagattcaattcgtacttggaaaaaagcttggcttttgtgtcttgaagtgcaggtccacacatttgacagattgtcaatcttgttgaaaacttggattttgttgctttgttttgaaatttaatgtgaagaagggatagaatagaaagtcatccaccaccataggattgtatccaaattcattgctctgtaagggtcaaaaacaaacatcagccaaaactagcattatcctagaaagtagtttagaatatttagcttgatctagattgtaagaaggaatataataaaaaaacaatagctaaagctgaatactaattatagacatgtagtgatgattagagttaaattaaagaaaatggttgatttcaaatcaaagcaaatttattatgctgttactgcag

SEQ ID NO: 88639 - DNA, 966 bp, Cannabis sativa
ttatgacccctagatgtcctgccatgggccatggcatgggatctgcatttggcctccttgtacctgggtctggttgtcttgcacataacgacacaagattgttatgccttagtaggtacgtaatctccctcttcgtattttaacactcattagtgtcatggccgaagttgttatgacatcagtagaactttgacacgtccctcttgcccatttcccttttgataagaaagggctttcggtatgggaccgttccctgagtggccatgaagaaggcctcaggcttctctattaggatggtgaagcaagtgaacttatcctccttgctcttctgcagtgtgggagaattgttaaacttctctttttttccattgttcctcctatagttgttggtgtcgcgcttgtttctagtgtgtttagcactagaagtttgggtagagttattgttgtctgcctatgcacttggtggttcatgaggctgttggatgcctcgtgattacttgttgttgacatgccccgcttgggggtatcgtatggcttctacaagtttgataaagctttcagctctatcgaggaactccttcatgtttttggttgatattctccggatatctttccagaagtctcttagtgggagtatgctcctagtatggctgtatattggccttcttcattaaggactttgactttggtagcctcagccatgaatctctgaatctaatccttcaaaggttccccttgtcgtagtttgacttcgacaaggtcttccaggtgcgatgatacaagtctcaaggatgagaattgtgtatggaattctcatgagaactcagctcaagagttaaatctccccgaggtgagtttaaagaaccattattgggcattctcggacaatgtggcttgaaatatgtgacaacgcacatcaccagtaaccttctagtggtcgagctgcatctcaaagtatttgatgtg

SEQ ID NO: 88640 - DNA, 626 bp, Cannabis sativa
aaaaaaagtcacccaatatataatttctcataaaccaataattctgttatatagccacattttatatagagtagatagatatatatctaaattccaatttattttccataatattgtaaatattccaaaagattatcaaaattaaaagaaacaatttagttattttctatgtatattaaagataatcacataatatactatttttatatatatatatatttatattgaaagttttttttttcttacatttttacggtgttctataaaaataataccaaaataataagaaaactacataaaaataataggaaaataacatcaaacaacaacaaaaaataacatacaaataatgataaatcgacgatatattaacaaaagtacaacataaaaatatatcaaaatatcatattttttataaataaaatcataaatttttttaaaatatttaaaatttcgtacaacattacttttataatttatttttatgcatttgtaaataatccctatatattatcaagaaaaaattaaataaacttcaagtccaataaattttatcttttgacatttggttactcttttgattagctacttttaaagtaattaatgaaaagatacaacataaatat

SEQ ID NO: 88641 - DNA, 645 bp, Cannabis sativa
  modified_base (311)..(311): a, c, t, g, unknown or other
ggtatttaaaaatccaacgcatcgagcatccaacatccaatcgaactaattagtatttttatttaatttgaatgattaattatattttgtattattatacataaaatctatatgtatagatgaaaattaccattaaaattttactctttttttttttaattgaatagatttaatccaatccaatacatactgaacctaaaatattaaatggattcgatcaaatccaaaaaatactaagtctaatatattgggtaaaccaaaattaaagtaataaatatatatgaaatatattcaatggatagaaccgatcnaatccaacatccaatggatgttgaatcgattgaatgactgaaattaattggatcagatcggatgttaaaatatagcatctaatgtataattgaatcagatctgaatagacctgaaaatataagatatgatccaataaacacccataattaagatactttttttactcaaataagagaatggggagaaagagagcttaccatacatatacatatgttcattaataacatgttacaagcaaaaaatagctttcatcttttagcttaatcccaaatcaatcttcatttgagttcacgtttaaatggcaaacctaccaaaatgacaattagggtctat

SEQ ID NO: 88642 - DNA, 1012 bp, Cannabis sativa
tataaaattcttgtctctttatttactatattatattacactcgtattatactacttgttgtttacaaattagactcattgtcgtttgctaaaagtaaggtcaacaccaagaaaataaaagtttacggaccaacttgtcaaaaaattaagtttgtagaacaacttgctaaaacttatataaatttgcaactaatttataaaaaaataaaatttgagaaccaatttatcaaattttttataatttaagaacatgcagtaaaaataaatttatatattaactatcaaatttataattgcgaagtgaaatcaaaatctaatttttggcttgaaaagtattttcattaaaaattaactatcaaagttataactggggaaccgtgaaatcaaaatctaatttttggcttgaaaagtattttcattaaaataactatctagaaataattcatttctttacaaaaagaaataatttatttacttacttttattattttatttgagtattttatattttgctttttccttgtttgtgtttttctttaaaataatattttaaactagtcttcatttccttttcaaacaaaaaaaaacgagtcttcatttaatattaaataaagagctagacctttaggtacaatttattgggatgagaattcatttaattaaaggatccttaattaaatcacttgagttcctggatgtgttggaggtcctgtttcagataaaacatgattgtaatatataaacacttaaataaaaaaaaatcttaattaaaagggtaacggctttatttatagagaagggggaagagaagtgcacaattcacttcactatactgatgccacgtgaatgttggtgattcacttacatgatataaatatattacacatttattgtgatcatcggtcatagcagtatttgaaggcataaaaccgaaactgcgaagattgtcatgagaccaaagttttatctgttcggcgattctatcacggaagagtccttcggtgatggtggc

SEQ ID NO: 88643 - DNA, 687 bp, Cannabis sativa
tgtgttgttaattagttgtttttggataactgttgcattgagaaaaaagaaccctacacgctcaagttcacttcattcaaacggccacgtggcaggcgcagagtccctgccacattctagcgctgtagttctgcacgcgtcagtaaatctctttactctctccactcgcgtgtgagtctcactctcttgtcctatccacatgtgtatcttactctctatttttatacttagaatttatctctctatggtatttttgtaataaaatagtatttttgtaattagtaaataatataaatgttattttttcttgaaatgatataaatgtttattttgtgtaattttaacctaaaatagaaagaacataatatttaagattaattagattaattataaataaaaaatatatattaattatggtgtagttttcaagagttaatttgagccattagattaaatcaaaggctataaattactatccaatcaaagactataaattacaatcctattgatacctaaaatatcaaatccctactataatagcccctttaaaatgaatttttgaaaacaacacactatataaagagaactagaaaaataaaactaagtgagtaagataataattaatcatctatataaaatttaacaattaatattgagacaaaacaatgtgtaaaaaataaaagcttt

SEQ ID NO: 88644 - DNA, 534 bp, Cannabis sativa
  modified_base (487)..(488): a, c, t, g, unknown or other
tttatgcaaatgcaattaaaactggaaatttcatataatattctataagagatataaggatttggaaataaatcactttcaatagattacaattatcaaaatgtctattataacttaaaaaaattactttctttttcttaaagcataaaaaaaaattaatttcaagattcatacaatattgtttaacagaatctttacccattaagtaaaattagattaaatattctatagtctaatcagttttatttttctccacaaaattagtattgttaagtataaaagttagaataaaagaaaattgaaacttacgtgtgtaggggtggcatagccgtgtggcgtgtaaactagttacttagaatatattgtataggttaggggtggacattcgatctaatttaacatttttttcctcatccgatttagtctaattagtaagagatttttacatgctatactaacttttatcatttttttacaaaaatactgnnaggcggtattttttactttttcactgtatttttttataagtttcat

SEQ ID NO: 88645 - DNA, 840 bp, Cannabis sativa
gacttcaatgggcaaactagtgtcgatccgatgctggtaatagagatccacacaatcaacttggagccgcttcaggctggcctcgcaggaggctctaacatacgccggatcacctcgaatctcctgcttgccgtcggcaaagcgtattccaaacttggttgctagctcaactttctccctcaccccttgaagcgcctaattacccataatttaatttcaattgaaaattcaaaagttgatcagtcccaaagtcccagacaaaaacagcggaaagaataaaacataatacgaaataagtgtggaaaagaagagaagcaacctttccgagaaggatttcgttagtgaatgggccatagacgtcagatgtgtcgaggaaagttacgccagaatgaatggcgtggtggatgagagcgatcatgtccgtgtcgggcttgggtggaccgtagaaggccgacatgcccatgcatcccaggccctgagccgagacttgcagaccttgtgaacccagcttagtccttctcactactgttgccatttttgtttcaaatacagaaagaggttgtaaacagttaacagagttagagtggtgagtgactgaatgttggggtgggcttcttttttataaagactgtgaacgaggaagacaaagatgaatctgcagtacttttgaattggaggatgatctagtcaaaagtcaaccattccatatctgtagtcatgtttgcgtcacctcttacgttttattcatttcaaaagtcagttttttttggtcacttacgtgtcttctacaacaagagaaggttctcttacttgaattggggaagaaaagtcggtttcttt

SEQ ID NO: 88646 - DNA, 690 bp, Cannabis sativa
ctctctctctctctctcattcattatggagtcgagcgggaccataccagacggagtccttgcccaccacggtggcgccgctcgcaccagtccaagccccatgcatcctcattgaatcatggttgtgcagcctaggtataatgtctcctctttctttttctctttctctctctccgtttgattccttcatcgtgtggtgtctctttctctatcattcgttgtcgcgaggtctctctctcattgtctctttgttcttgcaggtagttcgagggtagtagtccgaacaaggaaaactcagtggctaggtcactctctcatcctctctccgttctcttcaaatctttgattcgtgtattgcttaaatatattgtgtaatgtttaataattatagtgtaatatatatttgtataatatcgtagatctgtgtttatattgtgtaatatttgagatttgtgatttatatgattttgattgtggctcagatctgggttcataagggcttagttttgatttttgtttgtgtgacggtttataactgtcaataattttttttaccgattgttctaaaccgtcggctatagtgtgccacaatactttcaaatagttgtgaataagcatactcaactattttctaccgacacttattcaatccagttttgcgacggtcggtgtgctaatttttttattaata

SEQ ID NO: 88647 - DNA, 767 bp, Cannabis sativa
ttctaggccacaacaaaattccacttggcatagacacttagacttagaagttggtaatagagaatgcagaactttgatgaaaaatgagaaactcatccaatttccttgatgttgaccaagtttaagcagtgactaaacttggtttgagtgacacattttgtaaaaatgtcagcaggattgtgatctgtgctgatcttcttcacttgcacctctccatttgcaatgatctctctaataaaatgtagtttgatgcaatatgctttgcaatatcatggaacatgggatttttcatcaaatgcaaggcactttgattgtaacaatggacagtcaagtcttctgaactaaatacaagttcctttgagagaccttttaaccaaattgcctcttttatggcttcagtggcagccatgtacacagcctctgtggatgacagagctaccaccttttgaagattcgacttccagctgatgcatccacctaaagcagtgaagatgtagcctatcaatgatcttcttgtgtctatgcagccagcatagtcagagtcaataaacccttcaacttcacttccacctctctcagttgttttgtagattaaacccaggttaagagaccctttagcatacctcataacccatttgacagcatcccaatgctttggccctgggtcagcaacaaatcgactgattatgctcatggcgtaggccaggtcaggccttgtgcataccatggcatacatcaagcaacctacatagttagcatatggtatg

SEQ ID NO: 88648 - DNA, 664 bp, Cannabis sativa
tcttaattgtcattaaggaattggttaaatactatttttgatcacatgttttacaaaatttactgattagactatttattttgttaaataataatttggagtttgtactttataaaatggtacaaaacagtaccttagaactcaattatcgtcaaattaaaacttaataataacttgtccgggatatgttatgattagaatgattatatatatttttggattcattcatgctaaaaactcatttcaagttagttatattaataaaaagttgacaaaaattgagttcaagatatattatgtactatttttaaaaaatatagagtgatttattattgataaaacagagcatctgattagtaacttctacaaaacaaggttcaaaacaatatttatcctaattaattatacatgaaaaaaatgaggaaattacattgtatacccactttattttatttgttttaatttttacctttattttcatattcttcaaaatatactcatttttatagatgatgttctcattagaccccttaggttaatataaattatatgctagacttaagtaaagaataatgatatattggacaacttactcacaaaaagtagtaggtatatttttaataaaatatagtaggtgagtatttttaattagtaaatataaaaa

SEQ ID NO: 88649 - DNA, 1667 bp, Cannabis sativa
taatgaaatttctcaaaaaaaaaaagtatatcaaaggttcaaaaattgtcactatactataagaacaaaataggtgtgcttaccatagaatttttgtatatatatatgcttataataatttgtacactttattataaccatactcttctaactacaaagaatgtatctatcactatcattattttttaaaaatatatgtttagaaataatatataaaatgtattttgaaagtaattaattctctaatcaaatttaaattttatgaaaatatattctaatataatccttatatatagagaaatcaatataaaatacgtataacaataaaattcattcttttattgtacatataaaatacgtatatataattatatttaaagagcacactaatatagtcacaatagctaaaaaaattctcaaagatcaaaatctcaaacctatttcaaaaattaaaatataaaaatgcattacctaactaaaaaaattgaacatacatgtattgcacttaatatcagttaattaaatctaattaaaaagaaactaattaaattgattgcacataacatcaacctagtacatataaacagatcaaaagtttcttattttggagaatcaggtgggcttgcccaaatttttttaaaaaataaatactttaaggaaagaaaagaaataaaaaaaccaatcacttttgtaatagtgacaacattacattaaaattcaaattttaaatttactattaaatacactaaaaaatgtgtatgaagaggtaaatttagttttttataattaattttttaaaaatatatatctgtcataaagtgacaacaccgtcgtataaaaaaaaatcactattaaatacaataaaaacttttgaaagagaccctagactgacatgtgtgaacgaaaatgctacataaaaagttttacaattaaaacagtagtctagcgctaagcatcggtcggtttggtcggctttttctatattaaaatctaaaattcagttttcgattttgactgttgcaattcaaaaatcgaccgaccgattcagaacttatcttaaaactgaccgtttcgaacctcggtttcgtcgacttaaatcgcccgagccgaacttcttttttttctttaaaatatgatccaatttattctataagcacattattctacattttacaactgcaaacatacaaattaattgtttaaaaactaattatcttactcttttaactttaatattaataaactaataataatatattgttagtaactacaataactacaataaatgaaaaaaaaaaaacttaataaattaatatatatctataacggtcggtttaagttttttctatcattttattacccaaaaagactgaccgttcaatggttgtttcaaccgttagcagttttttcgatttttagttatgtcgatttcggttctaacgatgttcggtaggtcggtttgaactgtttttttagttttctaaattttatgttcggccataaacagtacacagtatatatcaaatgcagtaaaattataaatattggcactcaacagtaaaaattaaaaaaataattagtatatggcgtaaaaatctctatatatactagacatctactccatgtaatctcttttaattaaatgagatggacatgatatacattta

SEQ ID NO: 88650 - DNA, 793 bp, Cannabis sativa
  modified_base (619)..(622): a, c, t, g, unknown or other
tgagctaggcctatcagtgtggcagggaagattttgcacctgacgtcgtctctcacaccttgtagatcagtctgcacttcaaagtaatgaatgtgagataacagatcttctttctcggtgtattgatgttaggaagggttctctaacttcaaagggatatgaagagctttgattcattcaaagagcggtgagcgccactctctatgaagtttgaattcaaataacgtaggagtcgtgatccccttcactaaagttgccaaggtatatatcaaattatgcccagttgaccctatgagtggtggtctgcatcctaattggagcttttgttacccgagtagggtctcttctagaagttcccacttccactatccttttcttggtcaagaggacacgcaggactcttggtcttccaagtcgatcttgcactttggtcaacttgggtttttttgttgtctcctgaccacagggtcatgaaggcaaaattggtgaagtctccggaatgaaatctggattgtctcgggacgacccgctataggagtgttcatttagagcattgtagtggctacttccctcaaagtagtcttcaataggatcacaagtgtgaagagaattgaattgnnnnctcaagttcaactcctctccatgtactttagggaagtaatcataatgttgctcattggggccatgggcaaagtaacagcataattagccctttcagaagtattttcgagtatgaagtggtttattggtccttacacgtcagatatcgtagcctccaatttcaaagtagtgt

SEQ ID NO: 88651 - DNA, 1157 bp, Cannabis sativa
tctaaaccacctcttgatctcatctctaatgctctctctcttaccatcttaataaccttcatggttttttgaaatatacaatgtgttcttttttttttttttgaaatatatacatgttttattgaatgtaataaataaataccgcatgcaaaggcattttggaagtcaatgttttattcttactatgttttaccatgttagcatataccaacagcagtccaaaactctaaaatttaccataatatggtttgctcttttcgaaaattgttaacctatttctcattccacatttttatgttaaatatgtaagaacagaggaaagagtagagaaaataacaaagattgaatggaatgattctgtacatccattgaagagagccaaagctctatatataaatacagtgtttataacagaaagacaactgtgcagacagttataactaacatcctaattgtacccccctcaaacttagcctagataaaaaatctaagctaagtttgtctctaagatacagaaatctgatgctagcaagggcttttgtaagaatgtcagcaatctgatcacaagtcggggtatgtttgacaagaagctgcttgttgattacacgttctcgaacaaagtataagtccaattcaatatgtttagttcgagaatgcataacaggattggcagccattaagacagcactttggttatcacaccaaatgactagaacatgctgcaaatgaataccaatctcagtgagtaaagcttggatccaaactaagtcagctgtggcatgagcgaagctgcgatactcagcttctgaacttgatcgagagacagtcttctgtttcttagaggaccaagacacaatgttgggacctagataaatgcagaaaccagaagttgatctccgatcatcgggatccgaggcccaatcagcatcacagaaaccagtcatggttaaagttgaagttgatttaagatgtagaccgagatcaattgtgccagacaaatacctgagaatctttttgaccgttttccaatgagagtcaagaggggcttgcataaactgagacacacgattcacggcataagaaatctcaggtctcgtaatagtggcatattgtaaggcaccaacaacactccgataaaaatgaggatcatgaaaagg

SEQ ID NO: 88652 - DNA, 727 bp, Cannabis sativa
atagaacgctctatatgtaccacgttatagatacgttatgattatccattgttacaatcctaatagtcaaagatcctctacagatgactgataaagtctcaaattgatacattttaagtctttatttgtgcacatataattaatataaattaaatatttgttatttttaatagtaaatttattcttattagagatatttaatttactttaattttgtgttacttttcagatttatagtacaaatgataagtgatgagaagacatgaaagcccaattcaatggcccaaccccaacatgttccctccatatcattcttcaccattaattttctaattccaagctatgaagccacgtccaaggcacaggttattgttaggggtgggctcattactcaaacaatttcatttcaatctttatgaatcaacaaaggcccaagttagaccaagtcaagcttcatataatgtgtgtatggcctgttaagccacttcctttcagcaacttaagcctgacgcaacttcagctaatgagcttatcaccaaacgccacataacccacaggttcctttagttctccaacaaagttgatgcatggacccattttctatctcttcatcagtttttcatgccactaaatccactttattgtatacgaaaatacatgtaatcggatcattttagctctataaatagaccaatttggagaataaaaaacaatcagattttaccta

SEQ ID NO: 88653 - DNA, 642 bp, Cannabis sativa
tttgttagctagggacttcttcatgtaaattgatcccagtttattccataaacccactgcagtttcttcatcagcaacctctcgaagaacctcatcacctaaactcaacaagattgcactatgagccttctatccaatttcttgaatcgtcttcttgtcatctccaagctctttgagaacaataacatcgagtgctttataaatgtcttgatgaactaggagagctttcatcttaatcttttatagatcgaagttatttttctctatgaatttgtcaattcgaatatggttgatgccattgatgccaagttcttgaaacttgaaacttggttcttgaatctttgattttagccatggagctctgataccaactgttgtgagttaacacacttcaagaacaagtcaatttcaataataatgtggaataacacaataatggcaattaagtcaaacctaaaaaataactaaaaagagaaagatattgtgacagaatgttgtagtatcgataataggagacaacaaatttaacgaggtttaatctttaataattttttgcttggatttaatctccgggaggaacaaccttgtgaccaatctttattcagaatagtagcttaaattagagagtgatctcaaaggatc

SEQ ID NO: 88654 - DNA, 2003 bp, Cannabis sativa
ttttagtgttttgttttagtcaagtttttattatcctcacagtgtttaataattaattaatgtattaataataaactagtttataaaatcacacacgtggcgttcctatggattagggcattacaagaattatggcccacaaatcttctcttttggttggaaaggatgactccttcatttcgagtagctttctcactttttgttaagtcaacaacttaacagttgggattgttttgtggtatatcccacaaaatctgaaacatcattagagacaatcaattcctttattcttggctcccaaatctcccctaacaggtaatgccactccatagagaccttgttttctgctaggaatattttctaaaattggaaagcgttgaccaagtgacaccatcgaactaccgctacctgtggtggcccgaaacgataaagacgaagggttgcacaaccattttgacccatcaggaaaattcattgtcttttgtctggctttcatccaaacacaataaggtttgaaaattttgttgagaggagtaaggaaaggttttgaaacaaaacctatctctgtggccaataatgccacaaataaagtaaaaaggagaattctttcatatttaaactgaacatatgtccagtcactatccttttgatgaagtcacatcttacattttagaggaacgtctatattcaacataacttgcacgcaaaaatagtctctccaaacacccaagaaattattcaaattcgattcaacaaacttttcgatatattgtctgacttcttttagaattgtcacagacttgagaccaggtataacatcaagaacctgaacccaaatgtcaagcttattcagccacaatctgtaaattatccccttcttctaatttttcaaaaatacgttgttctctattacatgtccaagggctgccttctattagtctttgaatatatatttcatgaaaaaattgaaagataaaaagattactttgcaattgcttcacatagatgcccatgtttggtttctatagattagccaactaattttgaacaaaatcaaggtcgatcaacctatcagagagaaacattcccaccaaactccatcgataatcaaagttgttattctactctttcataggatcaaattcagaaccaccttctgcctattcatccaggatcaggttagcatagtctaactctaattcgtggattcaagaactacttgaggaagccataaagcaaaaaaaaaaaaaacaaatagaaagaacgaaacaaaaggaaaaagaaactcatggaaaaaacactctaaaaaatgtcaatagacaagaccttgattttgtgtttttagtactgatcaagtgatataatttaaaatataacattttgatgtgtgtattataagtaaagtaacttttttaaagttaaaatcacaattagttattgtcaaaatatattgaaagattctctcaaaaaaatatggagaaagattttttattttgtaaacatattaaaattggtagaattaataaagaaattgcatattttttatactcaaattgtgggaaaattacaaataatagtgcaaaatcaaaacagctaaactttgaacaatcaagaacaacaatcaaataaaaaatagcggaaaatagagaatgtaaaacaagataccattaaagcagaaaataaaaaaaagaaatcaacaccaagatatatactgcttctagtccaatagatcgatgtgacctatggctctactccaattccggaacaccactgtaatccttctttatagattgagcacaaataagtacaatactgtcgagatgagattctctaaagagttctcacaaagtgtttcaattctcacacttacacttaagaatcttcttcatcaataaaagattcttcttacataatcattgttgacctcgcttttagccaacgacaatgagtcttaattgtaagcaacaagtaatataatatagatgtaatatagtaaaataaat

SEQ ID NO: 88655 - DNA, 779 bp, Cannabis sativa
taatggggtaagtatatataatattttgacattgggcccacggatagaggttggcccatggggcaaagttggtcaatatgcctagggaccacgtgatatttgacagatggcttgcgtgcgtcgctactgtgtacaatagtgttacaatcatgaccgtcaggcaaaaattagtttttcttttggtggtgcgcacactcttaggctcagacataaagaacaatcccctgattatgtggaattcggtgtgagagggttaccacgtcatctagactaggtcttcgtggctcctcttggaatgcacttctaaatgtatcccagatgctcatccaaagggtcttagttgctccttcttgtaagggcaggatgctcttacaaatccagagagatccagtctcagtagtatgtaatgggctaaggatgggtttgggtccatccttctgtacagactaggcctatcttcttggtagggcctttaactaggccttagatgattaaccttgaattgggaatgccatgtgtcccctttttgataacacgaataatatttaccccctaagcttcctctactgtaaagtcgaggagatgatgaaagcctcctccattgaaaagttgagggaatgatgaaggcctcctctattgaaaagttgaggagatgatgaaggcctctgatgctataaagctaacgagttgacaaagggctcctttgctatcaaaccgaggagatgaacaagaccacattcgctgaaatacatccaagggaatgctacaagacttcaagg

SEQ ID NO: 88656 - DNA, 724 bp, Cannabis sativa
  modified_base (455)..(457): a, c, t, g, unknown or other
atcagtacaaccagcgaaatctaaatctaagtagcaaactacttctagattgtcaatttgtttgaacattagtttgtaatccttagtaccctgaagatacctcattactttctttgcagctttccagtggtctatccctaggttactctgaaatcatcctaacactccgacaggatcaacaatgtcgggtcttgtgcacacctgagcatacattaggcttccgacagcagaagcataaggaatgttcttcatttcttctctttcaaaattactctttagacactggttcaaattcaatttatcaccctttacaattgaagcaacgctcggtgaacaatctttcattcaaaatatttctaaacctttgttgatgtaggcttcttgagataaacctaagatacctcagtatctatctctatgaatcttaatacctatgacataggatgcttcacccnnntcttttatctcaaagttctttgaaagaaattattttacttcacgtagcaaccctttatcattggatgcaagaagaatatcgtccacatataaacaagaaaaaaaaatcttactcccactttccttcaggtttatgcattgatccatgacattttctttaaatccaaaacaagagatgacatcatgaaattttaaataccattggcgggatgcttgttttaatccatagatggacttcttaagtttgcataccaaatccttaccttca

SEQ ID NO: 88657 - DNA, 834 bp, Cannabis sativa
catatcactaaaagtatatatgaaaaatatatagttaagaagtcttattattcttaatttttttattttttttttttaaaagagaagccttattgttctaataaaatataataagaaatttgaattggattttttttaaaaaaaattataactaattgagtaagactaagtttatcaatcacttatatagaaaataaattatactaactttataacgaaccaaaataaaagaatattgatatatttaatataaaagtatatcacccacaataatctctaaaccatgcgagacttttgtgaagtgactcacatattactaaaagcgtaaaaaatattgaaaaaaatgagaaaataaagatatattcaacaaaaattaataatgtaaaataaaaattttaaaaatatatattatttttatttgttaaaaaatttaagattttttttataaaaaatttaaacatgtgacaaagattaaatagtgcaaaaatatgtgaaaataaataatattaactttaaaacaaataaaatatatataacttataaattttaattttaattatttaaatattttaaaacaaagaattataagaaaatactttttataggaaaaattatttgaataattttcttataattattttaaacttgataaagattgaaaaatgtaataatataatttgcattcattgaaaaaaaaaatataactaattagataagaataagttcatcaagcacccacatagaaaataaattatgctaattttgtgacaaataaaaataaaagaatattgatctatttaatgtaaaattatatcacccataatagtttctaaa

SEQ ID NO: 88658 - DNA, 644 bp, Cannabis sativa
aagtattgtatacatcattagttcgatcctttgttttgtaggtttttttttttttttttgatggataaagaacttttattaaaagcaaaagacaactagtagccacaagagggggctacatcccttaagagacccgtggcctctgccttatgcactcttgcacaacgggcaagcgcatcagccattacattattctcacgcctcacatgacacacaacaaccttatcaaaggacttaaacatatttaaacactcacaaaacagaggataggtattccaaccaaatggtaaatgagcattctcaaaggctgcagcagcaaccaaggaatccgtctcaagttttacaaaagtagcttgtttgtcctttgccatccgaagggccaacgcaataccctgaagctcgccctccagcacaccagtcactttggtccaacccaagtaaacaagtgaattgcccaaatcttcttcatcaacatgaaccgctgcaaaaccagcctcctcctcaaacatggaggcatcaaccttacagcaccacgacccaaccaactcattcgaacaagacactagtttctgttgggttttatgccctaaataaaattccatttcaatgtaatctattttattcaacatcaataaagaaacaga

SEQ ID NO: 88659 - DNA, 1313 bp, Cannabis sativa
aactgaacattttgacttaatgttataataaacctggcatatccagtatccaccacaaggaggattctggagcaagtttctcattactaagaaatatcatagtagaggtatgaacatgttagattttgtttcaagttgtcatatttcttacttatatcaggattggattgattggcaagcgataaccaatatcattttttgtcaaatgaatgaaagtaaaagctggatttaggatgaaataggaggtctgattttggattgttaaaaatgaggacgaagtgctgtgtaaatcggccattgcattgaccaccagacaatgctcattgaagtgttacgatatgcattgatatacttgacgtcttaatgcttggtagtaagcagtgtcaaattcaaagacttctaatccaagaacgaaatgtacaatcttctaatgcctgtccattattctattagttagtaatgaaataatgaattaagaaaattttacctaatagacaaaaaaaatttaaaacattacaaaaatatgtcaataccaaaaaaaaattatttttactttttgaaattttttatttacaaaaatattttttcagtaaaataataaactattttttttttttggtttatagtttatttatagttgtgatgaggttacttttctagttgttttttgttactttatagttgatttagaccatctccaatgggaaatgcaaaattaatctatatttaatacaaataataggcttctgatatttttgtatcaacatttaatattatactctaatgcataaatgtaaatcttaatgcaaaatttaatatctcatttgatgctcatctaatagtttattaaaaatataaaataaaaataatcatataaaaataaatataaaatttaataataaaaattatgaaagtcatttaatgcaaataagcatgctatctaaactttaataataaaatattaaaaatgacatgatagaaaatataaaatcataacatttattgtgatgcaaattttacatcatgatatattgtgatctaaatttggatcactttttgttatgtgagatatttacatcataatttggcacactattggagtagacttttgacaaagtgagctatattttacatttgcatcacttatttgcatctccaatggagatgctcttatagttgttgtgagattaatttctagtttgaaaaatcgtatttttgcaaatgccaataatattactaagttacagtaaaaatacaattgtaacagtctacagcaacagattgcaattctgtcactgcataacacagatttg

SEQ ID NO: 88660 - DNA, 895 bp, Cannabis sativa
actccttggctagccatgatgaatggataatttatctcgagaaaacatctatcttgcgcatgagcacaaggttgcatttagtaaacctgagcccatgaggcacgcgaggcataaaagagatccaaccagatactgtaagtaccacaaagaaatcgggcacacaacaaacgagtgttgtcagttgaaggatgagatagagagttctcattgcatgaggccacttcaagcaatatgtgaaaagatagggcaatggacataaccagcccaatccgcccaacaacccaggcaaccaaggattacaacctcctcctattgaaggagaggatatcatggttatctcgggagggccacatattgcaggagagagaaataatgcccaaaagaggtacgtgaaggaagtgaagaatgagcaatctgcctttgccccaaaaccttccaagaaagtaaagactgaagatccgccgattatatttttagaggaagatgaaaagaacgtgaggtaccctcatgtcgacccattggtaatcaccatccagctcgctaacaagaggataaaaagggtgctggtggacaatggaaattcagtgaacatcctttacagggaaacactgaagaagatggggcttgaaaaagctaaattaagaccttgcatggtaaatctttgcggatttactggtgacaatgtcactagtcaaggaataattgagcttccattaactctgggcaaagcaccattatccaccacaataatgcaagattttttggttgtcggcctgccatcgacttacaatatactactgggtgggccagcattaatcggactaggggtagttagttcgattaagcacttatccctgaagtttcaaacaccagtgggtgtgggagtagtgcgagg

SEQ ID NO: 88661 - DNA, 591 bp, Cannabis sativa
tatgaactgtgtatataaagtatggaatgtactaaactcctcagatgaatgaattccaatttcatttctccgtttctggttctctgttcttcttttcttgttctctgttttcctcttatgaaaataaaatggtatcagagccaactatgtgttgagctcctttgcttctgcttctccaattccttctcttcctttcttcttgattgactggtcttccgatcttccatggcacggggagcaagaactcagactcgcaccagaaacaatgaggttcgtaaaaatttgaattgattcgatgttcttgatgaatacaacgaatttccttccaacgatccacggagtccgaatttcttatccaatgctgacaatgcatcttcatccttggttccgaaaattctcactggtgcaaataacttcagttcttggcgaaggtcaatgatggtggcattgttggcaagaaataaaatcaagtttgttgatgcaaggcttccagctcccgatgatgatgatgagaattacgactcatgggtacgatgcaacaatttgttaatttcatggatcctcaattttgtttctcctactatagctgat

SEQ ID NO: 88662 - DNA, 540 bp, Cannabis sativa
tttaggatgttaaacaacatacactggtaaaataattccaacacaactaaccttagaaattacaagtgttaatttttggggttaacactgatgctaaagccactatctttatatcatcattaacctttgtctttattgtcgtatccatcatgagttggatgtacttcttgaggctttctcatggttgttgtttaatgttcgtcaaagaactaacttccaggttaaattcctttgttgttatgatttgtttcttgaacattgtttgtaaatccttccagtgactaattgatttgggagataaccttttccaccagtctttcatagactttgatagagttagtgaaaaatagagacaatttgcatcatcactagctttttccacttgcatcagtcaactatacttggatagatggtctatggggtcccttcttccttcgtacgattccatctaaggcattatgaaatgcttcggcagctatgcgtctatgattccttttcacacacggtttcgtatcctcttcctgttggaatttattttac

SEQ ID NO: 88663 - DNA, 697 bp, Cannabis sativa
tctctcatttcgtttcaaaccacttgttcttcatgcaagaacatacttcatcgaattggatttatatttaaaaaaaataaaatgatgaacaaagagttattggttcaacatgtccctttgatcaaagtgaagagagttttgccaatgctactcattttattgtcaattagttttgagatagaactctatacacttcaaccacacactttctaaattctaacatagtatcagaagaattaaaagcttccgctgtctctacctttgacctccattcgggatctttcgaccaatgtgtgacagtttccagtattgtgatctttgacttgtttcaaaaaaattcacaaatttctcaacgtgtacatccacaaattttttaatttgatcttgttggattctctcaaatgtcacgttcgcacttgtagtctattaagttcgttcattatacccacacttttcagatccaaacgtgaggagggtgtattagagatagcctcgtattattaatgtgtgaaaaaatatataccatatataatggactattgatgaaacctcaagcaccttatcttaaattctaacaaaaggctatttctagttttaaattagagtaatttgcggcaaaaccccctcaactatcaatttacttacaaaaaaccatccaacctcatattttggtgggaaaaccctccaaagtactgtt

SEQ ID NO: 88664 - DNA, 990 bp, Cannabis sativa
tgtttccaacaaagcaccaacacccccacttatttttttagacaaaattcagcaacaacatcttgcttatctttattattgatacccctaacattaaaacatatgatattgtagctatccatgagacaaaggtaaagacaagttaccctcaatttcatgaacatgatccagaagcaaaacatcatcttgagccgtgccttccttcccctgcaatgcattaaatgagttaccacttgctttatgttccacattcttactgcgattttgaaccacctgactagttttcttaggaatttgccagcctttgtcactcttgttctcaagattattgacccactgttcatgcttctcctcatcagccttttttgcaacaaccgtagttggttgcactgagataacatgttgctgagtagttttttcttttgctgaaccagccttcttcttcattaattcttccgtacgacagtcagccaccatgtgaccgaatcctgagcatttggagcacttgacagggagccattcgtactcgattttttgttccattaattgaccaaactcattaagatattgcagcgttctcggggggtcctccgtgatatccatttcaaccaaaacacgagcaaattgaacccgagtcctatctttagtatgttggtccaccatcacaggtttcccaacagtactaacaatagcacttaggctcttattaccccaatgttgcgatcccaaatcaaagagacgaatccataggggtaccgaccaaacaagtttgatcgaattcaaatccgttgtccaagggcaaacaatgactagttttctatcaaattgaacgacccatgcctccaaaacttcattccttgtagcctcatcattgaatttaaccattaccaaaccccttgacaatcttactatctgaacaatacctagatgcccccattgtctcttgatgaatccttcaaaaacagccatgggagggttagctccaagtat

SEQ ID NO: 88665 - DNA, 663 bp, Cannabis sativa
aacagttcgctgttatttcattgagtatccaatgcactcaaaagacttcgcttttactatcctactcgtggtacgtgaattgttgaatctcagactgctaaatttctagaattttatgttgctgaaaatattccttcgacatatcttgaaacggggttcatctaagggaatttttattcctgactttcttataataacagtcttattcctattcctactccagttgatattgctcttgctctcattgttgatgaatatattgctcctggtatcaaagatgacgaggatcctattactaatgaacgaccttttattgatgaaagacctattattgaaaaggttttattgttgatgagggtcctattatcggtaaaattccagttgtggaagatgtcattcaaaataatgataaacaaatagaagttattctagaaacaactcctctaaaaatatcgcaaggataaaagaaatcaacaaggtgtgatgataattgtgtttaccttgtaaaagaagaatatgatattggtcattttgtggatcctctcacttataataaaacactcaatagtccacattcttcaaaatggagaaaagaaatggatgacgagattgagtttatagagaaaaatgatgtatgggagttagttctattacttgatggtt

SEQ ID NO: 88666 - DNA, 973 bp, Cannabis sativa
atagactaacaccttcataagtgggatgaacaatcaccacacacttgcatgccaagttagtctaaggggtagatgacactacccccaccatagacataaggacattctcaaaggtagatgaggacatcacaacactatgactacccacaacatataaggggtctccgggggtcaccccgagatgacaattgacgcccccctcaggttgggtctcgaatgtgtcacccccaagtgttagcttctatccccgaaggtggtcaatgatcgtgtcacacccttaggagatcctcatcgtcaatgactagttcaaatgttcaaatcctacaagaagctcaaagatagttataaacccacgaaaatagtgggatattatcataaaaatcagacttcaactacctccgaaaatcaaggagacagttgagagagctccgcgttggtcgcgtctcctgagcatgaaataccgaccttttcccctatataaggggttacccatagcctagaaaagggatccgcgattttgagcacttagagaaaaaacactctgttattctttgcattcaagagtctgttcttgacttttacaattctgatcaataaaacacaaggggagtaggctattaccgacatctgagccgaacctctttaaattttggtatctttctttatatttattgcatattctaatatcattaattacatttattgttacgattttggtttaaatctcatttattacgacgccgcgtcggtggagctctccttttatacggatgcaggtcctattataataataaaatattacaaaaaatataggaaaatatgtttgagttgatcttggctattgatgatgatctaatagtgaaaatgacttcagatgatgatcatcaatttttgaagctcaaatcttgttgagaggaaataaaatttaagtagaataaatgagaaacgtgagatttatagtagttcactcccc

SEQ ID NO: 88667 - DNA, 662 bp, Cannabis sativa
ctttaagagaaaaagagcgtcaaataataacattaatcataaaagtctatttacaaagcataggcaatacaattaggatagccaaaccaccaaacataatgatcagttagagacaaagctaactttgtcaaagtgtgagctacactattagcaatcctaagacagtacataaaagaaatatcactaaaatatttacaataagcaagaatagctctaataatacaacctaaataagactggtcaaccttactatgatgaatgatattaataaccgtaagacaattagactccaaaatcaccctttgatagccaagacaacaaactagtagaaccccagagtagatacccaacgcctcaacaacatcgtactttgcaaattatatcaaattaataccataagctcaaagatgccaaattactttttaataaattaatactcagaactcaatttggcaagaattactatgtaagtcaaatttaatattaagttatattaaaaaattatttgattaaaattaagtctaaaatattgattaaaattatttgcaaaatacaaagtctacattattatctaattcagagaataatagcatactaaccacaaaattagtattatatgtattattaataaaatttcctcaatgctagtaaacaatctaaat

SEQ ID NO: 88668 - DNA, 667 bp, Cannabis sativa
tacaagcaatcaaaaatgtacaaaagtgataaaatcattaaacgtatattcaagttttcttaagacagactataactgtcattacaagtcagagttgataactgctcgaaattcaaaagtctagtagattactacgtacttaaataggaaaagtacgagcaatggaaagacccaaaggtacttgcatttgatcaaaatatagttgttcacattgtgaataaaaatgcaagcaaacacaaatatattaagtttgaaggacaaagtacgaggcatttaagataagagaaaacttaagttggtttagaaacttgtctttacaaaaatgtcactaggggcaaaccactaaggcattttcctaaataagcaatacacatagcttgagaaagaccgtctacatgaataaggactagacctttgcatagacctcattctctgcatcaaaagatctcatttcttgcagcagagacctcattccctacggccgagacctcattcccagtctcgagagatttataaatgccagtgattatctagttcggagattttcttgtgcaagcttgggtatggagccatttaggttctttagtagaatccatgaccttgccaactgggattacttcaatctggattcattgtcagtttaagggggacctttgaactcgctctc

SEQ ID NO: 88669 - DNA, 537 bp, Cannabis sativa
atatatgttacttcataaagtaaccatctccattacatcacattatctaatcaggcaagtcgatgctttaatctgataattttgtattgcgttgtctaatcaagcaagcctgtgcaatagcccgacacctatatatcgcataactgcatcacctaatcaggtgagtccgtgccaaaaacctgcacccatatatatatatatatcatataattgcatcacctaatcaagtgagcctgtgccacaacctgacactaatatatcgcatcgtctatcagacgagcccgtacctacgcctggtaaatattgcatcacctaatcaggtgagctcgtgccacaacttggcacgaatatatcgcatcgtctaatcagacgagcccatacctacggccgatacttatcatatgtcactgatgccgtacctataccccatacgtcaccatgaagaaacccagcaatggtttgatctatgctataactaggcattttcatatcactgacccccatatcttgttggaaatattttaccagaatctagat

SEQ ID NO: 88670 - DNA, 1025 bp, Cannabis sativa
cactttctggttatggatagctttaaggtagattgaggcgattgacactcacagcggacctttccagtccttggccaccaaatctgtgtctatgatccacaattatagtagcgatctcgagaggagttcggatctgagttgaagaaggagacctctgtcttctgttaagtgatctcatgcgccggacctccctaattcgcttgaagtagacgcctttgtcgctttggagtcgctcaaatcggttgatcgtataatcaatgacaataagttttctatccttttaatctctctttgattttcaacttttatcccttcactagcaatgctatttttatttgcatggttttgttttcttattattaatcaagtttatatatgtatttacaatacttatgtgtgaaatctaaagaggttagtgattctcaattttatatttacttatgtcgaacacttttattcgtgactggaagcaattctaaatattttatctataaaacgaaagtggcagcaacacaaattggctattgttcttggtggctcactttaggcggaggcgtggagatgacattccattatgataataatcggaaaagtaattgtatatttgtttcatttttatatttgacttttttatataaatagaatttattgctttttatattaaatttcattgatattaattgtaacacgttttttcaactttttcaaaatgtaattggttaaatttcaaaatgcaattttattaaaattaaattaattactttttggttttttccttaaaaaaatttattctattagctcttacttttaattttaagctaatcttttggtctactaagatttattttattagctgtaactttttaattttaattttaagctaatcctttgattaatagaattaaatagtggagaaaattaagttaagtaattactttctatatttaatttattaaattttgtcttcattttaaattattttacattaaattatcctttttggttatcaattagattttttatat

SEQ ID NO: 88671 - DNA, 605 bp, Cannabis sativa
tcactttgatgtcatactacattcataatctgaatcgagattacttgcaccgaagaacgagcattagtgaaccatacgagcaaccattgattaaagattccattataactttaatatattagtgactgttttattcatagctaagtggtcttagtacactgtacagttacaagtcacgacctcatatatgaataaggaattttttgatatttaatataaattatttaataataatattaataatttaacattcaagcatatatcaaaatgtacaactatttatttaataataaaaaatatatttgtagtaaattgggcacctctcttagtctcatattagttatatgacctataaaagattttgttggtagcgtctttgtgaattgatctgtcaggttatgtttacaatcttcaagaccgtcacatcacctctgtctactatgtctcttagtagatggtactttctatcaatgtgtttgtctctctggtggctccttagttccttgaacttggtcactgtttcactgttgtcatagtagagcaccagtggtttttctacttctggaactacttctaaaatagtgtaaaatttcttcaaccaaacc

SEQ ID NO: 88672 - DNA, 4396 bp, Cannabis sativa
aagaaacaaattttctctactactgtggcaactttaatgtatcaaatttggtatgttcgaaatgacaaaatttggaatttaaatgatgttaacatgcaacaactactgcagtagacaaaatggttagttaagaaccgagttacttgtgcaatgttaaggaacattacaaggagggatcgagattggtttgatggtttataattgatgtaattgatttattatactactgtatagataactcacgccttcctatctgaaggtgcgcataagttgtattaaacatatttggtggtaatgaatttctcagttgattcatcaaaataaataaataaataaataaaagaaaggaaaaagattatgtaaatgggataaagaaaagatgcaggaaaaaaagctttctttttgtttttctcttttttgctaagaagaacaaaagaaaataaccccaaaaaatcaaaaggccgttcttcgatcaaagtaaacttatttttggtcaaaacagttattataggtttgattttttctttctttttttttaaaaaaaaagacttataataagaattcttgatcatcctactaaaataaaagtagaattattggtcatacacatattatattattattaaactggatgaaaataataaactaaatattttattccttcttttctccaaaccccttttttcctctcttcatttacatctccattttttttttccctttttcctttatgagtaaacaaagttaatatgccctaaaaagtttgaaaagactgttacatttaaaaccgagtagcaatggtttgctcgtctctacttctaccattggaagctcctcatttgatgatttttaatggcctcatcatggcattgtcttcatgatccaatatctgcaaatgtacacatcaaataaaataaaataaggtgtaccactttgtaattttgattacactaataaaagaatagttatataagctatcaaaaaaaaaaaaaagttatatatgcgcatatatatattttttttttttttttaaaaaaagaaaaattataggctattgctacttatatagtgtgtgtgatagtgactatttgatttattgcgtaataaaaatagtgacttcagcaaaccatttatttataattggccattaataatttgaactcaaccatatgattgagcttaaaagctatttacaatgcctggccatggatcaattataggttggagttgcccatgcacacatcattaaatctttacatattcaaatatggggagccttcaaatattaactataaacacttccccttaacattgacaataaaaaaaaagaaaaagaaaacaataattataaaattataaacactccatttgtacgttcccacccgtgacttcctaaacttattggaatgaacaatttgtatttttgctcttgattttatcatcataaatttgtcatttacctcttctgaatatcaatcactgaaaactagttcatctctctctcactttttcttgtttggattcccattcccctctacgtaatttccaacccgaattttctcaaagtgaactggcaaaagatttctttcttttttctttaaaaaaaaacaactggcagaaagaggacttctcttttacaaattttgacttgaccactaacaatcgaaaaggaaaatctcatattttctcgtaagcttaaacaaaagattaaataatgtacttacgtggcaatggtagacgtaaccaggttcctcagttgcatcaaaaggatacgatgcattggagtgtatgtaagaaaatctcaccaaaatcttagttacaacaccgggtttcatcttgtacacattcttccacccactctcgtgagcctgcacctgtgaaattttgccacgtgcatgtttgctgatctggcacttaacggcgtcattttgtttagtcatgcagctcttgaatttgtccaagtccactaactccctttcctccatcgcagcaaacaatcctaggtgaatgtgcagcgggtgattgtcctccgttagattgataacctcccaaatctcagccgtccctgccttgggcgtctccgtagcaggagcctcgtacggcttcccattcagataaagatgaaccggctcgtctgtttcgctagtgtactcgtacatagcaatgtaccgtgtgcgcgtagcactggataaatccggcttcggataatcaatcaactttttaggcactcgccacgtgtcaacatctcgatatcttttgataacaaacttcataaccttattgttggattcgttgaccgggtcgccagaagggtaaggatacggtgcgtcgttggttaaaataacactactactgttcgactttgaaaaatcaacaattacatcagtgatctcagatggccccagtaaaatgtcattggtgaataccggtctactgaggtaagccgaatcagatccgacgtggatgaactgaagaccgttagagaatttgaaccggaagaaccgagcattactcgtgttaataatccgaaaccggtacttacgacgtcgtacgatcaatctcggccaagcttttccattcactattatggcgtcgccgaaatactcgggttgccactgtggatggatcgacgggttattcccagtagagttcatgtaaatagaaccgtcggaacgaaagctacggtcaaaaaccatcaaagtccggtcaaactcagggcctgaaggaaggccgagtggggtttctatttcggggtggcgaacaatgtacgacccgattagaccggccagaaggttgacgcgtgtcaatcccatggcatggtcgtggtaccagagatttcccgggtgctgaaggtttcggtagcggtaggtccgttgggtccaggtgggacccacttccttgaatccgttggtgaaccaagcgttggagttgccgtcgctgcttggctcgtcgatggcgccatggaggtggaccacggtggggacgcccttcttgttgagtggcttggctgtcgggatagatgggtcccacgggagtatgtgctttgaagggagatgattttgccacgtcacatacgtgtctaccccttgtacggcctcgatcgtcggacctggaactgttgcctttgactttgactcaccgtaggcgaaaactggagtcggcgggaggtccctgtgaaatttctgcaaatgaaaatattatttataattattattttgcatgaaaaaaaaaaaaacttgtaacttattattttaaataaccttaaaaaaaatattattttaaataaattgtttgcctatttttgtgttttttttagctttaaaagtgtttgcctaattaatagtttaatgtcatctaacaaagttgtaagaatgtatgtgtatgccacagcaaaaagaatgtatgtgtatgaaatgaaaaagttaatgcactgtaaaaagtacgagcactgctatagctagaaccatttagaggcgaggtgatattttaggattagttagttgtgatattttataatatttattaaattaaattttatgagatactatatttagttttgtacgctttattattatttaaccgtataataatgtataatataatattgaattatattttatgatatatatttttttatttcaaattatatgaatactgatttttataaatataaaaatatataatattttagtataaattaaaatataacatcatattatataaaaatataacatatagttccctacgtacaatacaatatttacgatggatcaaataagttttaactgtctaatagagtgatgagtaacagaattaaaatttgtattctttttttgaattcactaaaatttgtcacttattaaataagaataattaatgaaaaagaaatacgagagataagtttattagtgctactgttaattttctataataattttttagtcgacttctgtgcttaaaaaataacttggaatatttttcttaattttttttttatggagtattcggtatactcacaacatcatctttgtaaattttaaaaaaatttcgaataatttatagtatcaaaataaatttgatatttatttacatacgtgtagtatactagagtataaggaactttatttttactagtataaattatattatttggaatttttttaaaatttataagaataattttgtaactataatgcatactactgtgaaaaaagttaaataaaaatattttaatatttgatttcaagaataaaaattgactaaaaatattataataagagaatataaaattaactaaaaaattgtaataagagattataattaatactatgttagtataataaagaaccatctctttggactctcataaaaactggagctaaaattaacttgaaat

SEQ ID NO: 88673 - DNA, 1109 bp, Cannabis sativa
tcttaacttattaattcttcctgattcaactatagattcagaactgcactcctaattacatagacgctctatataccaaatatagatacactaaaattatctattatttcaatcacaacaatcattgatcttctatagacggtttgcgttgagtagggacaaaattaccgttttatcttttaatgtattttatccttaaaacacttagatacttctaaatgatatttcaagaaactaatataattatcgaaatgagtgctttatcatttatcgctttaagtcaagctctaaggtactatcgtttcacttctaagtagttatagaagctatagatgtccatatctatgattaaaactctcacttaattgcactaatgagttttcaagatgtaagtattagcctacatgtaagctgtaacgaacaagttaaagaacttgcacaatacatttaagttagagcttaaccatttcaatattagatcaaatgatctatgatcaactaagtgatattaacttagaaaagatataatgataagttataatgtaatttctactgtcaatatctatccagtccactatataaccgatacatctgatgctagtttactttactaatgtcttcaaaaagacattctacttatctaagtgtaagtaaaccttatcgatgattatcacatcaatataaattcaatgcactaataaattgtcagagtttatattgaaacatataattacaattacttttcactgtgacaaaatcactataattgtgaataactctatgttcaagatgtgatagaacttatatattaagcatacaatcacgtataaaatatgtgaacaaagcatctaacaatatcaaaatatgatttttgatctttattaaaaataaataaaattataatgaaattgaattttatttagggcataaaattccaacagtaacaaccaaattaagaggaaatagaatattgttatgcactagtttatttcgcctgaatcgatgatcaattcaatttgatgcactgaaagcatattaatggactcaaagaaaacaacacatatcatcaaaggatgattacccaattgatcatcagttatcacatagct

SEQ ID NO: 88674 - DNA, 598 bp, Cannabis sativa
ctaaatacgcaaaacatcgccaaatattgctaatcatcgctaaactttattcataatctcagatttggtttatcattgtaaatacaacgctaaatatcaataaatattgcaaaaaaactagaaaatcagaagaaaaaaatgcaaaaaatgagagaagctgtgagagaaggcaacagtgggggcttacggttgggaatttgggtctgtgtgttcgacggcaggggttctgggtcggggtgatcaacggtatttttggaaggaaaggatatcaaaaatataaatatactattttcaattaggtagtatattgaaacactatattttatatttaagcatactaagttaaattctaattttttttaaaattaatatttaaaaaaaaaataaaagatagatagatactatcaaatgatagagcaaacgaactaataaattaaaaatgaatgaaccaaaacaaaaaaaagttgaattgagtagagcttttttaaaacttaaatttcaaatgtattaacaaattgtgactaattataaatcatttttcttatattgtgattaaaaggttcatgggtaaaagtattattagttacaaaaattacaa

SEQ ID NO: 88675 - DNA, 701 bp, Cannabis sativa
tacaagtatatataatgttatttaatttagagttaaaaagaagatcacaaataaataaacaagagatttttatgtaattgagacgttattgcgctttagtttataaattaatagtcttaacaataatgtttttgtacaataattgagctatatataagaaaataggctattcaagtcattgccaattaattttgagatagaatctcataatttttaacatggtatcagagccatattctttgcaggcaagtgatcctattccgtgatgcggtttaagattgatgagccaaaaatagccatctcaacgataggctgtcatgcaaagcgtgccgagttcatccggcctaagagatttatgtatactaaaagcccaattatgagaaatttacaagagatatattaaagagaaattatagtaaatgatcttaaattataggattacttatattggtagcacaacgaaatatgaacacctagtgaactcgaaaacctttgaactctgaatagttgattgaatctcctcaagtcttcctcagtgcgtgccctgagtatctcaccaaaaaagtgtgggcaatttgtcagtcactaaaaaatacgtgatagccaaaatcttagagagagaaggaggatttggcctatgtatagatgactagagtttcaatattttcttttctattagatgaaatactaatgagatgagt

SEQ ID NO: 88676 - DNA, 594 bp, Cannabis sativa
tgttgattgtcctgcataagactatcagtactgatattgtgatgaataaaggagtcaaaatcaatgatgtgcgtctgagatatatgaggagatggtaggaccatgttagcaaaaggatctataccaatgttcttgttgttattcaatttctgaaaaggaaaaatattttcatggaaaacaacatttctagaaataagaaattgttttgtgtttagatcatatagtttatatccttttatgccttgaggataaccaatgaaaacacatgtgtgtgcacgtggagcaaacttagtcctatgtgccgtgagagtagaagcgaaagcaagacagccaaaattccttaattgcacatagtcaggtgttttcccaaacaaaatttcataaggagttttgttagctaagttgggagtgggagtgcgattaatgagaaatgcagcagttagtacgcaatcggtccagaaagtaatgggcatatttgcttgaaaataaatggctctagcaacatttagaagatgctgatgttttctttcagcgatggcgttttgttcgggagtctcaacacaactaaattcatgcaatataccatgtttagca

SEQ ID NO: 88677 - DNA, 1147 bp, Cannabis sativa
  modified_base (29)..(29): a, c, t, g, unknown or other
  modified_base (796)..(796): a, c, t, g, unknown or other
gtttattttatcgttttagaaattcatanttaggatgttaaaaacatacttgtaaataaatctaggatttggtaaaatgtattccgacaactggcctcaaagtcatggtaattaatttactatcatgaaatatgaatttaaaacgatatatgtgtaagctggatgtgattcatgtcgatctatgtgtttattgatgatttttcgatgtttacaaaatttttatgtaaaataattagaatttcatctgaaattatttttcttaaatagtatggagaaaattaagcaattcacatttgtacagaacttaattttgagtcaatttgaattagaaaaaaatcagggtgggagtcacccacgtacgcacgcagatgcccttgtttctcgggttcacgcggcttcggacaagccttatgtctgagttttctcggtcaggtgtgtaagttttgtgtaaagactccccatccacgtgcgggaatgctacttgcagtctcccctgtgcggcagacttcggtcagccactatggatgcgcgtgcggattgtatgcaatcgcaccaaatgcaattttttctttttttttttcattttttcatggaatcaatttcaagttttttgtgtaattttgtttttagatttttattttttaaatctcaaatctaattatcggaataaaattaattaattttattttaattaattttagttaattttagatattagtagattttgaacctcaaaatgaataaaatctaatttttggcttaatttgttaccttatttttaaaatttgattatttnatcttatttttaaatttaagatcagatattttatcttttatattatttaattaattttataaaatgaccttatttgaaatttaaaataagacataatttgatatagaaaattttaaaaatctaaccatatattttgtcaactttcaaattattgttgtgttatttaaattaaattataaaatcagataaatgatattaatttatcattttattttattagatatttaattttattttcttttaaagataacataaagtttgaaaaattagttggcattttttgaatagatatttaagtttgttaaaaacctaattttttaaatttacaggtttaattttaaaattaattat

SEQ ID NO: 88678 - DNA, 824 bp, Cannabis sativa
  modified_base (544)..(548): a, c, t, g, unknown or other
caatttggcttgaaatttctctcctaagcacacaaagcttgggttgtcgggccctagctagaccccagcaattccttcataggattctcattgggaaggagggggcttgataagggccgcctcctcactcgatggaaaattttaaatactttcaacccttacctcaaccaaattcatagtctcctctaagtttttaaacacctcctctcccattgaacttcccttcttgagaaaagatttctaattcaaagaacccctaaattgcaatccttttctctattggaacttatgttaccaagatctagatttactaacacgtatgttattaacaccctaaatataaattctttaatacgatgaaataaacacatataaaattagaaaattttacactgatggaagcggaataatatgtctcctttcgcttaaatctataacccttgttccattctatcgcagagtaataacaagatctaagcctggatctccttctccttcagtttggttaaccaccatcttctgcactatgattgagtacttgacnnnnnatgtgtgggcatggtactctatcattaaaggcttgagttgatagaagaacaacaagaggagttcgaaatcactatgaaggagtctctcatctactagttgtctgacatagttagaaaacaaggtttagataggttggacgagaatgagaacatcatgtttcatttatagtatctcaactagggtttaggatttaattatatggattaaaaaagataaaataataggcaaaataatactaagtggccgaccacacatgtgggcctcactagttataa

SEQ ID NO: 88679 - DNA, 712 bp, Cannabis sativa
ataagtgtgtgtcgttcttcaatatattgcgaggcaacaaaaagtttaagtggacaaaagagtgtgaagaggcctttcagaacatgaaaaggcatcaagcgatgcctttagttttggcaaaaccaataactggagagacgctgtttctctattttgccatcttagaagaagcaattagtgcagccatagtgcgagaagagggtaagcaccagcaacctattaactatgtaggtaaaagttactaggggcagaatctagatatccccctctagaaaaactcgctttgtgcctagtccacgcgtctcgtaagctatgaccatacttccaggctacggaacatctcgaaataatacctggagcgggagattcaattaaacgagattttactatccctactttcagattccctgaattccactcaaggacaactgtaacaaacaacaatagggtataggtttaaaccaaaaaagaatgggatgactagtgctggtcgttcatcagaaaatatttctagatcccaatacacccaatgccagatagctgctaaaaagcacaagccagaaaacacaatatgtgcaccagctacaccttcataactccaaataccctggttcgttattgttccccctgtgatactccaaccaccccacgaattggttattcctcccactggatcatcaagtgttaaccgatcagcccttgagacaagttt

SEQ ID NO: 88680 - DNA, 857 bp, Cannabis sativa
attatttatataatttgtacataacttttatattggcttatataaataaaagaaaaaaaaaaaagcaaaaaaatcataaaattgttacataagaagtattagatttatttatttttatatagtaagcatccttattagagaaaataagaaagttaaattaatataattttccattaaaagggatttaattaaatttattgaggtgagtagtaataataataaaacaaaataagagagaaagttttttttattattattgttatgattaagtgctctaaaaggtaaatgagatagtaaaagacaaaatattaaactttgcttctctactattatattcatattaccaatatcaattatgtacaatgtaagggttagaattatctattatctagtttgtacgatctcttttggtggatgtctcaaatcaattgagatatttacttaatgtttatgtatttgatcaatcgtagtatgcatgatagcgatttctagaactcttaagaggtatgtttctcttcctccgtctggtacccacgttgggtttctggtctaccctccactgtggtgtggtggcaatcgggtttggattcctctttccctttttcatcattcctttgttcagagcattaattgtgaaattaatgtctctgatgtttattatctctcaaagatcccttttgctgaaacctttcaacgcattaaatgtaaatttcctttcccacaagacttaaagcctcttttgtcaaacccttatttatcactaatcctcatttatttacaccatcaaatcaattatctccctgaagatacgtttcttctaatagaagaggcgacgaggaggagaaatggtgatgatg

SEQ ID NO: 88681 - DNA, 1124 bp, Cannabis sativa
  modified_base (1065)..(1098): a, c, t, g, unknown or other
ttttaggctcgctagagtgagccctgagataataaaagtcccctgcggcatttttccttgctggaacagccttaacagagtagagatactcaaattctactggtgtatgacacgcccacttcagacttttatataagaccttcaaactagcaagaattttgtaggagataggattcagctagaatggggcaaccccaaggtggttccttttacttactttatactcttgagattagtttcgttgggatcagagagatgtttgatcctacttatagaattcaaaatagaattggaaaagatggtcatttaatgctgatgtacctcgaaactgcaaaactgccaaaatcagaggacatgcgttttttaaaaagggattatgacaaaaatacattttgtaatcattaaaaagtactcttttatcaaaaataactttttaagggacaattattatacccaaaatttggttaacgcatcagagaaaaatacgtgtcaagctaggaagagtgcaaaccaagtcatgtaattataattacacgtgagtggaaaaactcaataaaagcataattaacagagtatatttacaactcagctgactgaatagtcttatgcgagattaaaaatatacaaactgttgccttacgcaccaacgagaaaccatgtaactcaaggtgtattagacgagcctaatagtgaaaatctcatcgcttttactctaaaaacttaacaccctatccgacaatcgtagctttggtgacgaggtgatctttctcgtatgcatgttttcttatggagagttggatgcatcgctattgcttgctttggttcacccgtctattacactcaatttgcatattatacgctaagtgtgttcacagttagtatatctcctccacgtaatcgaggttagtgcctcgtctattacacgttgagttacatggttcctcgttgatgcgtaaggcaacagtttgcatatttttatctcgcataagactattcagtcagctgagttgtaaatatactttgttaattatgcatttaacgagttatttgttggaaattattttnnnnnnnnnnnnnnnnnnnnnnnnnnnnnnnnnnttaacaccctaaatatgaactgtcta

SEQ ID NO: 88682 - DNA, 544 bp, Cannabis sativa
cctttttactaccgttataatgtctgtttttagtgttttattttagtcaagtttttattatcctcactgtttttaataattaattaatatattagttttaaactagttttataaaatgacacacgtgacattcctatagattagggcgctacatacatgttagtaaatctagatcttggtaaaacaacttccaacagttcggtcccgtgatggtaatagcctactccccttttacttgtattacttgtgagaagagaagcaagaagttcttgatctctgtcgatagcttatagagattttagcagcgtaagtgctctttagaaaataagattttggatccctaaatagagaaatggctccactatttatagggaagaattacatgttgtgattattttaccaggatctagatttactactatgtatgttgtttaacatcctaatatgggtttctaaagcaatgaaataaacacatataaagtttaagaaaccttacattgattgcagcggaatataatgactctttctgttcagatctctagcc

SEQ ID NO: 88683 - DNA, 608 bp, Cannabis sativa
attattttcccatttttctatgttgtcaaacacatgacagccttttttttttttgaaatgaacacacggtagccttttatcaaattgatttattaaataataactcttgttatttatgggtgtgggtgagtttcaagaccaaggtgacgattggagtgggcatagtcaaacacacggcagccttgagtttatgggtgtgggtgagtttcaaataatagcttttatcaaattggtttatcaaataataactcttgttatttatgggtgtgggtgagtttcaagacctagggtgaccactggagtggagtcgattcgtgaatactaataggcaggctgagagttttgtttgaaattgaatatatatgattaaaaaatttcagtttcactaataatatttactacagaagaatacgaataggcacgtagagaccactacagaatacgaataggcatgatattaaattagtaattaattatttatagtataaagtttttaataaaaaaaatatcattttaatatttcgggttacgggttataacctgataaaaaaaaccaattaagcttacccaaacccgaaacccgtttagagtctttttcgggttgaacc

SEQ ID NO: 88684 - DNA, 780 bp, Cannabis sativa
catcataaactttgtaaaatgatgtttttttttaataaattacaggtatttttgtaagtggagatactcgaaggacagagagtacaacatcgactgagaatactggaggagaattaacatctagttcttcttccgtttgtttagttgatttgtgaaagttattttttttatttctttatttcttatttagcaatagttttcatttttttttctaaatacatatacttaaatagttcttgaagaatacataaaatttgtttatacactatgtggtatcattttatacttagaatttttttcagaaaaaataagaatgagaattttagaaatatatttattttattttattttattaaataattgtcacattttttttttgaactaataattgtcacattttagttaagcaaaacaagttttttagaacacttaagtaaaagtaagtttaatatttgtaacacttgattaaaaaataaagtagcacataggttggcaattggacttaattgaaaacacgttagaaatttcgatttcttttttccttaaagggggatttaaatcctagactaaattataactttatcaatcttataccgaaattacaaaattcagaggcagtggagcaatttcgacctctaagagtaaagaatcttctggagtgtttggctacctacgagaagtggtcaagtcaaacttgtagtaagacaaaatctagtattctcttctccaaaaatatgtgtaacactaaaaaaaattctattttgaaaaagcttgtaattt

SEQ ID NO: 88685 - DNA, 703 bp, Cannabis sativa
tgttaagtttctgtttgctagagtgatagacaacagagtttgtaaattgaatacttcatactgaggaatggaaatgaaagtaaaaattacccttttttctgttacttttgaagagcctaagcctaacaacttttatattagtaactttgtcaaacaatacactcatgtgactacgcatttctcaaaactttggaattgggcattattaaagagaaatttacatctcaactggtttctttccttttatttacaaaattacagtacctttctaaaattagagttatttgagggatgttagcatattttggtagaaaatagtggaagtcaacaagctcagttttacaaggcagagcttaatattaaatttgacgaccttagaagcaaaattgaacttggagctcaacataaaagttttagatctcgttcttagcattccaaaacatcttaaatcatccaattctgagttgtattaaaaaaattatagccaaaatactaatcagtagcgtcgtactaatctttttttttaaaaaaaaaaaatctaattttaaagggattcatctatcttttcaagcactatcaatgaaatgagatagaaacttagggcccgtttggttggaggtaatgaaaacaatggaataggaatggtaatggaatggaataagaataggaataggattaggttgtttggttagatttatggaat

SEQ ID NO: 88686 - DNA, 544 bp, Cannabis sativa
gtgcgtctgttcgtgattcgatgtatgtctgaccaggcattccttcaattttcagctaattaataccctttcttaattaattcctcaagatatgtttccctttgcgcgcctttgacggttattctcttaaggcacttgattgcttttaatttcccaatatttactttttgggggaaatcgaagcgtctggggattttgaattgattactttttttcacaaataagcttataactagagttgaaaactttcagaaattactttcaccattttctccacgaaacaaactcagagcaaaaaaggaatttccttcaagtctgtcgtgggatttctagcagaggtatccgagcagcttcatctggactacatttaggcttcaaacagtgagaaaagttttcaatctttttctcttttaactttgtatctttaatttctgggtttccactgtaggaaatacaagtgttcttgacttgttgtggaagatacatagaaaatctaggcttcaaaccttgtaatttcctatgtaatggttcatatggcttcatt

SEQ ID NO: 88687 - DNA, 545 bp, Cannabis sativa
ttatatagagttaaaatgtgtccaacccataattatatggcctatcatttttaaacccaatgagccattacatactcttaacataaccatttactacaaaaaatgagttgggttggccgagttgaatggtatggcctatattttgtacacccctatacatgacaatttacttaacacttaacaacatgtacctataaaagttccaaaattataatttactgataaaaattaaacttatatatttatttacaattaaaaattaaatataaatatttataccgcaaattactcaaaatattattactatcatttttttttccttctctcatttttttttgaaaacccttctctcaaaattttaattaaaacgaatttgaaaataattatcataaagcatcttttattttccccattcagaattagattccttttcaatctaaccaactgttctagtaataaatgcagcactggtccaagcctaggcccaagaccaagcccagcccatcaaaatctaagcccaagatcatcaggattaaatctgaacc

SEQ ID NO: 88688 - DNA, 904 bp, Cannabis sativa
aagccacctgggaattggagtcagatatgaggactcagcatccagagctattcaggttagatatgaggagtcagatatgaggactcaacatccagagctattcgattgggtcatctttacgaatggattaagaaccggttgcctcatctcaacccggttcaggcagcaggacctttgcctcaaggagcaccagggggtgcaactggagcattggcaccactcgctcccccaggcgaaacccaacaaattcctggcctgccaccaagacctaacggaagagtagccatgatcttcggaggaccccacatcggaggaactacctgaaaaagaactgaaacgttacgcaggggccgtaaaacacagtgaggtttgggaggttactcaactcccggctcaaaggccctcgctaatggatcaacccattacattcatagaagaggacgctaagacagtgcgtttccctcatcatgaccccctggtcatagagactcccatcgccaacaagattgtggccagaatcctaattgacaacgggagttctgtgaatttattatttaaagaagccttcatggcaataggccttatggatcgggatctctcaccaagcggttcccagctaacagggttcaatggaacaacacttatcccaatgggaaaagtgaggctcccagtcaccttgtgcccaaacacacccaaagcacctttaagtactgcacatttgtggtggtggactgcccaacggcttaaaacacaatcctcggccgatcggccctggcggatttcggtgcagtcatgtcgattaggcacttgtgtctaaaattgcctactcaggaggctgcgataggaaccgtgacaggaaaccagggggaggcaaggcagtgttacaacgttgctgcccacctac

SEQ ID NO: 88689 - DNA, 539 bp, Cannabis sativa
catagcaaaataaaaaataaatattatctaagaataataatataccataacaaaatagaaatacactgtacaataaaatttataaaccaaaaacccacaacaacccatacaaaattaaaaaaaattgacataactttaaaaataaaaaagattctaataaaactaatatagatacaccataatctttaagtaatttacttttaattctaaaaaaaaaatatgaaaaaaaattattgattttttttataacaaaagataatataaataataaataatgtaaaaggattatttttgtactagttttaaaataaatacattttatattatgactggagttaagttttaataaaatattataaaaaatgacaataaatcatatcgtcatatttataactctccattgataccacttaatgttagtttaagtagccataaaaaagtacatgtgtgttggagatcctaaattcaagtcattgtgcaatatacataaacacttaagaaaaaaaaaaaaactccattgatagtcttagttggttgtt

SEQ ID NO: 88690 - DNA, 1150 bp, Cannabis sativa
taaatttaaagaaaatttaaaagaacaaacgtgtcatcaattcaatgaacaagataaacaaaaaatgagaacaataaaacacattcagttgtcgaaactcatatacccgattacaataatatatccaacaatatatatcgtacgttcttttcaaataaaaacaaaacacaataatcacagtaatgatgaaccctaataattacctaacatagtgagactcatgatatcatttattagaaaatttattagaaattagatctagaaatacaaatgaattttaaatttatgttagattatcaagattattctataagatagaatacttgattccaaatcttaattaatgttctacaaattaagagtgtgagtatatgatcttctacaaattaactttttctctatgagttctcactcaaaaaaaaagagtagttgagattagcttggggaacaaatcttaatgttcttcatatagaaaactaattagagttctataaaccctaattagggatctcatttaattagattactcactataaaaaattttacttttagtcacaataaaatttgtgactaattataaattatcattattatggtttgactaaaatgttcgttgcctaaaagtattagtcataaaaattacaatttgttgtgactaaatgtattttttagtcacaatatttattgtgactaaaaataaattagagacaacttgtaactaaatattatgttttagtcacaagtaataactttttgttgggactaaaagtcacatttagtcacaaaaaatttatgttgtgacaaaaaagttatcacttaacgtaacaattttctgtagtgactcacacaaatttaaaatattagctaaaataaattttcttaatttataagcccacatattggattattaaaaataaaaaaataactcaatatatcattaataggtgtaatttatcacatgttaaatcattcgggatatatattctacacattattttgatgcttagcatatgggtcatataattcctgttaaacaaatagtttggttaatttatttttgctgattcacttatatgtgtaataactattcacggaaatttcatttttcttaaaaaaaaaaaaaaccttctctatttttaattattaattt

SEQ ID NO: 88691 - DNA, 645 bp, Cannabis sativa
tattcttactattcaataacgactttattttctctctaaacctccattgcactattcacgaacggttatttttctccaacctctattttactattcatcaacggctatattttttttttctataaatactcactcaaaattttataaaattaactctttattcttcttcttagtgtacaaaaaaaaaattctcatctaaaaaatgattaatcttgatctaattgttctattttatatctttattttagttcattttatgatatactgtgtagaagatgaagtttgttggtttttcatttttttttccttatatttggtttttatcctctcttacttcttgcataccatgtatccactttgtaattttttttctcaaatattatgttgtgaacgtttgataattaaatctaagttggttttttttttttgtattctgttatagttgctaccatgtcaaatcttgtgaagaatgaatttgctgcacttgatatcatgggaaaaaattatgtcttggattgttgatgttgaaatgcatctagaatcaatggaccaactgatactattaaggagataaataatgcaacatcccaaggaaaggcaaatacaatgatttttctccgccgacatcttgatgaaagtttaaaa

SEQ ID NO: 88692 - DNA, 547 bp, Cannabis sativa
gaattcctctttagtttgttatgttctaggagctaatccacctctgagaacaaactgtggaaggagaaggtggataaaataggactaataaactcggacgtattcattgtaaggtccactataatggagtatagagatgaagtgttgcacgggggatatgaaaccttggaatgcaaccaccaattttagaaaggaggatgtgcgcactgcccctatttgggttcaattatatagattggactttaaatactggggtaagcgttcactattcaaaattactaggcagcttggagagccactaaaaatagatcgtattacagagaggaaagaaagacttagaatcatggtggagcttaaaatttcacaagagtttctaaataaactacaatttactaatgaaatagatcaagaaatgaaagtagatgttgtatatgaatggacccctactctttgcactcactgtcaagaaataagtcatgtggcattagaatgtaaggaaaagtcaattcaaaaataagaatgggtagttaagaagaccttcttggag

SEQ ID NO: 88693 - DNA, 879 bp, Cannabis sativa
aaaacaaaaattaagtggaaatacactttatttgactcatccttagtgtgttgtctggttttgccactgtctctgtccatacccaaacccaaataatatcagtattgctatggtatctaccactacgataaagtgtcgctttataagtgatcaataattttttataatatttattaaagtaaaacaagccgtacttgatattgagttgcaccaataacaatattacacttacaaggatgctgaacactataggtgtcctttaacagttctccaaatacgtatctataaatattattattgacataattacttatcgagtttcacattaataattataatagaaaatcactaactattttatcttgtggtgatgttcgataattgtgtgtaaaagcaagtactctaaataatactataaattatggtgcttttataatgcatccctcaaaaaatagtgtatcgatgcatcttctacagttgtggtatacacgactatataaaaaaaaaattggactaaaattttttaataaatggcaagatagttagagtggcatcaatacacttttgatgaggttcaaagcattttaaataattataacatacacgactataaaaaaattaaactaattttttttcgtacagtgtatatctttttaggggacattatagaatcaccaaataataataatctacctaaaaaaaattatattttaaaaataaataaataaaatgaaatcacacgtttcttaattgtggttcccccattcaaacaaataacacttttccttctcctcctccattcaaacacttctcaaacaaactcacacacacttctctcataaccaattctcacaccataaatatacatatacatacata

SEQ ID NO: 88694 - DNA, 790 bp, Cannabis sativa
  modified_base (180)..(181): a, c, t, g, unknown or other
  modified_base (607)..(615): a, c, t, g, unknown or other
tttatttttaccctctttttaaagtctatcatttttacctctttctttaagtattgtactaattttgcccctgtcactttaagatcctctccatgtgactccttatgttagggtattttggatacagtacatataaagaaaatgtatgtttcaattaaataaaaattagaggtaaatttnnttaattgattaataaaagaggtatttttcaacttcaaacaaaatatcacctatgatagtttcatttaggcccaattagtattggatttattcaatcaataacaattatttaatgaaaggttaaattcctctctttcgggccttgtatgagagttagggggccaatagtagtggtattacatactgaactcagccctccctcacatgaaccaccccaactgtgaaggtccatctgctttatttaaataattatattagtttaacctaattaaaattaaattagcaacataattaattttgaaataaattgaattaatttttcattagattattttaaaattaatttaaaaaaacacatttagtttaaagaaaagatctagataaaaatttctagtgaccaattcatattttctaatatttaattaannnnnnnnntatatttaagttgaaaattaataataattaattttagactaacttaaattatattaaaattcttagaacttaaaatagaattaataattaagttaattttattcaagatacttaattatttatttctatttcaagaaatttaattaaatactaaaatatatttaagttaaaaatt

SEQ ID NO: 88695 - DNA, 820 bp, Cannabis sativa
tttcttcttgattataaaactctcttctatgagtcgatatgttcacttcaacaggcagcattgcttttgagccaaatgctagcgacaacggagtgtgtcccgtggttgtcttctcggtagttctgtgggcgcagagtacctgaggtaactcgtcaacccatcttcctttggcagtgtctagcttctttttgatggtatcctttagggcccgtttggtacgcaggattggactaaaaaagaattggactgaactggacaagattggattatgctaaaagtaatcttgtgtttggtttaagaatacactggactattttatttatttccttttcgaaaaaaacaacttaaattaaaataaaaaaatataatactaaattaaaattaaaatatataataataaataaataataatgaatgagcaacagtaaaaaaaagtaaaaataaataataattaaattataaaataaaataaaataatatatccttgataatcaagtatatatcataaatatataataaaataatttatcctattttttatttaataaataattaaaatagtaaaataaaaatacttgaataatataaaattttttatgttaaacactaatttaatataaatattaattttttaagaaaatttatataaattttctagtaatttaaaaataatatataattttattgtcatattgtttctcctagaatcaattcaaataactattatttagttaataatattttaaattttgaaagtttatgtataataatttaaaattatacattttcactaattttaatgaataagtttttgataaaa

SEQ ID NO: 88696 - DNA, 896 bp, Cannabis sativa
tatgaaggaagcatcagcagctccctgagagactctttttacgagtgaaagagcaatgcagccctacctaccaaatccatcgaagttgccatgcattgctatgcatcgttgggaaggagaagaacgaagtgagcgaagttgttcagcatcctccgagcaatcaaacaatcagttcaatcctgccttcgcccttttgttagcagctaggtgtcaaaggctaaaccaaaaggtcactttcatggggtcaaagggatcgttttttgagcttgattttgaagcgtagttttccactctattttcaactatatataattgagctggaataaaatcttggttaggcttattaatatgcccttgctgtgctttagcataataagataaatattattattttacgtgatccacataaaccatgacatttctcttaaatgggatgacgtttgtggtggctttttcaatccaaaatcaattttattaacttcagcccaaatttactatatttcatatattactagtgaggtagcacgtgcttcacacgagagtgcctcctaaaaatatttaggtatagttatattaagaaataattaatattttgtcgcttaagcttaggacattataaaattgtatcatttaaaacgtacaccagattaaaaaaaaattcataaaatcttatgtttagagagatagataataatatttttgttagctttcacatttttatcatctaaaattaatgtcattattaattagtattttttttttctcaccaaccttatctacttctaaagctttccttttcttaataaggaaaataaaaattaaataatttttcattttttttgaaaactcttacctaaagtgtatttttgatgaataaatatattattgttgattta

SEQ ID NO: 88697 - DNA, 771 bp, Cannabis sativa
  modified_base (27)..(31): a, c, t, g, unknown or other
aattagtttcaacacataaacacgatnnnnncataaaaattaattaaggaatgtactccttataattctatccccataaaaacactaattggaattaaccaaataatagtaaattaataaaatagtttttcatattaattattaggaatattagctgaactttacattttttaacacttaatcacaaaaattaaaattttaaacctactgaacctagattctattttcctcattacacttccctccaaaattttcggttaagtactacagtggactgctcatatatacataaatgtacacgtgtcacgcttttagtggtccacgtaattttaattattaaaatactacaaaaaataatttaaaaaatgaaaaataaataaattataaacaatatatttttatttttttatttttttctctttcttttcttcatcttctgaactaaacaagactccaacacccacccacttcttcctcatcctttttttattttattattattattttttttttttatatatttcgttaaatttcataatttaatgttgttagtttatgaattcaccttaatatggaaatgaaattgaattaatagattactatttattgtgaattattatatctttcaatcattttataagaaaatgtattcctaattaaaaacaaaggagtgtagagtttgaatccaatcatgaactaatggcacgtttactatacagtaatcagaatcggaataaattaatggagaaatgtaacggaataaatgaaaaa

SEQ ID NO: 88698 - DNA, 592 bp, Cannabis sativa
tttattttattaattttggataatatgtgaaaagtattcttgtggctgttttgaagaggcttctggaggaagcattggaatgtcttagtgtccaagtttatatatttttttctctctatatatatatatataatgtattgtgtatgagagaagaagtgtggtgtgtgtagagagaaattgtgagtgtgagtttgttgtatggtgagactgaaaaagaagcaaagagtatattggatttaagagtttaagagtaaatagtaaatagtagaaaatacataaaaaaaaaattatgatctaatggtaaattttaaaaatatattttttgattggatatgatatttgtgtatatttagagctagcaaatttgatttcaataacttcaacaattattgatgtttacatataaattacacacaaacataatatattcttatgtggtaggtcacttttaataagtgagactcatcctaaataagaataattaattgaaattacttgtcacataagtgtttgtcaagtttaggtgtaaattatgtgtgcacatatcattactcattaattaaatacgactgtatgcatatgtgcccatgag

SEQ ID NO: 88699 - DNA, 1051 bp, Cannabis sativa
cagaatcaaacaacaattccaaggacttaaggcttaaactttgtaatcgaacccgattatcaacagctaagaactcataaccatataacctcaaatcctcaagagaaggacaacccaacaaaagcttaagtaccaaatcctcctttgcagcatgagattggcgaacatatcccaatgacaaaattttcaaaaatggaaaactaaaggaattagtactagtacaatcccactctaacatgtccaacttcaaaatagtcaagtatgttgcattgtcaaatacattaggaggtaaacaatacttagtattaggagtgcaaagagttatttccttaaccttattctcaactacaaaagctaaccatttatctataagccttgccttagtattttgaaaaaacgatccaaagtatcgaaacttaaaactagttatgcccgaatcgttcataaaattctggcagtacttttccaaacaattgtcaacataattgtagaatatttcgccaccattatcatcatcatcatcatcatcattaacattaacatcagtgaaaaagagtgtaggaactgaataccaaatgggtttccaacgctttgaaagaatgcatgtacgaaccacatatttagttgggagaaaagacagaatgtgatggatcaatgcatcaggaagtttggaaattctgtcatcatcatcaccacacatcaccattgatgatgttgatgtcttcatggtcttagattgaggactgtaacaacaataaaagtagtaaattaactttcctccataacaattaacaatgataataataagaagaagaaaagagtaaaatggtagattggttaagtaatattccttacgtgaatatgcaacatactcccaatctattttaaaatagttttttaaaaaaattcgaataatttacaatgatgaaaataagatttatatattttattgaatgcgtgactatttttcttacacacgtagtaagtaattgtttaaatgttattttcggtactgtaaatatttgaaattttttaaaaatttacaagtagt

SEQ ID NO: 88700 - DNA, 1901 bp, Cannabis sativa
agtgcccaggttgacattttgtcgacctgaggtatttccaatcagcttttagagaagtctttcgggcatattctctgttttgacaaataattaagatatgagtatttttcgagaatcaagcagaatcaactagtggcaaaaagctagaaccaacgcccagattgacgctggtgcttgctacagcgcctaggttgacattttgtcaaccttgctatttttagtcattttcttgaaatgggtttcgggcaccttttttgtcttcagatgaggacacaagtgagctcgaggagcaaatgagatcttctgggggtcaaaacagggacccagcgcccaggttgactggccttacgcccaggttgacatcaacctagttcgcatgaatctactcctcaaatgaaaattctactttgggcattcttcttattttggtaaaaaaaattggataggatagctcattcacaatcttgaatgccttagaagtaccaaaaccagctccaggaatacacccaggaagtacccaacgcccaggttgacatgtagcatggtgcgttgggtttttcttatcagaatctaattccatctcgagcatttgactattttttagtattaaacaagagctacgacttgtgaaaggttaaattcacaatttgatattttaaccttccaacaaggtggaacattggcaaaatcaagaagtttcgagtctacctgattcaccaaaaagcgacatctctaagaactggtgaataacttcaccagaacaaagaatttgactaggtgatgtcaacatatcacttaggcatcaaaaaaatacaagtttgagacatttttccacttacccagtgtctaggttgatgtcaggatgtcaacctaggcgttggatgtcaactgggcactgggttgtcaaccggggtgttaggtgctgaacaaccttcagtaaaatggccataactccctcaatattgattttattgacatgattcaacttacgtttcgaagttatttcaaagatttatctagtcatgtgtcatacccatatcgcaattctaaatatttaaactccaaaattcatgcccaatatagttgcaattttctccacacatcattcagaaagcgatccgacagacaagattcaaactccaaaaattgacaattttcatcaagaatcaattttaaccgttagatcatcatcagcggtcaagatcttctcaaagtaattttttcatattttttgtattattttattaatattttaatagggcatcctttcttataaaaggagagctcacctagtttatttttcacagtactctaagtccccataaggtcagagtatatctctgtactttctctctctatgaatgggaggtcttgccttagccagttttcttataattctcctgagaaataaatactcaaagtagacgtagctccattaccattgcgacacggggagtgaactactataaatttcttgcgtctctctttattatacttaactctcattacatcttgccaatctagagagcaggtgtggccatatttctgtgtctagatttttacatcaacaagtgctttcattgacagcgaaaactcgagtccctaatcaagatggttgcaattagatcaataagtattgaaagaagcacgacaactggtcaacccactaggggcatgccaattcctggggctgatgatggtgatggaacgacacctgcatctcaaatgtcaggtggaggcctggaaaccagttccacaactcatcctctgagaccaccaataactactagtactgatgttagtggccaaattccacctggagagccactcgtggagttagaagaccctgaggaagttgatcctcaagttgagttacttagccaatttgtggctaacttaca

SEQ ID NO: 88701 - DNA, 985 bp, Cannabis sativa
  modified_base (45)..(53): a, c, t, g, unknown or other
ttggtaatgtctctcttgctgacatcttttttcatgggtgcgggnnnnnnnnncggggctaatgactgagtagccatataaacactttccatgtctttcgtcaggacggtaaatgcattatacttgtacgggttttccaatgaactttccctttttcccattcccttgtctattattgttactggagcgtttaccacttgagcttgagtagaaggagcttttgactggcgagctttttgttcaccctctgctcactgaatggcttcttcaagtttgataaaaccttctgcacggtcaagaaaatcactcatcgagtctactggtccgttcttcattatggcattcccaagttcgccaaggacttcaattccccccagtatcgtagacaacttttcgtcttcggttacacgtgcaaccttagtcgcctctatcatgaatctgctgatgtaggctcagagaggctctcctggtcttttcctttacttcgactagatctcctaggtgcaaccgaagttggcgagaggaagagaattgtgcatggaacttcgaggagaaagccttccatgagttgaactttccgggcgctaacttgaaatacctttgttgggcggcttttgggagggtggcagaaactctgcaacatacatctcctcgtactccttgcaggtccatttgcatctcgaaatactgaaggtgggataagggatcttccttcttagtatacatcttccaggttggcatcttaaacttgtggggcaattccaggatattaatcttgggggagaaaggggttccacgtgctcagtctaactcgagatcattgttcctttcaccggccaggccttggaacatacttttagttcgtccagctgtgcccgcacggctggactagcctgttcggcctcttggccgacttgagtcaaatcagcatatctttgagcgagattttgagcacgggtttcgggttgcacgattggcgcatcaa

SEQ ID NO: 88702 - DNA, 615 bp, Cannabis sativa
gcatcaatttgttctcattattttctgtctgggctaccctttaatcttgatcagccttgacatacttctgtaggtgcaggttattttttctaattaaaaactcaatttcccactttaaattattacattcatttgtgtcatggctctagttcgcatgaaagcggcaaaagttggttgtatctcttttgcttacaacctttttcatgggagacagtttcttatacgacaccatagactgagttgttgcatagattgtctctttgtcatcttttaggactgagaaagcagtaaatttagaggcattttctctagggtgctgctcggcattgccagtgaatttgcctttctttccattaccctgtatgttatcattgctagacctcttcccatttgaattcgaactgctaggatattgtggattctagatggacatccctaccgccatggtgcgttgttgatttttattttgcccgacattatccatgtgtcatatagcttcttcgagcttaataaatccatttgctcaatccaaaaattcaggcgttgatcccatagttagccttttaatatctttccacaactctccaagaagctcaatgcccccagtattgcagc

SEQ ID NO: 88703 - DNA, 633 bp, Cannabis sativa
tggatggaacatctaatgaaaatggctcgggtgtaggggtgatactaatctcgccaaaaaactttaagtttcactatgccctaagattccaatttgacagttcaaataacgaggttgagcatgaagccttgatagttggtttgaaaatagctgaagtgttaaaggtcaagaatctggtgtgttactatgactcgtagttaattataaatcaagttatgggagaatagcaggaaaagggtttaaaaatgtcataatacttagagaaggttcgaaagaacttggaaaagtttgattattttaaagtcaagcaaattccaagagagaaaaactttaatgttgatgccttggaaaaattggcctcgcaaaatgaacttgataacttgaatttggtactggtggaagtgttaaacgaaccgagtatatgtgaaaaggaagaagttcagatgattgacagctcacctactttgatgacacccatagtcaactatcttcttaacgggcaacttctagcagacaaaaatgaggcacaaaaacttttgtattcagtccctcattacacaaaggtagaaggcaaattgtattgaaggggttactcaatgcctctcctacggtgtgggtttccccacaaaagca

SEQ ID NO: 88704 - DNA, 1300 bp, Cannabis sativa
attatactgaaatgagttttatttaggacacaaaacccaacaaatctgtcaccatcgaatcgactggatcaatttgaactcccattcgagtttgtacaaccatcctgtatgctgtgaaagacttaaaacaataaaacttgtttctttgctcttaatttaatgaaagcaccaaatgttgacgtttcttttggccaacgacagtgagtcttaattaaagcaataaaataaatattagaaagcaaagaactataaataaagaaaacacaccaaaatttctagaggttcgaccgtgtgatagtggtaatagcctactcttctttaggctttattgacttatgagaccaagaacaaagcattctgtctctaaagctcttacaatggatctctgagtaattctttcttagattactattttctctctgattcaattcgtgtcctccaatagtgaggtgagaccaccattttataggagctcattacataggaatggttttccttaatctataagaaataaaagaaaaaattaatatgtacgttttcataattacaatagaggaattgggtcagtctaggctgattgcccttattctctaaaggtacaaatcaatcccatgaaaatagggattacttcgtctcatgcaagcttggagatatcatcgatcgctactgaaatggccaactcacatttcttggccggtgcatgcgagttgatcacacgatcgagatggtcggatgtcccttgatgactctgtccggacatcgtgctatggatgtacaacttggaccttcatatgaatcctcttggcctgctaggaataaaaccatccacctaggttaaggaaagcaaaacttgtgtcatccaactagatgccacatcatatatagtgcaaaaaataaaataacaaataattagtataataccttactttgcatgcatataaaaaaattaaaacataattatttattttttttttaaaaaaaaataatgtttctatgtactataattaaaattaatctcctctaatagaacaaatgaaataaataacaatataatcaaatatactttataaaatataataaaaaatgtatgttaatttttaccaaaaatattaaaacaaaaaataataagttactttacaaacaaatcaaaagagaatataaataattttacaaacataattatataaaaaactatattatttataattttttattgtaaagcagaaaaaaaaaatattttcaaaaagaaaaagaaaaaaaaaattacctgctgctgccgctggtggggaacgtatggcgg

SEQ ID NO: 88705 - DNA, 717 bp, Cannabis sativa
tgtaggtcaagttctttgcttagatcttcctctgttttcctgtcataaaaaattggctcacctcggtttaatcattattcatcaaggataatgagcacaaaagacaaatcatatgtaatttataaataagtagaaaaaagagaaagcaagcacagaagtatttgaaatgtaagaaacccacgttagatgtttttaagacatcaactcactaaatttgtgactataacaaagatttataacatgtgctacataatcacattagtcgaagctatcgtcaatagcttgtccattccaaacatcataaacaggcactcaatttctaagttgaaaaagtattttatattcatacttgtccatttgcttgctactcttcttcttatttatagctcctccattgcgctcaagctccaaagccttcagtctatttttgtaggcaggtgtcttcttgaccatgtctatagcctaaaaaaacaaaaacaataaaaaattaaaagaatcacgccaaaagaaatctggctgcctttcctaatctactatgtcatataataacaaatttgcatatgaagattgcaaaaagtatccaactgaatttttcattccaaagaggtgtcataccacaagaagatttgccatataaatggataatatacatcaaacggtgtaatatcaaagttcactgcatgccacttgaagcctaaatgtgcctctatcacacaa

SEQ ID NO: 88706 - DNA, 616 bp, Cannabis sativa
aatacttacagggtttcttcggaaagaacgtgaggctggcatcaataattgcccataatttgattcattgtagttgggagcaggaacaccggagtcccttgcagaccgccaattcattggtggtggtgctgaagaagaagtattagaggtgctgttggttcttctaaacatatttgcctccttttgatttcaagatgttgattccttacttaatgtaaaattgttttcacgttgagctttatgactatatatagctgtaacaaattcctaaccttttgcctttgtttaatcaaatgttaatagtccatgatgacaatatgcttatctatcttattatcaccactggtctctgctttttcaagttttggtttttcttgcccttagtgcgaataaagtttaattctttgcccactttaaaaggagattctctgctttggtagctagtctagtactccagaaatttaaagatgaagtggaaacggagaaaggaataaggttcttaaaatataaaatattttctctttaaaataatatttttaccaaggaataaaaaattacattatctagttaacgaccattatattttcacaaatcacaaggcatctgctgatgttgg

SEQ ID NO: 88707 - DNA, 591 bp, Cannabis sativa
tatatgatcgtgtgagatatgtttcattctccaaccttaaatatttcaaattttaattgattgtctagtaaaagtacatacttaaatatcatctgtatatattatatattgatttttttttgtgtaatatataatatattttatgtgaaaacaatgacttttgttaaagaaaaaactactaattaaccaaattttcaaacttaataatgataacatttgatcaatagcattatcctatacatagaaagagttatattcttaattttcttcttcttcttttttatttcaaaaacaaaaaagaaattcttcattttcttgtaaatggtaatgccgacactctaaattttcttctttaaatttaacgttttattaatttgggtacatattatttataaagctttaaaacacacttatatatgattaaacaaataaagagtgtttttatatatagaggcataatatatctaattatttcacatctcctcacattgaaaaggtctcaaattataatttctctatataataataataataataataatgtagagttatatatagtgatattatcttaattaaggtacgtacacatgt

SEQ ID NO: 88708 - DNA, 938 bp, Cannabis sativa
actgttggtgtggtttgtatcatttggtatcagagcttaggatcatcaggtttggcctatctatcttttgtgtttttcttttcaattcatgttctataattttgtttcacttgtgttctattttcctgtcaattcatgtttcatctcttttatttttctttgtgaaatccgaaaattgttagaaccacattctaataattttcttgtgtcaaacatcgtgtctttgctttcttttcttcttaaaaaaaatcgaaaattcaaaactcttaattttttggctgatttcttgtcgccaaatttttctatcaattagtttccctttaggttattgaaattcaaaaatttgaaaaaaaaaactccaatttgttatttctgaattctagtttccctatttgtgtaacaaatctgttttcttatttttgtttctcattggtttcctaaaattatttcataaagcttgtctacttggtttcctttcttttttctttgggccattagcaagtaaaaaaaaattgaatttcttaaaaaaaaaggaaaaggaaaccgagaaaaaaaaacaagaatctggaaacctctcttcatttttttttttgtattttcttagtctccatagtctagaggcttgtttgccaaaacgccacacaagtgttccaaaaatcatcatttattctttcagttttctttggtgttcatttggtttgtttggttagaattgctgcttgaatcctgtcttatactgtttgattagttttttaaagaacttaaagaagaatatgagtggaaaaaggtagaggtgtgagcttagttgagcgtaaaagtcatcgaatttgagtgaaagcacgagtgaattgagtgaaattgtttttttttgagtgaaacacgtgagggagtgtggtgaggtctctctttatctgttctaacttatttttgcagaattc

SEQ ID NO: 88709 - DNA, 592 bp, Cannabis sativa
ataggactgccaatagcttgttgaactcccctttacaaagattcaaaccactttatatccactattttctcttgtctaatgtaacgtttccacttgaagccattattctgtgggtgtaaggacccaataaaagcttgaagcggggatattacactaatagtagaacaccacggcgtatgaaaaaagtgttgggtactactgatatatttaatagcaatactcatacatatatttactaagtattagtaatatgcaattgaattaacgtctaattcaatttaaattataatttatataaaaaataattatttaattttattaatacttttaaattaaaattaaatatttaaataataataataataatttattaattgacttaacagtgttaattagatattttgttaattttaactgaaaaaaataatgttaaattaataatttctattaaatagtcacatctaatataaaaaaaaaaaatacatccacatatcttaccaacatgatttatttatgatttattttgggggaccatgcgtggtcaaagtttagctattaatgattttgatgagaaagcttctatggcacttcc

SEQ ID NO: 88710 - DNA, 561 bp, Cannabis sativa
atagatcactataggttggatctgatatagcatttttaaggatacaaagtagaaatcgaggttggaaaatcttaagtgttgagaatgttatgggcctgtgagagagagtggggaagagagttatcaaacttaggcttagaacatggaggcttagagacttcgttatggcttagttctcacttagggtttttaggttagagttaaggcctttgtataggaaagcctaaaccctagtttacagctaaaacctaggatatttgtatatttaattaattaattataaaagaccaaaatgtccttgaacatagatattttcaacctgttttattgggttttacgacttaattcgcagcctaatcatgcagtccacgtgtggaattatacaagatatcttgcaggccttctcttggtcagctagacacctgttgggagtaggctagtcggccatggtgttgtccaaaggcttgccgaccatagggctggccaccctgcttttgtgaggaagctggtctgacacttgatctttttgagtgttgaggtccctatttgttgaggtactaa

SEQ ID NO: 88711 - DNA, 584 bp, Cannabis sativa
gcacaatggaagaacttcaaatcttcccaccacctcataaaaaatgcccttttgatctttgaaaattaatgggtaaaattagattgtttgttatttatttattttcatgttctttccctagttttgttgaatgtggatattgacatattttttttggaccaatccacactattattttgccaaatttcctaaatggtttttttttttttttttttttatatctttggttcaacgtaattgttaaacttacaatctcaaattggaatctatttccacttttctagagaaaaaaaatcaaaattcagaaaagcagccataaagaaacacggcaaaatttgaagtgacatttataaaacgatatagtttaagaaaaacgacaataattttagtgtaaagtaataaggatcaatgggggaaaatagacagtgattattagagactcaagaggataatgtcttaaattactagccgttggataaggcataaattttgctatgagtttgagctttcaacactatctcatacaattttcccaataagtagagcatttgctataaagcactatatattggtgtgtggtgtta

SEQ ID NO: 88712 - DNA, 694 bp, Cannabis sativa
ttataaacccaatctttaccctcaagctaccaaactccattatacataacaaacgcattaacagttgaacctgtcatatacaataaaaaaatacgtacaatttagaacaaaaatctctcatagagaaaagttatccaaaatctaaaaaatgcaataatactgtacaccatcgggctcaaatcggaccaccaccaggaccatatcggaccccgtttaaaattaagtcaaaaaatcatgttggacagaaaatgggccaacaatcgtacaccatcgggtcccatcggaccccatcggatccatctaacaaaaatgccatgaacccaatttttggaccccacatcaaactaaaatcgggcccatcggaccagactaaaaaaattgtcccaaacccatttttctgatcccaattggattagcatcggacccagtatcgggcccatcggaccacactaaaaaaaattgccccagtccattttttgacccccatcgggtcaccatcacgcctttatccctgtcattcaacctcactacctatcaaaccaacatcagatgggcgtcggaccccatcagaccaggcgaaaaaaacagcacaaacccagcaacattacaacacacaaaacagcaaaataacagcaacaacccatagatcaagcaacaaaacaacattcttaactaaatataacaacaacaaaca

SEQ ID NO: 88713 - DNA, 836 bp, Cannabis sativa
  modified_base (468)..(469): a, c, t, g, unknown or other
gacgtacctgctgttagttcattgttggtgcccactttatacccactactcacggtatagcagccatcgggggtgtagtgccaaatcaaatcatcactttgggttgtcgaacaaggggttattcctaaaatcattggaacatcatccggatgaaagcactcttttattctttgggtgttccaatgtccgtcttcgtctttgatggtgttgatcgtggtcccttggggaacatgagcaggagtacgaagagagaaggtggaagggcgagggagccacttatcctcatttatgcgaacgtctcttccggccatgaccctccaacgaatacctttatcaataattttccttccccataggatacttctccacatataagacccgaaaccaccaactttagctttcaaaaagtttgaattagtatagtagcacgcttttagcactctagcaagcattgagtgagggttattnntgatcttccacccttgtttggctagaagagattggttgaacagctctagatttttaaaacccattccccccttttcctttggcttgcaaagctttttccaattcccccaatgggttttttgttcagtatccgaagacccccaccaaaatcgagccatcattgcatggatatccttgattagtttcttgggaaggcggaaacaactcatgatgtatgttgggatggcttgaatgatggcttttaacaagatttcccgctcggcttaagaaaataaactagctttccacccttgaagttttgttcttattttggtacgaatgtcttcaaaaacttctttctttttcttcccaactgaggccggtatccc

SEQ ID NO: 88714 - DNA, 747 bp, Cannabis sativa
  modified_base (275)..(277): a, c, t, g, unknown or other
tacttagtaaatttcggatctacttattaggagcttggttacataggcccatggtccccatattatatgagataatatcatcttgtagactcaactaattgattatatcagtcaattagaattcaaaaaaaaaaaaaactatgccttatttgagaatttttaccaagtttgacatttttaagaagaaaagagaaataagggtttatttgttaattaatacactttgtgggtctaaattataaatatgtttaaattatattttatttgataattannnataattattaaaataaaatttgtatttaaataattagatgagaaaagtgttaaaattagaaaaagacacttttatttcattagttgaaataaagtagcgaaaatctaactctaaaacccgtatatttgaccctaaaaagaagattcagcccaagtctttatttcaagcccaatctcatctaacctagccctaagttaagcctatataaagaaaatgatgaaaagagagaattaacctaagttttcattgtcagattactctcttctcttctttctttgtatatttcgaaaatcataaagtttctctctcaaaaatattgttccaaaggtgtttgagtatcagcccacactgttcaaggtgatactcaagcctatgtggaagactgtgatgaaaaccatcgaaggaggagaagatttaggttcagatcttgataatgctctgctactgacaggaatcaagggttagagatc

SEQ ID NO: 88715 - DNA, 587 bp, Cannabis sativa
gaacgccaaagaaccattggccatagaaataccaatcccattactgctgctactatcacaaacaacccaaatcccaccactgattccagccctgcagcaaattttacctccaaaaacaagaaaatgcgtcccacttgttccaattgtcaaaaacctggccaccttcgagataaatgctactttctcataggttttccccctggttatggcaatcgaagaactactgataacaataccaaaggcaaagccaaatctgatgcatcaaacactactcgacacactcctcacaccatgcaaacatctaccatgcctactgattcaaacccccctcaattaacccctgagcagtgccaacagatcatctctatgcttactcaacagttgcagccatcaacatctgctccaccagaaaccaatgctgcaattacaaatttctctggtaatgttagcccctttccattcaatttttggattattgatagtggggcaacccaccatgtatgctgtgatgttagatgtttttctttctttgttaataaacctcatgctgcagcagtcaccctacctaatggtcaatctgtaaaaat

SEQ ID NO: 88716 - DNA, 1251 bp, Cannabis sativa
  modified_base (549)..(549): a, c, t, g, unknown or other
caaaattaaaaaatatggaaaaaatatttcttatgtttcgggatcccataaaatttttcacaaaatattacaagtcaagttttacatgtcgaattaagcgacaaattaaactaagaatacaaaatgcagcagttggtagacccgacccgcgtggtctaacatggcccgaacatgtacaatccaccgccaaaccctcaaactcatggatgatcacaaataattttaccatttcctgcattgtagagcacacgtgagccaagcacagcaagacattaacaataataataatatgcaatataaaaatttataattcagataaatattgatgccaccgcatctactgtctatatagcataaacttactgctcctcacatgtctatttacaataaagccttagattggtttatttcagttctgattaccgagtctaatctaattatgccttgaacggataattttttaattcaacatgtataccatggcattgcatttaaaattatttaatcactagagtaataaccctaggtcatataaccgctcactttagngtaataaccctaatcccagtttctaatttaatcgtaatcgcaatatcaaacatgagcgccattatgcgtaaatttacgtgctaactactgtcttacttggtattcttagtatgaggagattctaaatccccgggtgctcctaaacaagggtaatcctagtcacaaattcttgggatttcacaaatagggtttatcccaaaattcactttcacataatcatataatttgcatttcaattacagataggcatatagagctcggaacgagtttttcaacgatatacgaaacgttccaaacggagttcagattcaaaagttataaacaaaatgagtttaattaacacaatctacacagaaaacccctagcgggctgcgacactcacaagccatactgcgacatttgggtagcaaacctagaaattccaacctagcgggccgctgcatgcaaaacccatgccgtgacacctcggttaaaaacctaggaaatacaaattttcaacctacttgaatgtgcacccgaaaaccaaaccaagccacaacaaagcatgcatactctcaattcaaatccataacaactcataactagtattaacaacaattctaggccaagcaaagctcaatatcaagataagaacgagaaattacaagtccaaatcaaccataccaaaattacactaaactcaaagcttgaaaactcaagcat

SEQ ID NO: 88717 - DNA, 576 bp, Cannabis sativa
cctacattgtaagctattatatttgttgattttttatattcattctaccaatcgatttattctagattttagaattgaattttgttacacatgtaaaaattagtcgatatactaaatcaatattataccactcacaattctcctaactctctctttctgctaccatctcaatagttggaaatccttccaacaaacctctatcctccaaaagaatcggctttagtattttttttttcctttgtgttagagattatcacacaataaacattttattacttttgcaaatactgctatatttataccatactaataatgattattgaagtgatttattcttagtttttgagagattttttttttttttttttttgaatttttatgatttcaatataattataaagcacctaatataaaattaaatatacgtgctttgtacgtaattctcttttagtatatatatgtacttttaataaatcatatattttgttagcaaaatttttaaatatttaaattagttaacaattaattattttaaaattatatggcggtatattaatattatttaagatacatttt

SEQ ID NO: 88718 - DNA, 629 bp, Cannabis sativa
aaagaaatggctcaatactactcaattatgactaagtacatcattattaagtggttagaaattccattcagattgggtacacatcaagctaacttagttaccaattcttcaaattctttactcctgagacttagattacaacccatagtactcagcctaagtaccatgttcatatcaataattgggtgtgatgcttttgtggtgaaaacggtctaaactacacaaattactcactttgagctagcccctaggggtacccgacctatgccaaaccctagggggtacttggcctgtgctgcctaaatttgatatattattgaaagatttttccaacgtcactagaatcacgtcaatcacagttatgagtagagagatctgctcaaaacattaaaggttacagtggaaggtactcaacttgagccgaccaacatgtgtgatggatgcagttactccatcatctcgatgccttgaagatggctggagtgtcttggagtctcgcagcaatggtaagtgaggaaacaatgtgacttgagcttgttgctcccacagatggcgacaaactattgacagttaaacctcattaaccaaattatcgtcgcaaaatcgaaacttggatgcaatacctaaga

SEQ ID NO: 88719 - DNA, 643 bp, Cannabis sativa
tagtttaggaggcatttttaacgaccttaaaagtttaggggtatgattcggtacatgtcaaagttccgggggtaaaaatcctaattagctttttaaaaaatataaaaaatttgatcattaacttttataaaatacataatctaaaatagtatttaccctgtatttaattatgatctagtgttttgttttttcattttcattttgtttgtgtaaaccatcttttaacttaagtcaacaaataaaaattgtctcaatcgaggtttgaaatgtttcttcttttctattattgtatttcttgtttttatttaattaaatgttttgaaagggaattccattaatgaaaccatagaggattaggcaatcaacatagtaaggtgatgtggagtcttaaacaactttaggtaacaaatgagtcaccgaatcaattgatacttctttttgaaaaaaagctcattacaaacaactacattattgttcatgtcttccaacaaatggtatattcacaattttagattgtgtttgaagtagtgcatttgttaaatttctttcaaaaactttgtaaaaaaaaaataattacatttatgcctcttttttgtagttttatttttatatttactcctaattttttataagaataatttta

SEQ ID NO: 88720 - DNA, 1145 bp, Cannabis sativa
aaggagaatcgggcttagatcttgataatactttgcgatagaaaggaaaagggttatagatctgaatgggaggaatcattatattttgctccaatcaatgtaaggttacacaaactttatatgtgtttaaatttcattgtttctaaaatttatatttaggatgttaataaacatatttgttagtaaatctaggtcctggtaaaagataatccaacacaattgatcataatatcactcttaaccagtactatactcgcactgccgacctaatcctatacttgtacctctgtgataatgtcaataatattacgaaattaaatatcagtcaaaaccagtaatatacttgtactgttgactcaacactatagtcgtactgctatgataccaattcatacattctagaaaaaaaaaacatgtatatcacatgcatacacatatatatcttatactaatcttatctcatttccaaattcaagtgagttggttaacctgaatagaaatcttgctcattgatttgaggccttatgtcacatttatgtaaaataagtaaataacttactaaaacctttttggggacataaactaaaaactgaaagtttctctattgataaatagcatgataataccctaaatattaagaaaaagcaaaaaaaaaactactttggaaaaactccccaaaaaatgccaggtcgtttctatagaaatggcagaccgttttttgggtcactgccaacaaaaacggtataccctttatgagaaaatggcctaccattttgtactgcaaaattcctaaaaatctcaatgtcaactccaaactaatccaaaccttgtgaaactctccagaatacctaattaaagttcaacgaacatatatcaagcaataacaacaattatagaccaaagaacataaataacccatggttgagccaagtttgagtttttaaactcaaacttgctcaacacctcaaacagccatagaaaaccaagcattaaagcatcaaacaactctaactaaatccaacaaacaaaccacaataagcccaggtttgtgttggaatatcttttaccaggatctaacaagtatatttttaacatcctaaatatgaatttttaaaacgatgaaagtaaacacataaaaggtatga

SEQ ID NO: 88721 - DNA, 1645 bp, Cannabis sativa
cccccccccccccaaacaaaaagccccttcccaaaaaaataaaaaaaaaaaaaaacaaaccccacccaacaagtgcaaactaactcattttggttaactttaaaccatgtgaaatatcaaaagcatatacccaactgattaacacaataccctcgacagtgaaaaaagattttttttttctcagaggtttgtttgtttacttaatattcaaacccactttaataatcatctaactatttgacctaacaacctaatcccaacccattataaaaagccattttccctgctctaccctatgtgaaccagaaacactcaaaacaaacactaacgaaaatactaaaattttaaaagtttgaaaatcttaccaggtgggggattgtgtgaagtgagcctttgtaatttcattgttgttgcttcgcctccttacactgtcgcctgaaggggttaataggggttacttcatctgggtttgcattttcaattttacaaacgtgaatggtggaagagatgatggggttttttgtgttagggttcgaatgtttaagtcgtactgttttcttctcttttaatttgttttgattttattttttagttttattttaataaattttgttatgattttatttcagtttaggatattaattttgtttcttttttgtatatttctgttttttatttaatttatggattttaatttaatttttgaattaggtttatttttttttaggggagaggggtttatttaatgccacggtggcataactcactgacgtggatcgtgcccacgtaagccaaattagcactaaaacggagccaaggggacggaatagtgttgagcaaaacgaaaccagggttcagagagttatgccgtcaaaattttgatttttgtggttaattgttacaaacctaaaagttaggatggtttagccgtcaatatctcttaaatatttaatttattaaattaaaaataatcacataaataatatatatttttatcgatattataatttttattatgtaatttctactataactacaaaataattttctcattttttttttgtaatcctactttattttatttaagatcacatgtatattttttaaaataattaaatagtttacagtgctgaaaataaagttctaacaaatgtttaccacacataaaaaaattgtgagtgcaacaaaatattttaatttaatcttggcactgtaatttagaatttttaaaaaaatttataaataatcttaaataattacaaacatgcacgaacataaaaacaaaatcaaataaaaaaaattcttgaatgtcgaaataaataagaatgtgccagattaaccatttaaggtgtgtgcactatatatgaaataaaatatatctattctatataaagtgtacctatataactgaaattcttagtttttgagaaatttatgggtaacttttaatttttatttaataaaataataaaatactatttatatataataaaataataataaaacaaatcttactaatatttaaattgatattaaatattctacgatcacacccatttaaaaagaaaacgtcacttgaatcacctctgcccttaattaaatcagggttaaaagccaccattgttacaacctcttactacgcaca

SEQ ID NO: 88722 - DNA, 566 bp, Cannabis sativa
cctccttcttggcagcttcaagctcgaccttgtgggtcctcttcacctcctcgacttctttgattaggcgagtgttttccaacttggcatcattccattgcttgattacaacctggcgctggcctatcaagttctaaatctcgatctcaatatactttcttttttccatgccctgccgttgggagacaaaggagatgaaagatgtctgaaaaccaacaaacaaaattgcatgagtattttgaaggatgttgaaaaaaggaagtgagcagataagggtaaaggaatttactgagaggctatcagatacacttctttcaagcatctcctccatatccccattattaattaagttcaattcatagggatggagagccttgaaatactgccaacaagctacaccaaactctatagtgtactccgggccagttttcccagcctcgacaggcagagtttcgacggcttggctcgaggaggcaaaagcttgagtcatttttggaataatcgcgtctgtatgtgcgggggtcggaggatgggtcagagcttgagtctcagtttcagggatctcg

SEQ ID NO: 88723 - DNA, 1034 bp, Cannabis sativa
  modified_base (400)..(409): a, c, t, g, unknown or other
gagagagagagagagaagaaagatttgagaaagacaatgcattgataagctcgatcgaactagcttatatacacatgttacacatgaggtagttagatacaactaggctaactaacttaacaagtaactacttaactaactctctaacttaacatgtaccaatatatattatatatgagtacactcttaatgagtattactcatgaataagcattattaagaaaatttgagtttttatgcttacttttactatctaattaaaagaaatatttcctttttacattatatggttaaagttattctttcggactaagagagataaaaaaaaaattgagattgagttagagagaaggataaaataatgctgaatataagaataattttgggtaaatagcggcannnnnnnnnnaagttttatgtttgtaagcgacataaacccaatgtttatttttagcggcataagtaccctatgtttgtaaaactgtaattttttctttaattttgtcagtacagactctattattgtcttaaatagggcacatataaagcttgaattctagatcattgggtctaaataggaatatgcactatcaattacttctaaatattattttaataaatttaaaatagactctgtattgacgaatttggaagaaaattacagttttataaaaattgggtgcttatgtcgctaaaaataaacattgagtttatgccgctgttaattataaatttaaaactttgggtacttataccattatatactctttttaaaatagtgtaaaaattacaaatttaaaactttgagtacttataccactatatactctttttaaaatagtgtaaaaaagatagaaatttgtttaattaaatagtgaaattaagtacaataattttatttattttttattatcgattattgaattaaaatttatttttaaaagttaatatttttaaaattaaatttttattatatttattttctaaaattactcaggataatacccattaaaaataatttatatattttgtta

SEQ ID NO: 88724 - DNA, 730 bp, Cannabis sativa
gtggcaagatgccaacaccaagctgacgtgccaatgcttatatcatgccccattccatattgtctgaatagtctccctcgtcgcccaaggactcccatacatccatggaccaatcctcaaggcaccaagcctccacgcatgttggccggcccttgagacataccacgaaactagttacatgtattagacctttgtctctttccagcatggtgcatcagtcccatgtgtgcatgcaaaatagcccacgaatgactacctgtgtcatctcgtgttgagactcgtggccaaggcgcaccacgatgtctcttggaggtttaggccacaactcgtgcaagcgacatactggcaagccaatgaaaacatacttgtcaacctctggcaacattcttagacgcactattacgttgacctgataatgtccatgagtattataactcatgaagacgtctgagtcccctcgtggtcctcatatgtccgctctactaggccaactaattagtagtagctcacttagcaccaaggtgccagggggtggtagagagctgacaccaagcactcccccttaaagagcattctaagcttttagccctctaccaagaacatacatgattatggctctgtagacatatggccaaaccatataccaaatcagagactctctcaaatccgattgcaccattgtattcgtagaataaaataaataacaaatacctagtcccatcacaatctc

SEQ ID NO: 88725 - DNA, 506 bp, Cannabis sativa
  modified_base (289)..(289): a, c, t, g, unknown or other
tcaaattaaagcgatgaataaattaaaatagcagaaagtaaatagtataaagtaaagaaaacaatagattttatagatgttcggccccttatggttagtaatagcctactctcctttttgttttcttgacttgtgagaagatgaataagaatgacttactctttttcgaatgctcttacaataatctctgagtattttaatcttagattgaggtttctctcttaagtgttttctttctgaatattttcatatccctgaatagtgagatgagtccactatttatagggantaattacatgaaattagtttccctaaatcaatcaattataaaagggaaaactagtttattttcataattataatgaaggaaattgaaaacttaggctaattgcctttattctctaaagacacgaatctatcccacaaaagtagggattatatcgtgacttgcaagcattgagatatataagatattgttgggaatattttatcgggatctagattta

SEQ ID NO: 88726 - DNA, 1241 bp, Cannabis sativa
attatttacattcatccattatatatttaagaaaaagaaaatatatcccagattagaaatagaagaaatttcactacacaaacacaaaaagaaagaaacataagataaatcaatgaaagaaagaaacctgaatttgaggggaaacagcgtatagacatatgagggggaaatggtattaaaaattagaataagttgcattaactaaagaaaagaaaatgtgtgagtgtcttcccccattaattaatacaatagaaaaacaaaagcacatgaaaaccttaataaatggttcgtacctgagtcgaagaagaagaagcagcgatcaatggaagagggagggtgagagcaaggaaaatacctcttaaaacagcgattaggatgccagaatggacggcccgcggatcaataacgtcggaggagaaggttacgaagtccgatgaggcagaagatcgattggggttttggttagtgtctcgtccgtcgttgattggccttgggaggccagggatggccgcggcttcgtcgtctcggaggtggttcgtgcgcaggaggtggttcgtgcgcaggaggtggtttgttgtcttggagaagaagaagaagaagaaacggctgattttttttggtaaaggttttctaaatgtaaatattgaagagggattaagaaatagggtttctttctagggacacgtgcaagctaatttattgtttattattttttttcaacattgattaacaaatacataaaaaaatggcccgctttttattatttttttatattgttttattattttttttttattgaaaatatattaaaactgtattttaaaaaataaaaaataaaaatttagggttatgatatagtgacgcgccaggtgtgtcgggacacattaatccagtcacccctggtgcgtcactatatggcagtattttttaaattaataaaaattagaaaagtttaagttttatcttttagtgacagcccttatttttagtgacacacattacaggtgactaacactgaatatttagagtctacttctgcatgtcactaaaaatcactcctaactcattagtgacacgcacattttatgcgtgtcactaaataatgtcactaaaagctcaaattgtagtagtgaatgatcaataaaatccctaaagttttaagatttataaacaaaaaattacacataaaataataacgaaattaatatgaaattatggataattaatatatacaaattaat

SEQ ID NO: 88727 - DNA, 768 bp, Cannabis sativa
taaaatatttttattattgccctttaaatttgtatttttatctttttatcccctatattttatttattctcaccaaagttaaatattcatttattttgcccctatatatattttttttaaaataaataaataaaaaggtattatgatagttggctccaccacaatcttatcataaaaaaaattcaattattaatgttatcataagaaaaaaaatcaattattaagtttaaattattccatttctaatataaatttatcatattttgttagaaccttttagcaataatacacattattttattctttaaaaatttaattttttgtgaaggtagatttattcaaaacattacattctagatttcctacgacttgtgattgtgagccaaatttttatgtcacaatcaaacataattatataaattttcatttaactaatataggcatataaaataaattgtttgaacactatttttaatattttaattattctaatttatcaatactttacaggatatcttaaataattataacgtacatgaccataaaaaaattagactaaacttatttcaaaatagcaaaataataagaaatgcatcaatgcacctttttttttttgttttcttgaggtgcattgtagaagaatcttaactttttttttaactccagtccattacattgaagaatctggttccagtctttccgtgcaatcggttaaccctgtggaggagaatgtcatatctcctccacaggagccatgagaggtgtagc

SEQ ID NO: 88728 - DNA, 712 bp, Cannabis sativa
  modified_base (653)..(665): a, c, t, g, unknown or other
ttgggacttcatttttttataacaaattagatgttattcttgaatagagtattcttgaatagaggttctactgtattacatttttttttttttgaaggacacatattacattagtacctacattttatgaaaattaaggttattcataccattcctatatgtctcaatcgattggagacaaattatttgaaagaatttagtatcaatggtttgattaattcatacggtttagaattttttaatggtcacggttttaaaattctcgtcaacaatttaaattaaatcaaaccgtcaaattttatttatatatatacttaatattttttttttttgaattatttatatttaacaataaatttagacatatgatattaatttaatattatttttaaaatattttttatcattgtttttcatgtcttctaaactttgaaaagtaagaaaaaaattatttaaaataaataagaataattaagtaatacaaacgataagtttaaattaaattaattagttctcaaataaattgatttggtttaagcagttaattaatttaggtcagttttgaattttcgaaaaataaaaataaaaattcaaaccaagcccataaagcaatcctttaagggctcgtttggaacgccgtattaagtcgtatnnnnnnnnnnnnnattatattgaattgtattttatgcaatatttttatgtaaaactatat

SEQ ID NO: 88729 - DNA, 1244 bp, Cannabis sativa
gtccctgtgaagaaagaaagttagatttcacctactcaaaagagcttacaatgaatcaaataaggattgaacatgcgtatgagagccaaaaatcaaagtcatctatcaagaaactaatacgtaaatagctgaaacttaaacccatttgtctcctttatttgtaaaatttgattcaagtatgacaggaaagaagagaaattttaacagggagaaaattgatccatacgcttatcatctccttacgagcctgctgtaactcatcattacttctacgttccttgacaataagtgcttggctaaggtcttctagagcttcatattcttcttccttttcctttagttgttcttgaatctctttcatgttcttttcgacctccatatcctcatctccacccatatgtttcattacttctaaagctcctctcatgcgctctatagtcaacactaaagcttgttctgaatcaagttgtttttccagttcaatgatttttttccgaagttcctccttttctttctgccatggccaataaatcaccaaagaataaaatagtatgaatgaaggagttttcaattctactatcaaaacgtcattataatcttgagaactctaatttaaaataataaaataaaatgaaggaaacaaaccttttgttcttttgctaaatcgagcatatttttttcagccttattttgctccaaagtagccttttcaatctaacattatgaagtacatactatgaatatcagatcacttcaaataagttttggacattggctgcggaacttacataagctacaaagagcattatgttaataataacaataacaataacaataacaataataataaagcactcagtaaccattataattataagggtttattttcctgttgttctttctcgaagaaaaacagtctcattttatccctaataagaaaacaatctactaaacaagtctcgtgacataattaatcaaggaaaaaaaaagggattagtacggtttgtaaaatatattctacctactactgaaaaggaaaacagttcttccacataaaacaggtattgaaagtcaacttcaataagtataagataatgccattacattttttttatcacttaatttcctgataaaatagaaaatctattgtcaaagtcaacaagtaaaatctacatagctgctaagtaaaactaaataagttaggattcaaggatgtgtgtgtgtggaggtactcgaattctaaa

SEQ ID NO: 88730 - DNA, 1153 bp, Cannabis sativa
  modified_base (382)..(385): a, c, t, g, unknown or other
aaataggaggagagttttttacaaaatgagacgtaattatcaagctcccagcgggactccatcccattaagagcgttgatcaccaccctcgaatcactctccacaataaggaactcgacaccacgagctttagcctcctcaagagccaaacagcaagttgccgcttccccacatagaacattagaaaagtccagcttcgaagtagccacccagatcaccttgccagcatgatcccttgcaaccacagcagcgcacatgcagtccaatcccattctgatgtcgcagttgagcttcaaccaatcttaggggggggactccaagaaaccgacggccgcaggatggggcaagggagcaaggaagcatggtgatctgcaaaagagannnnaatagtgtcaatgcatttaaaaatatccacatggcaattattatgtaccttatcattccgagtccgccagatcatgtcaacagtgagcgatgcataaagaaagacctcatgctcattaatgcctttcttattgaggtcccataaaaatttaacccagtcccacactcttataccagagtcacagatggggaaaattccccagggagacgaccgccataagtgagaggcaacattacacgccaggaaaaggtgctccatggtttccacttccaatccacacaaggggcagctctcatcctgtatagggaatcttcttcgcaactccgaacgaacagggagagccttagataagatacaccaccacaaaacctttagtctctctggaattttactgttccagagcttgttccacaaaaagggggcaacctcgccgggactcgctgtatccacaacctgggccatataagctgatttgcaagagaaacgaccattactttccaaagtccagaaccagctatcatttccaaggccagcaggaataccccctttcagaatggctgaaatagtttcttgatcaaacaacctgataagcttttggtaatcccatccaccattttccaagagaagctcatctaccttcatctccgtattcatatcccgaccaatgggatggggggtaaatccctctaagtgcgcaatcaaaggatccacccagatgttagtacccgtgccatcggccacccgcttgcaggcaccttttcggatgat

SEQ ID NO: 88731 - DNA, 799 bp, Cannabis sativa
aatgtccaaaaaactgctatctattgcagtgggatgcaagaaagagaaatactcagacttctaaatatgtctggcttcacaagacatccaacaccatttaaataccttggcattcaatatgtgccaaaagaatttcagatgatgaatgcacgggtttagtacagaaaatggttgcaagaattaaagtttggaactcgaggaacatctcttttgcaggtagagttgttctaatcaactctgtcttgttgacactacacacttactggtgtcagcttctaatcttgccaaagaagatcatatcagaaatagaaaaggtttgcaggaatatttaatggaagcaaggcttggctgagggccctggcagtgtagcttagggcaatttgtgcaaaccaaaagatgctgaaggtctaggattcatgaactggaatgaagcagcactttttaaacatgtgtggtccattgccaataagaaagacaatctttggataaaatgggttcatagtgtttacattaaaaatgaggagtagtgggagcacaaagctcttttgaatagcagatggtattggcggaaaatagttgaggcaaaagacaaagtgaagcaattgatgtgtcccaatacatttgcctctaaaaattataaaagagcagtaggatagaagttgttgcagggtgcttttgagcatcctttctggtgcaaagaggtctggagcaggctcaatgtgcctaagcacagttttattctttggttggcaatgcaaaaccgattgaagactaaagaaggctagcaaaattcaaaatg

SEQ ID NO: 88732 - DNA, 755 bp, Cannabis sativa
ttcttcatttgtactctggtcactgtgttgtatgagcaattgctgttgctgtagttgatattgaccattgcgtgaaaaggattcttcatcactttgttgtataaatgtctgtgtttctggttgctgttgctgttgtgattgtaattgataatgatcattgtgtgaaaggagttcttcatttgtactcaggtcactttgttgtatgagcaagtgttgttgttgtagttgatattgaccattgtgtgaaagggattcttcatcactttgttgtatgaatgtatgtgtttgcggttgttgttgctgttgtaattgtaattgataatgatcgttgtgcgaaaggagttcttcatttgtatagggctgtgattgtggttgattataaacattattgtatgaacacgattctgattgtggttgcggttgataatgatcattgcatatgaatggttgtgattgcagttgcggttgtgattgttgatgatgataatattgttgttgttcatcggttgtttgtagttcttcttgttgattttgagctcctaatacctctgattgtagttgctgcccctcatctttattacttttatatttctttgaatttttgtatattttgcacaaagcaaaatcatttttactattattcgaatcgttattgtcgtcaattattatgtactcgtgcataatccattctgtcttgatgctctttttattgctttccatatgaaaattgagaacactttttaggccaatgtcta

SEQ ID NO: 88733 - DNA, 522 bp, Cannabis sativa
gcccaagcccacggcagttccaagacagtattttcataatgattggcgagccccattgccaaggcccgccaaagatgagttttttgaactattatgatgtaccacctcaacactgtctctactaccctcacttactttccttttttgttatcagtaacaaccagggcattctctgaactatgaacgacatccttccccctattttgagaaacatctccttgattgacacgtggaccatgggaaaatgattgagccataaccaggcctccaccattaacatgacttggcattgggccaacgcctacattcacagcatccccaccgaccaaaggtcctcccccattgacagtcggggactccatcccctcgggtccaacaccgccaatctccgtcgggggactccatcccctggttctaagccaacgagaaccaatattcttgtaagatttttgaggaagggccctcatgaactcaccataaggcttcactatttgctccattggctgatgaaacaacttatga

SEQ ID NO: 88734 - DNA, 2350 bp, Cannabis sativa
actaatttagttttagtcaccacaagtattgtgactaaaaagacatttagtcacaacaatttgtgatttttgtgactaatatttttagccattgactagtcacaaatataggaatagtgatttgtaattagtcacaatcattttacttttagctacaaattttattgtgactaaaagtaaaattttttgtagtgatatcaatttgtagatttatgctttaataaaatattaaaatgaagagaattaaggagagaagagaaaaatagttttcgagtcattttagaatatcatgtcaccgtctcatacttctcctttatagatatatatagattcatatttaggatgttaaacaacatacatgatagtaaatgtggatcctaataaaataatccccaacagacttagtaccaacaccaacaagacaaaagttcaatgaaatttcatggacaagccagacacatttgggcttaaaatgaacatagatgctgcagttaattctgagttaaagatcttgggagtaggtgcaattgtaagagatcatcaaggccatgtgatagctgctttgtccaagccagtacatggatgttttcgttcagacgaaatggaagctaaagcactttttcatagtctcaattgggcgttacaattacaattaccacttactcatattgacacagaggctttgagagtctctacagctcttaactctccatctaggaatttatctagttctaatgatttaattttggatgttagttgtcttttatctttttttttaggagtcactgtttctcatgttaggagaattactaactaagaagcgcacggtttagctaaatatgctcttgagttgaatgaaattgtctgtctcaaattctattttctctgttgttgtaaacgattatcatttataataacattgaaatttctcaaaataaaaaacggattactttttttaaaatgtatttaataaatgtaatataaaagaatgagtaataatctctgtttgaaaattatctgctttcaaaataccaaagtacatattttttattatcatataattcttttctcatgtaaatgtaaggaaaaacacatagaagatgaaagagaaaaaaacacgaacgagaaaaataatattcttttggatattattaaaacttaaaaatagatttttctgaatgatgtaaaaattgtaaaaaatatacatttatacctgaaatcgggagatgagatcactacagggagagacgttgtaacgatttttgtagaaaatgtggcgagcctcttcaacttgagctttctcttcatgagtccctgccttttcgtcaaactcaaatatttgtcttcccagaaaattgttagtactgtacaaataaggatcttcaccaccacttccaaatttgattttccacattattattacgtttaactacttatatatataatagtacaatctatataacatgtaggtattttgaagaggaaaattaaggagagagagattgtctgaaaataaactttggaggttactccttatataaatgtacgttgagaggatcacacttctattaaattagttctatagtactggtccttcactgcctcttctttgttaaagatcttttatctctctcaaaaaaaataaataaataaataaataaaacaaaatgtacgttgaaaggatcacacttctattaaattagttctataattatataccggtatcatgtattattatctaggataaccttatttatattattattatttaggtacgcttggtaatatatcagtttttattaaaagtaaaagtatttttttaaaaaaattatataaaattgtttctactttttaatttttcaattgagaattaaacttttaaaaaattaaaaaaaaaattactttccaaaattgtttacagttttttttgtttaattaatattttagattccaattctaacctggactttaagacatgaacttcggtcccagatccggaccacagtccctacctcatacccggatctagatcagacttaaataaaatcaaaaaataaaaatacaaataaaaattataaagcacattttttatttttaatttttaaaattaacaaataaaaataattagaagatatatttttatttttaaaaaatataaattttactttcgtttataattaaaaaattaaaaaacaaaaatattattaaaggtctttttattgattaaccatattttattatttttttattatataataattaggtttcaccaactaactcatcaatatatgtgtaagaggccaattaaagttccacaacttccaacacagaaaaggtaatgcatatctta

SEQ ID NO: 88735 - DNA, 957 bp, Cannabis sativa
  modified_base (636)..(639): a, c, t, g, unknown or other
aaaagaaattcaaggccgaggaggaaggtaccaagaaatttttaatttctcaatattttgatttaaaatttcttgatggtaaacctcttttacctcaaattcatgaattgcaagtaattgttaacaaattaaaagtgctcaatattgaacttcccaacgcatttcatgttgatgcaaaaattgtcaccatcttggaagaattatatgtagagaatccttcataaaaatgaggattactctttggaagaaatctaaaaacatattcaaattgaagaggaatcgatttgtagggataaacttgtggaggggtctaatgaagagacttccaaagcaaatgcaacttctaaagatccttataagaataagggtaagaccaaaaagagtaataacttgggtctaaagtctaatccaaaccaattcaaaggtggaaaaggttcatgttttatgtgtgataaacttagacactatgctgaggattgtaagcatagaaaatactttaagggacacaaagtgaatgctatcgaggaggatatcattgctactcttagtgaggtaaatttcgtgcaagggaaagtgaagagatggtggtatgatacatgtgccaccattcatgtcacatatgacaaatcattgttnnnnacctttgaagagtcaaagggtaaccatgagatctaaatgggcaatgaggtcgaatctaaggtactaggccaaggtaccattgatttatttttgacctctgataagaaagtcacattagcgaatgtgctttatgtgcccgacatgaataaaaactttattagtggtgacttacttagaaaactcggtgttaaggccatttattagtccggtaagctcatagtgttgggttgtctgccctaaataaaactcatttcaatgtaatcagatttactgattaataaaagatcagaaattgctttatgttgcatggttcacatg

SEQ ID NO: 88736 - DNA, 829 bp, Cannabis sativa
cctggaaagttcgactcatggaaacctttctcttcagagttccatgtacaattctcctctcgccaacttctgttgcatctaggagacctggtcgaagtcaagcaaagaccaggaaagctactctgagcctacattggcagattcatgacggaggcgactaaggtttcacgggtaacggaagatggaaagttttctacgatactagggggcattgaagtcctcggtgagctctggagagacataagaaagaacagtccggtagattcaaggagcgattttcttgaatgtgttgaaggcttcatcaaacttgaagaggttattcagcgagcagacaatagacaagggaatgggaagaagggaaagttcaccagaaaaacctaacaagctccctaggagaatcaagccaagtacactgcatttaccatcttgattgaggatatataaagtgtttacatggccactcagtcactagccccgcacaagaagcccgcacccatgaaaaacgatgtcagcaagagagacatgacttagttttctcgatttcatggagactacggccacgataccaatgaacgcaataagttgaagcgggaaattgaattcctgataaggaaaaataatctacatgtacagaagtatgtcaaggccgataacattcagagaggtgataataaccaggacttgctacctccaccagtggatggacatctacaggtcatcattagaggcccgcccatagttggagatttgggcaaagctcgggagaggtatgcccgaacagcacaacacgagcaagaagaagtgatcttggccgtaaaagaaaggaagc

SEQ ID NO: 88737 - DNA, 683 bp, Cannabis sativa
atatataaaaaggtttagaacgtctctcttaagaatatatgtaaatttaccttttaaaaatatctaataaatctatttgtgaagatatacttataaaaaacgcacataataaattttaaaattttgaaagtattttataaagaatttttttttttagtgtataaagaaaagaatatgttaaagatgatttactcattatttataccaaactatacgaatttatttacgttttctttgttttacaattctgtaaatctttatttacattaatacaattttattgattttttagattcacttttacgtcagtattttctgtttttggcttcctctgcgacttcggctatcagtacaacttagttgttttgatggcttcgacgaattagtgtgggtgttggctctttctttgaaggttatcagttgatcgttttttagattcgaccttggttgacaacagtatcattggcgttcagcttaggagtcttcatccaatttagctaaaattttacttttacttatacctagaagtatataataagtataaattttatcttatttttagtttttggataattattatatgaagaatttattgatatacgtagtaccaatcaatctatttaagccttcttcaacggtgtagtcccatacctacacagtcttaaaatcatcccacttgacct

SEQ ID NO: 88738 - DNA, 535 bp, Cannabis sativa
ttgtgatccacgtggaattattccatttagagaaaacaaataacgtttaccaaagtaaaaagtgaggctgtaatattcttgatgaaaagaaatatatttggaagcaccaggacttatctcttcaataattttatatctaccatctatgacatctgtaatctgaatataatactcagacttattatcaattatcatatgtttcttctttcccatcttgatttaaataaatttaatattctaataataacgaataattattaactataatcaaaactatatatttattatgatgaatatgaagtagtatagtatttatactaaacaatctagctacgtaatttcaaaataataaataatgtatattttttaagattcctattgttattatgattttatatactttaatttttgaaataaaaatcgtaactaactctttgaaatttaaaatatattaaaatgatattattttttttttatctttttttaataaataaataaaaatgatatattaatttgctatattagtgtcaaagaa

SEQ ID NO: 88739 - DNA, 762 bp, Cannabis sativa
tattaattatgataattaataaattcgttagatttcatgactaatcatgttgatgtttgaataaatgatttcagttcacatcctctcttatttagattactggcaatttcaagtgattttcatagattacttaattaataatgatacttatttctccttttataagtaatactttaatatttatattattttattaattaactccttaatcttaaattttaataatgtgttataagtagtttcaccaaaagaaatgattattttaatatacttcaaatatatttaatattccaactcaattagagagttccacactaatccgctgtgtttgatcatgttcttcttaattcataatttaaaatttattacttaataaatctcattatacaagtatctctaagttttaacaattagacaattattgtattgcatatatatctcatactatgaatacaattttaactgtttattcaatattttacagtactacaaataactctttttatgtcatttttttttatgtccaacaaaaaaagtattggacattaaaacaatttgggaagatttctagtccaacattgatggactagaaaaataggtgggataaaaattaggaattatttcacaaatacacaaaaacaacaaaaaaaattaccaaaatacgattttatagaattcgaaatatttttacgatttttttgattttatttagagaaaatacggtctttttatgttgtaatcttgttagtttgttgttaattt

SEQ ID NO: 88740 - DNA, 742 bp, Cannabis sativa
ttttacaggtacctataaaaccggttacccggttttccccaaaaaacccaccaaaattcaaatcttcaccaaaacgattccaaactcaaccaaactttccagacctgcatattatacctcaataaaccaattcctagcaacaaaacaactacccaagttcagaattgaaaaacaccattaaagctccaagtttgatatctaaaactcaaaacttggttaaatccactaacaaccagtataacaagcttaaatcaacataatctaacataaataaacctctgaaaacaatatcaaacaacaacaacaacaacagaacacaaacacccaaaatcatgcaatttcactaacttgaaattcaagaaactaaaaggtaaagtgttgggagcttacctagagcttgaaataacttagaacttgttgtaatttgtttgaaattgagaaagaaaccagaaccctagctgcttctatggggttcgaacaagagagaggatggagagacaaaatatgattttccttctttttttgatattttgtgaaaatgaaataataaaaggagtttttatttaattaaaaccattcctaatatcagatttaaataactacattaaaattacaaaaggacaaaacctaattgagcaaaaagaccattttgcccttccctcactaaaaatcataaaaggtcacttaggggtattttagaaaattctaaaatcccgactattcccgacgttcccaatgtcta

SEQ ID NO: 88741 - DNA, 587 bp, Cannabis sativa
  modified_base (388)..(398): a, c, t, g, unknown or other
ttctcgctccttctctcccaaaatttcttttcttatataaatatgggctgaataaataaataaatattgggaaattctataaataaatattcttcatcaaaaataaataaataaataaatattaagaaattctataatgcacctactctatttaaaagggatatacttatacatctctatctattttagtgtccaaaataattttttagtcaaattttttcttatagtcatataaattatacttatttaagacctcttctaaaattttaagaaatttgaaaaagtttaacacgctaaaaattgtgttcaaacagtgtgttgcacgcgtgactattttattttataggcgtgtaaaacagattttttgaacattattttctatattgtnnnnnnnnnnnaatttcttaaaattttattggatatcttaaatagctataacgtaatttttttttagatgccgaaacaaatagagggtgcatcaatacatctattttaaggaggtgcattataaaatcacccataaatatatatgggctgaataattttgaaaaatatattttttttgaattatttcacaaatacacaaa

SEQ ID NO: 88742 - DNA, 536 bp, Cannabis sativa
atttattattgtataatagagtactacttatactgctaaacgtattacaactatcaaaacgtacatacccaaaaaaatttgtgggaatttatttttatgacatagcaaaagtttgagtgatgataccaattttcaaatgggtcatgtaagaaaaacaacttcaattgggcccagatcaggcagatccatggtgcattgatgcctatagatagagtcattattgctccactaagaaagaggttggaatcccttatttctagaaaaccaactattgttgagttacaagcatctttggcgacaaactgcatgatgttgaaagacttacttattgagctcacacaagttaagcaggttttgacgaaattatcttctcacctggccggtaagtttgcatgctagtggttttcctctgcacccactgattgaagaacctccaataccacctttcacaattttggcgaggtaagtgtcacctctatctctagtggtgaaaattttgaagaatccattccaccaagtacatatgagggtaataa

SEQ ID NO: 88743 - DNA, 1147 bp, Cannabis sativa
ttctattgataacaactcagattataattgaaatggattttatttagggcttaaaatcccaacaatatctggatgatacggctcaagctcctcgttagagtcttatttagattgtctctctagttcccccacttgatatctcctaaacttgtcctctagcttgttcatccgcaattggatgggatcctcatgctttggaccgagctgttggtgaaggtcaggtttcttctgattcaagtgctctcgtagattcagttgggagtagttgctgatagacctcgtcttactcacagattgcgtcctactcatagactttatcctacttatagacttcatcttagagtgactcgcggatttactggttcccatactttctcgatcattagctcattgagtactttctcctctttaagttgatcgactgtgtgtccttgactgcctcgaggatacacttgtttcttcacgctctgttctttccccctgagtgcggttcgttgtatttctcccattagggtctatacgagtcctcgctctatgggtttgggaagaatgctggtgattcctcgcaggtgatattcggtctccaggctgattctcaagattttccacattttacatgaggaacttctcgttcattagtttctggttgcctcccactctcattttcgtgagagggttctggctggtcattttgattttcagtgggtatctcattttccctgggttgttcttcccagacattttcctatctcctggttcgtgagccacgaggtctgtctcgtggtcttctcactccaagttcaggttgattttgagcattcgtcccctgtgtcgtcctgaccacagctgcctcacgttctaattcaatgtttcgccgttgcgcctcttctagacggcgtcttaagtggcagttttccattttataggtaccttctcccagaggctgggtctcttcacgattgggctcttcatctcttatctcagggttcgggcaactcccacgctgagttctcctcgagtgtgttgtctgtgcactaggaccaatgtcgggttgggttctccgtgaacgtgtggtcgagcactggggcctcccttaggttgactcctcctagagcaggtggtgtgtctggattgtgggttggtagac

SEQ ID NO: 88744 - DNA, 533 bp, Cannabis sativa
agatgttagaaaataaagtatcatatcacctctttatatattattgataactctatgttagaaattaaatattagttttgttcttaagtatttttagtttattttagtgacttttatttggtattatttagttttacataaatataaattttagtgtttatagattaattttaattaattttgtaatattttattaatttaatttagttttttattttataagtgttaatttcaatgttgtgtatttttatggacttaattatgattttcattggacttttgtacaaaaaaaaaatgagaattgggctcactaaaagaaataaaaaaacaaagaatgaataaaaaaaattgggccacctgacattgcaagggtattacactattactcatatgatatctattttatatcaaatgtgtttatataataaaattcttggtttatgagaaactattgagtgacttttttttaaaaaaaataacaaattattagatgttgtcacgtaaagggtcaggtagttagttaaacctaaata

SEQ ID NO: 88745 - DNA, 737 bp, Cannabis sativa
aggatactctaatctggcactttgaaacaaatggtgcgtacacagtaaagacgggttatacattggccactaatttagaagaatagcaacctgttgtctcgggcattcaagttcaaagctggtggaataaattctggtctttctctcttccatctaaagtgcgaattttcttgtggcgggctctaaatgattgtcttcccacagctgcaacacttcatcatcgacagattgctgattctcctatatgtccaatctgtaaatcagctgctgagaccactattcatgcgttgtttttctgcaagagaccaaaaaagatatggccaacttcatccttttctctttcccatgtgattactgaacatatgtcccttacataaattctgctttatgcttcggattcgtggacagatcttcagatggaacaattcatcacaatcctttggctactttggaatgagagaaataaggaaaagcatgctaataaaacaaatccgtatgacatgcttacttactttgctctatcttatttggaagattatcaagcagctcagaagcaatgttgtagctctgttctctctactgcagcttctcttgacagaatgcaacaaaaaactggagcctcttggctcaatcctcccacatgttggcttaaattaaatactgatgctgccatcaataaggggactcgtgttataggttgtggagctatccttcgcaactcagatggagacattgtt

SEQ ID NO: 88746 - DNA, 1088 bp, Cannabis sativa
  modified_base (471)..(472): a, c, t, g, unknown or other
ataattaaaattttattatacttataactttaatttaaaattattacacgtaattatgtatttttttatttaaatttttaaaatgtaaaaaaataaaatagattgaatgtactgttttttaaaaaattagctaaactctttcattttttttaagagtgatttactcaaaaaaccaaacgagagtgaaaagcaaagtcaagctcctccaaaaaacgaagcaacttatcaaacttgaatagaaaaactcatacataattcttctagtaataaaaaaataatttaatgtcaaataaaaataattaattatttaaaaaattattatacaataagagaattcttatttgtgtaaaaagaagtctaatatttgtaaaaaataaaataaagttttattgtaaatattataattaaatgacataactgttaaaataattatagaaggaatttatataaaattatttataaatattaatnnctaaaagaggtcttgttaaatattcaattaattattttaagataattaattgattctaaaaaaggaagttttacatattggtaacctgtcattataggtaaaaaagaaatgtaaccatggtggttacaataaaaatataatcattaagtagtcaccaataatagtcatttactcatgtatattaagtagctaatttaagcttagaaatttaaatttctcttttattattcgttatcagatcaaaatctaatgacttaatattttttaaaattaatatttataattaaatttatttagtactcatcaataggtaatacccattaagaagtgttccatatgttccacatatatatatataaagaaaaagaaccaggggataacattacaatgtaaaatcactgtaaataattttttctattttttctttgattcttttaattttattattttaagttttattttatttttttcttaatatttcattaaaaaagatttaaattaatcctatcaagttctatttttaatccattttatttattgatatttataaatataatttctattttataatattttattaagcaaaaacttgaaatagccgtacaaattctatttt

SEQ ID NO: 88747 - DNA, 509 bp, Cannabis sativa
  modified_base (452)..(467): a, c, t, g, unknown or other
aaatcctattttgtgaaaattgggttttacaaaacttaaactcttttgattcggtggataaatgtggaaaatgtatgaacctcaatttttaactgaagcaaaaataattggcctcacctatccaccgaatcaaaatgtaaaagataatttttaaaattctcatttttttcctcaattcttcttttagcgtcgcggtatgagctgacgctaattggtagttttttgcttcagttatacactgaagcataaaatctctgccaattttttgcctcggttaaccattttggtgagatgcgttgaccgacgcaaatagtgttttctgtagtagtgtaaaaattgttctccctttgcttcaaaaaataggactatatatcggcacacatagggtaaagggcatactctatacccacatagagttttgtacaccatactgttggatatttattttaccnnnnnnnnnnnnnnnntcacaagtatgttgtttaaacacactaaatatgaactttcta

SEQ ID NO: 88748 - DNA, 3008 bp, Cannabis sativa
acttaaacaaaacatagactccctctaatgattttgctgcaagcttgatgtactcctatttgctaaatgaatctccttaagacacagatttgaactctcttcaaattagctgatgaatgcttgcatcctcccgatgaacgacttgtagaaatcttctcccaaagatagtggtgcttgcttcctctagaagcaagacttgtagaaatcttctcccgaagatagcgctgcttacttcctcttgaaggaagtcttttagaaatcttctcccaaagataccggtgcttgcttcctcctgaaacaagactttgatgaactttctcccaaaggttgttctttatgttcttcacttcggaatttaattcacataaaagtaatctcaaagacatacaaactcaccaagaaatagcagaacaacaatcctttacaaaagaaacactctccctaaaaatataggaaattaagaagctgaagagttcaaccttttgctgctggtttaggtcatatttatagtgataaatgatccctaaaaccgagctctgaaggtctgaacacaaagagaaaatattaattagcttccttacaaaaactcattaaatgacaaaattttatctaaacaaatacagaaagtgagcagatgaaatactgatctgtctagtcagcattatgaatctagactccatcaaagccaagttcatttccacaaaattttccttggacatcacataacctagttggagagatttatcagaaaaaaaaaatcaattacaaatgaataccatatatagatatagtatttattacataataaaatattctattctttctatattgacccacaacctgagtagcaatatattctcaataaatacacaataagtcacattttacaagaaggaaacaatcaaataataaatgaaaaatattcccaaaaagaaaagtcagaatatgttcaaacggattgttaatccgttcaaacatattcattgtacctggacagattttcagaaaagttttcttacataaataagggagcaaaatatacattaaaggcacaactctacatgttttcttgactagaaaatcatataagaattaatgaaataaatattaagactttccttaaatatataaaataaatatcaaataatctaaataaaagaaaattgcatatttatttaccaataaagccacaatttgatttgaaagacacttcacactaagaaaagagaaagtattttaaaaaaatattgaatgcaataaacaactaatttcaaaaatacaaaaaataattaattttgttgtctttaccaaatatgccaactaagactttacaatctctccctttggcaattcagtagacaaaattaattacaaaaccctacaacaaacatgttagtgatatataaaaaaaatactccccctgaatacaagcactaacacgaataaaacataaaagttttgaaactaaaaccataaaactccccctcaaaaaaagagggcacagaaacaacaaaccgacaagggttttgtcaaaacttctcccccttcgtgtctatcaaattagccaaaggactaagaaaaatcttctccccctcttagaaccacaagctgattgagcaatgacaaaaactgtgagagtaacaggaaaaacaccatcatgtggaaagaaaaagaaccaacacaagtacaactcatcaccattgttcctgaataaacttagagaagaaacgaaaaaatttgtgttctcagtaaaaacaaaaaaaatagtaaggtaagagaaacatattagaatattaaacaaacaaactccaattgatatgcaaagtaaacacgcagagtaaaaaaaaaataaagacaataggaccaagacagataaaatatcagtgttctctgtaaaaacaaaaaacatcaatgaaagatgaaccttttgtggcccgagagggaaccaccacttcagttggaagtgcaagatcgacaaaaactgctgagatagcaagaaacaccatcaggtgtatagaagagaaagaataaacctttttcggagctttgaatttttctttgatcgacttggatggaagggcgatttgagaagacctccaacagcaacagcaacctttgaaaaagatgaccccaagtgttgcttttgccctagccatcaccaaaggttcaaacaaaaaacaagtaatttttttaactcgagatggcaccaccactttagatgatggtgcatcaaatccaagatcaaaggggatatcatgaaacaccatggggtgtttattggggagagagagagagagagagaaacttatttttcaagtcttgatcttggtggtgtgaccaagaaaggccatcggagctgttgcaggtggcagtaatgtcaaaattaaagccaaaagagatggtggtgttcggacttgagatgcagcatgcaccttggacgatgatcatcttcgagtcttcacaatttttcttgtagcaaaaaaaaactgaaactcaaacacactcacacaagactttgtgaaggaaacacaatgaagaagaagaacttgtgtgggcaaaaagagagtaggtgagaaatatttataagacaagacatttcatttttgaaataaaaccaccattaagtagtttcctttttctatttgaaccaaaaaaaaaaaaaaagaaaccaaagccaataccaacaccaccatacacgatcagccaagaagttacccatttttttttaaaaaaaatgatttgtaactaaaaaaaatgaaacaagattttttatgattattttttttaatcgaataagagcaataaaaatccacaagattagggtccaacatctcctacacgatcagcccaaggaaacttccctctttaaaagaaagttaaaaggaaacaaacataaccagataatgacatgtatcaaatattccataaaaaataagttgacaaaaatatatataccttgatgactaataacatattaaaccaagtaaataaaatgaaaattttcacac

SEQ ID NO: 88749 - DNA, 627 bp, Cannabis sativa
caaatgagacatccttcttgagggctctatgacacttctagaggactcgaaaacatcaaccaaccatttggtgtggggactcacacatccaagtgttcccaatatagggttcatgagctcgcgtgagctttttcactctggaaacctaaatccgtcaagaaaaccaacaaagacttgactcatttgggcatgaaacgacttaaatttatgcataaagtcaacatgacattaaaccctcaaggaacaaggcatatgcgcccattgccatatataaatggcagtactcttcaattttggagagcattgccacaagaaaatggcagtgctcttcaattttaaagagcactgccacaagggaatgacagtggttgctacatacaaatcataaagggaaaattgttcaaatgtgttccttcaacaacaaagagtgcaaaacaagtaagagaaaccatttctcaccaaggaccaaccctaaccgaccactgccatctatgtggcacaatgaatggcagtggtcggccatgaagagaggaagtgagattttttgccaacaatacatttttaccaatgatatgtcaaaactaagtgaaagaagccaccaagtggtatggaaatcacttggccaac

SEQ ID NO: 88750 - DNA, 672 bp, Cannabis sativa
ttagataacttccttgatggttatgactataacttttaaaggctattgtaccacctcaaacatattcttgtttgttgggagtttgaaaattttcaaagggctttaatgagccttatttcctcatttcaaggtacagataatatcaactccaactatatcaacctaccttatatgagtaaatcctaatctcattataagagccatctaaaccaagtcaccagaatcaataatatacattcatgtttcgttgcagtatggtgaatttcatgacattgttccacttccacagaagtgaagtacttaatcagtaaaaatcttacacttaatcagtttcccaattcttcaaaattcaaattcaaaatcactttatcaatatgcacaaaaacaaaacaaaacaaagaagaagcaaagattaataccaggcgagccactatattcccagctgtgacctttccgggtccataaagaactccgggataaacgactatgattgggaacccctctaaggcagctcgtaatgcaatcttatcagcagcagctttggatttctcatactcagtgcaaaaaatcttttctggatgaacctgatatcgtcacagttcttgataagagaaagcataactaaataaataaaaacactatatatgcatgactgaagtaactgtacttgat

SEQ ID NO: 88751 - DNA, 628 bp, Cannabis sativa
attttaccactagctttagaaatagttaagttataagtaaaggggcaatatagtcattttgtaaagtgaaggttgaggtggctgcctagcttagtgacatttggaaagttagtttaagcaaaggattaactaaaaatccttttctagttgggaaaattaaaagaaatcaaggaaaaagaggaaaattagagaaaaacctaaaaatagagaactctctctctttctctctttcggctgaagcaaaccagaggggttcaccatcaaagcttggtatttttctagattgaagctaaggaattgagcattcttgaggctaaggtaaccctagaaacttttgttatggaattcttcaagtttttacttggtttgagtggtggttttaggttttaagggctgttagggttagagatgtttagggttcgaatttttggggttcaattgagttgaatttagttcctagcagctgtttttggtgtttggtttaggtttcgtgcaagtttgagctttgagttcaaagctttgatctctaatggcataatttgattcattgagtttttctatgaaatactagctggaaaatattgtctatgcattgtttaggtactctggaaggtttggtggaatttgg

SEQ ID NO: 88752 - DNA, 909 bp, Cannabis sativa
cttgatgataaatattctgtctctgtcatgaatattttggtttattatacagatttatatattgttcggattaatttatacaatatataatttgatgggtttgatactatttatgtggttgatattaattttgtttctttcgattacgaggatacgtataagtgtatatcgtttttttttatcttatgttttacttactttctaaagtcaaaccatgattttatgatgtggcttcagaatttgatttgagtatataaatcgtatatatatgcttctgattacaatcaatcggaacatatatacatacatataagataaaaataatttttcacttgtggtttcggtttcagtgcatattctgattacatatatatatcagtttctttattttactcgtggtgatacaatacgcactcttcgagtcagtacctaacttcaaattgcctttcagctttgaattacttagcataaaaattgttattggttacagtcatagatttataccatcccattcaacaaattgtttagcaagagaaaaacaaccgaaattacaacagaaaaatggaaatgtgtgaggctttattcagctcctctccatcctaacaaactctttcaaccaattgggtcttacgcgcttcctctgtcaacgcgctctttctccttcagttgagttttctactggagccattgttcccgtgctggtatcttccagtaccccttcttctcctgggctaaagtcttgggctgcctcttgtattcctttgatagcctcttttcccacaacttccaagtctaatgttattgggcccccatcttgggccgagtccacttctctaacaatacccgcctcctcaaaaataaccttgtcctcaaggttgtgcaacacataaatattgcaaaacgaatcga

SEQ ID NO: 88753 - DNA, 874 bp, Cannabis sativa
tattacatactataaactgtgttacaatggttaaatttgatttttgatcatttttatatttttcataaatttatttatttaatacttaaaataattatgaaaagtagttaaatgatgctaaaacaataaaatatattttttgtaatgttatttattatctaaatacgaaacaaaaagagttttctaatttattggctgctgtaggtatttattataattatttgtgactaattaactatttaattgggtttcaaatagaataaatagtaaaaattgtgttcagtgtttggagaaccttcaatataatggtaaaatataattatagtgtctggaattaattggagactatgttgtggtattttgctatttttggttagttatttagaattttatacatttttaacacataaatttatacatcatcatgtgtagtattttttgtacatatttctatgtagattggatatgttttttgatctgtataaatgattaagaaatatgatagcttttgattttggtaatgaattacataattgtatattttgttaataaatagtattttagtaaaatttcacataaaaagtgtttgtatgagttcatgttttactttgaaaatgttcgtttgagtacatcatatgtgtttgtgtgaatcaaaatgataaattattatgtatggtgtcgcatgcaaatgtaattggcttatgtgttacgtatttttacgtagggttttgtgtgagtacagagattcatacttgaatgtattttgagggtaatgttgtgttaatgaatgtttaggatcttgttctcaacaaagaaattcattgaggtgcttgaagtagcaaaaaggtgttcttaacaactaaggtaagaagag

SEQ ID NO: 88754 - DNA, 709 bp, Cannabis sativa
atagttaaaagaataagggggactgagacatgatcgtgcatatactgattatgacatgttctcagccactcatgttattaagctctcaaaacagaagttttaagaatcatcttctttgaaaaactttaacgagtgaatcaaataactcaatgagcacaaacacgagttcatgtatactcaggctgatctattaatgattatcgctgtgatataaataactttttcttggtaaacgacacgttaatgaaagatgtttattacatatcgatctagtcatgcataatcgaattatacacaacacatttactacatatctatctacatatgtgattcgaatcaaaatcacacacactagaaatatagtgtataataaaccatacttaacagttccataaaagattcctattagttttgttgactgcaaatttagccaaccgacttcaaatttgactaggattgtatcttatggctcccacgtgtgggatgataataaatgtaaagagtgttagtactatttttaagttatttttagtgtatttttaaagagaaatttgacatttaatgctaaactattacacatggttttaaaatattcccctccattatacattttttaactatacttttaattcttttttaaccccaaaatactcttctagcaaaaccaaaaaccctcacctctctccccccccccctctccctctctctc

SEQ ID NO: 88755 - DNA, 648 bp, Cannabis sativa
attttatgtgacaaaaataagtgatttagattagtaatattggtgaagttagagtgtagtttttgtacttcttattttaattattgatattgatatttttgtgtttcattttcatatctcatttgttaaattgctttttattttctaatttttcttccaaatttaatagtatcttttatataagtttagtcatgctttttattatgtaagttagactattaatatttggtatatttattatattgtatatcgtttactacattctgccaataatgacattttatcaatttatgatatataatatgatatgttgtcaaattacaaatgagattcaatttatgcaatattaattaatttgtacttttagtgtgtatatctcctcgttgtaattaatagtatagaattgcaactgtgtatgaattaagttcaatattagattataatttacataactacatttctaccttattcatgagctctttatctgatcaattttctcatctcatcattttaattatttcttattttcttatatcacattaatttcatttttactaaattaatctttagtggtgatttgtcttcttgtggataacaaaatctgtatactactataatcgcagagtaaataattgggcgatatcaata

SEQ ID NO: 88756 - DNA, 913 bp, Cannabis sativa
atttagtgacacttcaggatgagtcactaaacccttttagaatcactcaccgcgcgtcactatagggttttagattcataccttgtcagactatgaaagtaacagccacccttaaggcatgtcactatatctatatttttttatttaattttttatatatatttttactatttgtttataattattcttgttatatttaactttttaggctataatattaaataatatattctttaataaataaatagcaaaatgttatacaaaatattacaaaaataattaatcaaagtaaatatataatattaagcagtctttctatatatataaattataccatatacacaatcttactatacatagattattcaaacaaaactaattttagaacacgtaaatattagctaaaaaatcttacaatactgttatgaacatatttgaatctaaaaaataactaaaataattacaatcagttacaaaaaaaaaaaaaatcacaatcaatttctttgatcgagactgacgaaccccaatcctccattgacaatgaaccaccatgaattgaacctaaaaaattacagaccaattttaaaacaaataaaaaaaattcacaatcagtttctttcaatgaccatgacgaaccccaatcctccatcgataatgaaccaccatgaaccccaaatctcggtcgagttctaacagccgagaatcttgaagctctgatgcttcattgtccgtgaacaaccctaaaacttgatgctttgaagccccatcttcaacgaaccgccttgaaactcgaagcttcatcgacacaaaccttcgtcgacctgaggaaatagagataaagagatcttcacagggacgaagaacacaaactcgaagcttcatcgactcaaagcttcatcgacacaaaccttcg

SEQ ID NO: 88757 - DNA, 681 bp, Cannabis sativa
cctaaacaaaaatgaaaaagatcatatataatatgtatctccttttagccttgatcagaaacaaattaagagaaggaaaaacaccaaagagaagaagaagaagaagaagaaaatgtattcatgtagaagaatattagagtaatcaagagaaagtgattaagagctaattatcaaactttaaaacaagtactaactaatcgatcaaaacccacaagttgaataatctaacacccaaataatcatatcaatataatattaaaaatttaaaagaagtaaaggaagaaatattaacctgcaagaaattgagatccaaactagactcggttgggtttgcaataatttatataataaaatatatacaacaatatacacatggatatttatatatatatagataaaatagcagagaatggtattgtatgaaatcagctcaatgagcctttggtatttacttttcattatatagccactagggcaacaaagaatggtacaatctagaatatgacacctcaccaagggagagaaaatacaaagaatatactctgacagaataacagaaatgagagagaaaaatgattggcaatgattaattaatcatgtgccaaaatagtacagtgaaaagatacaacggtaacaaatgatttggtaactagtgactggtaaccatttcattttctaaca

SEQ ID NO: 88758 - DNA, 910 bp, Cannabis sativa
ttaggagttaggtggatataatatgttatcctttcttgattgatgtgatccctcataaagtagccgtcactagccttattaatcacaacataatagctgcaaaagaggggtcacgtcgtcaaatgtgttgcttatggcagttccaatacgttttctcccatgcgacattaaatgcgaggtgactgttcaaatagagtccagtacctcccggagatgccttagcatggctctggtctcctggagtacgtggatcctcctcacatcttctctgggagttatcctctaatcgatactcttctgttgccaaagacttagttgatttctttaggagctgggcctctcagctccacgtgtcatctttatacaggtccacgtattttgggaaaaattaagggaaacatttacccccaagccttgtttggtgtagagtaaacgaggcttgtttggtgcctccgggtgactcatcgatttcctggcacgtgctttaggcacgtgggctgcatttatgatagtcatcattaaaatttattgcctttcgcaggcaacgattcgtttcccatccattaatgatccagagcatttaatcggtgtcagaaaagtactcaagcatttttaaccgccctgatgagcatttatcccaaccgttggatctgcagaatgcgaatcgattgtgattcccaccgtacgatgacgcctgatcacacctgctttgcacccgttttggcctataaaagcaagcctttctccttcatttggttactttcaccacttcaccatttctccacaagaacacctttgagaaaaaatttcaaaaacaatagatttcctactgctattcctccatcgttgccaatccacattttaccgtcgatcaacaccaactcccagttctcaaccttcatgtaagttt

SEQ ID NO: 88759 - DNA, 835 bp, Cannabis sativa
tgatatgtccaccatgtttatagtctttcccccaagaacttgttatttccaaggcttaattgttcttccaagattttaaacacttctactacttcttttgctgccttttctcccttctctccaccaccggtgcttgtaaagaatgaaccaaaagctggagcctgccaatgccattagctattgaaatcaaatgaataataaatgaaaccatacgatggcctcaggagtttggattctcttttcctattaaggtgacacctaattagtgattagcactttccaataatactttttaaatttagttttactaatatgatatgagacctcatgttagacacatgtctcttcgacttataagagttgtgcttttgatatggatttttataaatgaaatgaaaccctaattgattttcttaaatattttgttatattaccactggacatgaattcatcagaaatttctctaaaactggtcaatgaggactgatccttttactcttgaaaataaaagaatttttttgtattttgtttgttaaaataataataataataattaccttttcaacagcaaattgcatgcaaaatcgtgccaaagctctttcataagggtctttaggcaagagaggagtttgaggccaagtttcttcgatgtactcaagaataaccagagactcacaaatgggtttgccaccatgaacaagcacagggatcttcttgtgaactggattgtattgaagaagcaattcactcttgtttgaaatatcttcttctatgtattcatactcaactcccttcaggttcagtgcccatatcactctttgactatatgggcttg

SEQ ID NO: 88760 - DNA, 768 bp, Cannabis sativa
aagaacacaatgtttcctctctcaaagctctcataatgaaatctctgagtgttttctcttagatctctctctaaagccattctttcggtcctttttacagtgatgctagatcactatttatagggataaatgtatgagggaaggtttccctttttcttacaatatctataattggtaagaacatatattacatatttagaatacatgaaatgggttattgagacagcttgtcgcatccctttgattcaatcccacgattgtagggattgcctttgtgcttgggcttcacgatatcaactctgaagtagttaagtcttgatacacaaatcagagagttaacttcactctttgatcagatcatctgccctttgctctgctcagtcaagcagactttgtgcgtgcagatgtgttgcttgaagtctgttcggaacatttctcaagccaagtgtaaaaaacgatagacacgtgtcactagtacatgttgccacgtcatagtgcaaaaaatgggataacactctctaactaaaatctcccactgcaatcctatcaagaagaagcctcacggagccaggaataagtcaagactgaaagagatacagaaaaccacttttccctatcctagcatcccagacgcagaaggcatgttgtctctcctagaccgggagtggtctaagtatggaagcctacccaactgatacccggatgggtgctcgaagggcctatttgttgggattttatgccctaaataaaacccatttcaatctaatc

SEQ ID NO: 88761 - DNA, 526 bp, Cannabis sativa
aaaaattggtttataaaaatttaaaaaatagaaaaaaaaataattaaagtcgcagctcatcgacaagccaaagcagcaccttcacacacaataagaagaggtctgacgacttcgcgcacaccggagcggggcaccgcggcgaggacgactagggggtttgatttctccgtctctcctctgcaaacgtcgacaccatcaacaggagagagcttcaagcttagtcaacccagatctgatttctgggtgttccccctttttggggggtttgatttctggaaaaaaaaacgaacaagaagaggaagaagaagagcgcacgattggggttggacagtaggggatggacggttggggttcgatttttggggggtttgctttttggaaaaaaaaaacgcagaagaaagatgaataagaaaaataaagaaaaaaaagaagaagaagaaaaaaaattaattatttttttaattatttttttctttctattttttaaatattttaaactatttttttaatatataaattattaaaa

SEQ ID NO: 88762 - DNA, 719 bp, Cannabis sativa
  modified_base (70)..(70): a, c, t, g, unknown or other
  modified_base (145)..(147): a, c, t, g, unknown or other
aataagttaaggaatttacttggtgaattctagatctacttattagaagttcggttatataggcccatgntcccctcactagttgagataatagtgctggcagttaattaattttaattcattaattataattctaaaattagannntgtcttatttatgaattttaactaagcagaggcttaattgtgaagaaaagaagttttacagttaatttgttaattaagagactttgcatggtctaattaataaataatataaatgaaaatttttatttgataattaattataattattagggactgatgcgtgcccagtgccggaaggtcaaggaagttggtgacctaatgacaggggagccggcgatcgaagccccggtgaacggcgaccgtaactataacggttctaaggtagcgaaattccttgttaggtaagtttcgacccacacgaaaggcataatgatctcggcactatctcggagagaggctcggtgaaatagacatgtatgtgaagatgcagactacctggacctggacagaaagaccctatgaagcttcactgttccctgagattggctttgggcttttaatgtgcagcttaggtggaaggcaaagaatgccttttataaatagttttggcatttataggattgaaattggaaatatggtattattgaaagaagaataatgttgggttttgtgccctaaataaaacccattac

SEQ ID NO: 88763 - DNA, 1245 bp, Cannabis sativa
aaaaaccatgtgagtgcaagtgtgcatgacgaggcttcaacctcgtcgcgtggaagagaaatgataatgataaaaatatttagcgtatattacatggtatacaaactaagtataaactcttagcgtatattacatggcatgcatacgagaaagatcatctcgacaccagaaaatataatcagaattaaagcaatattaatctcgggaagtcatatgacgagcaatagctcgccatcaaagttagctcggctccattcctagcgaggcatccccatgagataaggcttaccatatatctttaaatatgtgttcatctcggctcaataaaagcgggagactcacagctgtgtagatttaaaataaaaactgcatttacttagcataatttgttatcaaatcccatgatttgagggaataattactgtaaaaattacagtcaacttttgtaatttactgcccactatgtaattataaatagtggcagacaagatcaaaaagggagaagaaaaaaatcatacaagagtggccctgaaatacaatcagaaatctgaataagatggactcgtggactatgcagaattttaactgtaaaaccacgtaaaaaattctgtgttcatacttttatttctatagcttttattttttctgtgagaaatcaccactgtgaggttcaaatttagttaacgaaaatctgcgttaatacgttactagaagaacttatctaagtgggcttgaaccactttttctttgctaaggacccactgatcggccttggtgttgacctggattctacgtgtctaatgtcgaaacccggataacatatccattctcatctagggaatgatatttaaatattttaaatgtataataaatttgtaatatataaaaatatgtctacaatccatattctattcaataaaatatagtttaatttgattataagtctgtctggttctacataccactattattcaattccatacatgatatatatttcatgcactttgattgtatgtgatattttatcttcttgttgtttctaatttcttctgaaaatatttgagttgtaataatattcttgattatttaaaattattgaatttactttaaggaatgacgttgaacattattttgatgcaatttagttttcttaaaattcttttgggtattcaaaacccactattcaattgcatcagtaataatcatttcaataattctttagttgtattcatataaatacaatat

SEQ ID NO: 88764 - DNA, 775 bp, Cannabis sativa
gtataacttgagttccaacaattatatttctctcttttgctctaggaacaagtttactgtcaattttaatagctatgatggtcccaatggatgctgctcctcctctgtgaattctcatatggcctccaccaaagttgaataggcaaatcatagccaagtgccactgcaaatttctccaattcagacatgctgaaatctagccaatcacaataatcaaaataatcaatctcacccccttcatattttttctcttcaaaatgattgtaccatcttcctccatggtgcaatattactgtgaacaactcatattccaagtctgccaaaaaattacatcattgaaaaaatcacttcatgacccacacaaacaaaaaaaaacaactcccaaagcatatacactttaccacagtaaaaaatattccacattaactactccactcaatgaattcacatgtgaacacacactaccttccaaaaacaaacagtaccccaccagaatttaatattacacctaactcacaaattaacatatccaaacaaaaataacactaaaataatactcaatataaaagttaacaatcagacatataaaagacacgaaaagccatttcaaaataataatttatcattcaagttccagtttcaacatttaccatatccaggggagtcttccccaggcagccgccggagatgcatgagtttaagccacccttgtcgattttgacgtcctcagcacaaggtggaaagctcagtccacgttcattcgtcttctcaactg

SEQ ID NO: 88765 - DNA, 585 bp, Cannabis sativa
acatcgacactactaagtagaaccttatttttataccagttagtgatttcgttactaaactagtgatgctgataccctacacataacttaattacatactttgtgtcacgacacccataaacatatatagtgacactgtcactactgcgagtgtacatcggcaccaataagtggaaccatactttggtatcggttagtgatttcattacgaaactagtgactccgatactctacacgtattttcattatatagtacgtgtcacgtgaccactaaacatctacagtgatagtgtcgctcgtgcgagtgtaaatggacaccactaagtagaaccccatttcgatatcgctaagtgatctcgtttcaaaactgaagactctgatacactacaactaacttgattacatactttgtgtcacgggaccactaaaaatctacagtgatagtgtcactcctgcgattgtacatcggctccactaagtagaactctatttagatatcggttagtgatttcgttacgaaattggtgactccaataccctatacctaacttgattgcatactttgtgtcacgggacgcctaaaca

SEQ ID NO: 88766 - DNA, 877 bp, Cannabis sativa
aaattttccaatatgctcacgatctcttgaaacatagaaaacacatccaaagacatgaaaatgacttacatttggacgcttacctttccaaattttgtaagatattttggaagtaccttgatgaataaacactcagcttattgtataacaagttctatatatagcctgtgtccacaaacgttttgtcagcttcttacaatttaacgtcactcttgccatctcttgcaaagtttgattcttcctctcaacaactccattttgttaaggagttttaggagcagaaaattcatgagttatacctatagacttatagaaattatcatatacagagttcttaaactccttatcgtgatattcgaattcgaacaactttaccaatgttacatcctttttcaaatcttaatctcaaacaaagtgttttaacagcataaaatgtgtcagatttttctcttaaaaaatctacccaagtaaagcgagagaaatcatcaacacacaaaaaatatattgcttaccatttatactttcaacttgaattggacccataagattcatgtgaagaaattccaatacttttggtgtattgatatctaagatacttttgtgagtgattttcaattgcttaccaagttaacaaggttcacacttaccaacactttctgtacccaattttggtagaccacgaactatacatgtattggacaattttttagattttttaattaatatgcccaagttttacatgccacaaattagtagtgttgttaaaaactaaatgacaagtgaacacagggttagggtataacaattatcattagatcaaaaaccctgcaagatacattgattatcattattaagaacataacaatgatcactatca

SEQ ID NO: 88767 - DNA, 677 bp, Cannabis sativa
  modified_base (26)..(35): a, c, t, g, unknown or other
acaatatttattgtgactaaaattannnnnnnnnnaacttgtatctaaatactatatattttagtcacaaataattttttattgtgattaaaatttacattttattactaaaaatttatgttatatttttttaataatatataaatatatagatatttatctatatagattggattgacgagtgaattttgttatgttgttttgttgttatatgcagtgtgcaatgagcttggatcatgatggtgcaagacaacaaaataaagtgcaaatggagctattaattccttatatggagtttccttaataagttaattatagttgtataatttcatcatgtactttttgtcatgaataataataatggagttcttaccttctttatactaattaaattaattaatattgtattttatcccaagagtattgttattttgacaactcatacgttagcagttttttatattatttattaattaaaatgtgtgaaacacaataataataaaatgcatagcaatagtgacatcttaaagtgctccataatatttcttttatcgcaatatttcactatacactgatgtaactgctttttatttttggtatctagaattctctgcacctaggcccggccctgggcataggcgggctacgcctgtgcctagggcccacctagcccaggg

SEQ ID NO: 88768 - DNA, 1392 bp, Cannabis sativa
cattttagaaagtctgaaaaaacctttaaacttcttcgtcaaggatcaccattaaacttgtccgaggacttgcatgccatctttgtccttgacctttattctgcgagtttcttctgacttcatcctctcgaagcgatcattacttcgttcaaggatttgcagatagaattaccggtcattgccccaagccataacttcaaacagtaagttgctttcttctttttcatgtttgttacattgtggatttgctgcttactttgtttgtatcgtttccatttcatctggttttgatagttttttttagggtttaaactgcttccaggttcatactaggattcagacaatatgtaggttgttttaagatctccgactcattaccttctggtttgataaaattctctccagggattgggactgctttttgcttacagcaatgtcccactttggttcaggaatttatcgtccagatgttttagagtttgagttccctacagaatcagccattccggataaaccaaacccttcaaaacccacctccaaattagagttgaacgatgttagggttagggaacacgtagtgagaacccaacatgaagatattgctagtcactacaggcatttcttgcaagaaatctctgaaggcaaacgtcgattcttgcaagaagcagcctagccggaacctcccaacgtgtcctttattcctgtggcaaagcctttgtttttacccaacgtcacaattgcttttgaaccaggtgacttggattttgaaattatgcctcccaagccacgtacatcaaagactcctcaggatcccaatgtcacctttgaggctgagttgatagaatcaaaggtgcaatctatctcaggctatacgggcgagatgctgaagacttgtgggattgaacttgggcaatcatgccaagttagatcagtacgagagggtgagttcaattgctacccacctacgcattttgcaagcaataacccggggaccagtggtgagactagtactagtggttcgactagtatgggctcctggagccttgagcacatcagtgcagaggccacccttcctttttgggtgtacttcaaagactacataaaccgcattggagttgccccgttctagttgactcccatctcctacaggattctcactagtctgaaagtcttgtacaaacttctgaactgggggtgtcccacaccagtagaaattgagtatctttactcagttaaggtcgttctgtcgaggaagaacgccgaagggggctttttctatctcggtactcattctagcgagcctaagattattatagacttgccaaataaagcttccttcaagaacaacttcttctgaacatctggtccttccccatcggcacaaccacgttt

SEQ ID NO: 88769 - DNA, 611 bp, Cannabis sativa
aatatgtgcttaagcacgacacagcacgacacgaaaaaatatgagtttaagcacgacacgacataaaaaatataagcttaggcacagcacgatacgaagagcttaagcacgatattgcacgacaagtctaaaagcacatgtaagcacgaatagaattagctcgaaaacacaacacattaaaatgtctaataatttaattataataacaataataaatatttatttattaattaaaataattgtaatattcacattataattattataattattttttatataattgcatgtagttattattgaaaaaaaataattaaaattataaaatacacatatattttagtatttagctcatcaattataataaaaaattaaaatatagagtatgaatttgagcccgtataaaaaatagattgatctatttaagaataacaagtcggcttgaataaaatactacacgaatccgagcacatacgaaattatcgaacttgcttattgtatcgggcctaccctataaaattattgtacgatacggtatgatccacatttttttatagcacgacataattcatatattttatggcaaggtctggcacaacttatatttttta

SEQ ID NO: 88770 - DNA, 762 bp, Cannabis sativa
cctgctggttttgaggataaaaatcacccagattatgtttgcaagctgtctaaatccctatatggattgagacaagcaccaagggcttggtttgataagttgaaacaaactttgcttgattggaagttcatcaattctaaagctgattcctctctattctttcttaaaaatgctgctgatattgtgtttgttctcatctatgtagatgatataattgtaacaggaaacaatgcttaaaagctcaagcaattcactgtcaagttgaacaaagtcttcgctttaaaagaccttggcctgctgcattatttcctaggaatcgaagtttttagagatgaaactggtatgtacttatctcaaggaaagtacataacagaattactcgagaagaacaacatgacacacctcaaaccgtgccctactcccatgacagtagggaaaactctgtcaattgaagatggtacactgctgaacaatcctacagaatacagaagcttgattggggctctccaatatctcacacacactcgacctgacattagtttctctgtcaacaaactaagtcagttcctcaaagcaccaactgatgtccattggtctgcagccaaaagaattttacgatatttgaagaacactcaagatcacgacctgcatatcaagcccagtgacagattaactcttactggtttcactgatgcagattgggcttgctgcccagatcataggagatcagtggctggctattgtgtctactttggagactct

SEQ ID NO: 88771 - DNA, 605 bp, Cannabis sativa
  modified_base (469)..(473): a, c, t, g, unknown or other
gtttgtgaagtgggtttggttccttttgggaaaggattgaagtgagagatttgttcttggatttggatggtggagacgataagggttgaagcaatttggcaatggagaagtagaaatcgattgtattttcttttttctttcttaattttaagtcatttttctaaaatggtaaaagtatttttaattaattttggtaagtttgtagatttttttgatgttggactgaacaacggtcatgagtgttcgtggtgcgatttttaacaatttttcaaatcaactcgtacatgtggtgtttttaatttttcaaactgcactcgcaccgcgaaactaaaaaatcgcgaaaactgcaccgcaaaaaatagtgcggtgtgatttttacagtttttgcagtttgaactattaccaataattaaactatcacaaatacaacaaagcttaagcaatacttgtcaaaaataccataaggctnnnnnataaatatgaaaaaaaaaataagtttcaataatacaataattagagagctttgggttgaacattcacatattagacctaaataaatataaaaattagtattttttataatatgtggtgcggtgcggtttgaa

SEQ ID NO: 88772 - DNA, 1083 bp, Cannabis sativa
  modified_base (660)..(661): a, c, t, g, unknown or other
ttttttagaaaagccacatttttttcaacttgtgccttaaaaaactataaaaatgaaaattgccctaaatttagattcatcataattttgcaaacttatcctacatattatggttgtgcattgtgcttcactattgggcctaaactcattttgggctaacattgaatctttgtgaagattataatgataacttcataaatacacaaaaatatcaaaaaaaaaaaaaattataaaaatacggtcgtatgaaattttaaatatttttacaatttttaagattttatttacaaaaaatacgatcttttgattatttttatgttgtattattgttattttattatttttatattattttggcattatttttatattacttttcatgtagttttcttgttatttttttatacttttatagaataacgtaaatatgtaaaaagaaaatattttaaacgtaaaagtgtaaaattttacaaaaaataataatttataatttatgtaattttcccaatattaatttataatttatgtaattttcccaatttttaaaaatattacaataaatcccaataaagaattttctcaatagatattatttttaatcataccaaaaaaaaatcttcacaaatactgcattataaatttttattattatattccaannaaacaatagaaaaaaaaaagcaaacaagatttatctcgtgaattattactatttttaaatcatgtctttgaactttttcatttattaaaaattctcctgaactattcttattattgaattatacttattttgtcagtttgacatgtcacgtcattactatatgtataattcagttaaataattttaataatttattttgtcatttttaattatataagttataatttaaaattaattgtttattgtatttatacacgtaaagttgatgtaacaacatcacactaacgttcataatgccaactcaattttagatagaagggcataacttagtatataattcaagaaataattttattaaataaaaaagtttagggaacataatttaaaaaggttaataattctcgagataaatcctatttatt

SEQ ID NO: 88773 - DNA, 653 bp, Cannabis sativa
gaaattgaagctttagaaactaattgaacttggattgttgttagcttagctgctggtcaccatgccatagggtgcaagtgggtttacaagatcaagtataatgctgatgggtacaatcaacaagagggcattgataataatgagacatttggccctgtcaccaagcttgtttcggtcaagctcattttagctcttgttgccattcaaggttggtttttacatcaacttgatgttaataatgcttttctccatggagatttgcatgaagaggtttatatgaatttacctcaagggtatagtcccaagggggagatgccacctaatgttgtatgaaaactaaagaagtctctgtatggtctaaaacaagcttcttgacagtggtttgacaagttttctacagctctaattgaagagggatttcaacattcagcattcgatcactctttgttcattcaaaggagtgaatcaagcatcataattctacttgtatatgtagacgatgttatattggctagcaacaacatggctgttgtgaaaaagttaaaagtaactctgaataaaaggttcaagctaaaagaccttggagaattaaaatattttcttggtattgagattgctagaagcagtgaaggaatctttatatcccaaagaca

SEQ ID NO: 88774 - DNA, 1345 bp, Cannabis sativa
  modified_base (587)..(593): a, c, t, g, unknown or other
ggtaaaatatttccaacaacaagtccctgaaaagcatccgaaaattgaccttactgattggttgaaatttgttgaaagtcgacaaactcttgaattttagttgctaattatatttgtactgagataaactcttaaatacaagtactaatatgtaatgtgtttttttggcattgtaggaattgagtaaggtgtaaagggaacgttcagtgtggtcataatggaatggtgaacgtaagggaagatgtggtaagtaatcaatgatttctaataatgtatgcttcaaaatgtaattgtactcatttaattgtaataaaataatgtagaaaaaggacctcaaggttcaagatcccccacgccaccaggtttggatcaaatctcggaccaagagaacgaaacttgtcactgattacgataaggaaattgctgaaaagatagtaagtatatatgaatccttaattgagtactactaatgagttagtatataaaattcatatactaattgcttgaatacgtgcattaggctcaattagaggagcaacttactcagggacaaatttaggtctatggccaaaatgatatcctgacgnnnnnnntcgggacacgagagcatcctggacatgttagggctactgggtatgctagtacttgagaaatgttgtttccttagttatacaaaaaaaaaaatcatagctaattttatttaatgatttgcaagttccttatagggcatctaaactgtttggcaggaagaaaagagaagtttctgatgttgtggctcagcaatagaaggagattgataaattaaaagctgaaatcaaatctcttaaacagaagaaaaatattgcccaacaagaggaagaaggagaggtggttgatcaggcgtatgttccacaacaatacgctcgtgaggatgaggatcgaccaaaaatttatgctaaggagtttgtttccctcaacgagctacctctcctatacaatttcaatgaacagagggcccttgatcaactagtaaatctctgctctaacaatatcgacaatgttgtggcctgagcgtatctgtacgaacatgggggtccaatcaaagttcactacaaagactacgatgattcacatgcctgattttttatttcataaatgctgtaagaggatgctgaaatcccaatctcaatcgaagggttcagatatgttaaagaagtagcaaacatgttccatccttgacctaaatacctaattgcgacagccggtgtaacttttattataattaattattaatgattggttgtaatgaccgctttagtaatttggattagtaaaggcaattaacactaatttttattattttatt

SEQ ID NO: 88775 - DNA, 718 bp, Cannabis sativa
tggcagcccactggtcctaattacctccttcctgattgtgatcgtacgttttggtttgtcactgtttatggcattggtatgtatgtttccttttgaaacttatgctaagttgttcattgttgaaacagcacacaacctttggatattaggttatatccaaacaacctaaaaacaccaactatatatcctatttttctttttatttgtttggtagaggtgactacgactcatcattaacaattctgctaccataagtttttttcttttcccctcttagttaatgggtatgggatattccaagttgagtaatatacatacaaatgtacatttatatatgtatatacataattatataaaaggaggagtgggttccatgtaggatggtaacatgtaaccatcaaaacacataatttaacaatccaaaatgataagaaaacaagtttggagtactcttcagatgcaatatctacatttaaaacggattattccagaaatactcaaaagcaataaaaaaaaattacgtttttatggaatactctttattttcacttttttccaatttctttttcttacaaattgtttttttagggaaaatggtaactttattaataaggagattcaaccattataatagaaagaaaatcagcaggaacattatcctcgctaaatatacgatctggatacaaacaagagctacgagcaagacaatgtgcagctt

SEQ ID NO: 88776 - DNA, 982 bp, Cannabis sativa
gacataaacaaggacagctaggaacatattggatgtttgtttggtaaataatgaattatcagatatagattggtggaaaccatctgatatgagagtagagctgagtttgctgtaccattgtcttgaggcctgtttaagaccatatatgcttttgttgagtttacaaacggtgttaggaggagcgttgtatcccggaggaattttcatgtatacttcttcatgaagatctccgtgaaggaaggcattgttgatgtccaattgatggacattccaattatacattgcagcaagagccagaaatactttgagcgtattaaacttggctacaggggcatatgtttcggaataatcgatgccttgtctttgattgtaacctttggctacaagacgagctttgaaacgctcaacagccccacttctatcatatttaactttataaacccatttacaacctatggccttatggccaggaggtagtttggttatgacccaagtttgatttttttcaagagcttgagtttctttgtccatggctaacaaccaatgtttaaattgagaggcttcagcatagctttgaggttctatttcagaatatgctgcaagaactgcagctcggaattgaggatgcagtttgatataggataggaattgttctatgggataatctgtagtagttgtgtgacagatataatcctttaagtgatctggtttgacaagtgcacggccagatcgagttgttttaggaacagtaggtttgacaagtgttgtttcgggtatagcaacagatggaatggagcagtagggactgattgtagttgcttgtatatgtatttgtgactcaggaggtgtagtggtggtgtctattgatgaatcattgtttgtgagcactggtatggaagtggatgattcagtgactttattattggtaggtactggtgtagcacttggttgagaaacgggtgctgagtctgagtgtgaaaaa

SEQ ID NO: 88777 - DNA, 715 bp, Cannabis sativa
ttacaaaaagtgatcattttagtaattataggtcattgggtgcatgttaaagtttcatggaataaatgtgtagatatcttaagagatatttctattttattgtggggctaaattagaaatactaaaattaataacttattaggttatattggtccccaagaaacaagagtcaattctattctcatcttctcccatcaagagagaaaactagagaaccctaagtcttgtatttttgaaagttcattacccaaatcactaaaatgatcatctctaaaagatggattaagatacgttttcgctatttgagttcttctctttaaattaacaaatgtattctttagatctatgcctatacacatattaatatgtaatatttatctatgaaattaaattttgttattgcatattttatgagtgataaagaattctaacaaagaaacctcactcagaataaaaactacaactctcattgatctaatgggagggtgacaaaggaccattattaaaagtataaggcagtaaaataaacaactattgaaaactaacatggaaataaacaccaaagaagattaatgggatcaccaaacaccaacacataagaaattagggcaccgccacaaccaagcagatcaaccgtaacaccaagaggagaatcaccccagatcgctactcatgaagcccaaccctaacgaatcacctgttgggttttatgccc

SEQ ID NO: 88778 - DNA, 580 bp, Cannabis sativa
ttaaattaaataatataatatataaattaataaatatacaattcaaataaattaaattaaattaaataaactgaaaaaaaataatcattagatatttgttattgattgttatgggtgtatatgacgtcggttattggttaggaaccgacgccatatgtacccctatagcgtcggttcttagaaaataaccgatgctatagaggtacgtatggcgttagatattttagaccgtatatcgtcacttggatcagcgtcagttgcaaattttgctaaaatcgatgctgaacggccttaaaaaccgtctcttaaaggtatttttgtagtagtgagcactttatatattgtatgtaataaaaaaaaaaaaaccatttatatagttaattaagtacagagaaataccaataatgtatacagcatggaaataagaccaatcatttataatttttttaatttacttaataataatttaaccaaattattaaaaaaaaaatgccatatagaacatacaattataaaaataatgacacaaagggtttaaaacaaacaattctcatacatagttaattaaagtacacatgac

SEQ ID NO: 88779 - DNA, 806 bp, Cannabis sativa
aatcattgatcctctatagacggtctatatcgagtagtgataaaattatagttttacccttcaatgtgtatttaatccttaaaacactgagctacttgtaaatgatattttagaaaactaatataattaccaaaataagcattttatcatttatcgcgttaagtaagtcaagctctaacgaactaccatttcacttctaataaacatagaagctacagatgcttatatctatgattaacactcccactcaattgcactaccgaattcccaagatgtaagcattgagctggttctacagtaagatggtaacgaataattcaaataacttgtgcaatacatttaagctagagcttaaccatcccaagattgagatcaagtgatctatgatcaactaagtgatattaacttagaaaatatataatggtaagtttatgatttctttttaactgttaatatcagtccagtccgatgtatagccgatcatctaatcttaagttactttactaatgccttagaaaatacatttcactcagataagtataagtaagccttatcgctaattatcacattagtgtaaatcagtatactgattgttgttggaggaatttagataacaccacaataaataatataacaaagttatgagcagagaataagcgagtactcgacccagaatggccagtattcgagctaggaatacaaacgtacgggaaatataaagaacacaaaggaatatagtggtttagtcagatcacggtctgcttagtccactgttgcaagggttttctgtcttgtccatttcatgt

SEQ ID NO: 88780 - DNA, 958 bp, Cannabis sativa
actccatttcaatcctttcgagcccacctcaatatccatcctcaaccgtgaacagagaaactaccgccacgaatggagaccacaaacagagagagcacgaatgagaagacgttctctgtaatttttagtttttttttttattttttcgagtcagttcgatagtgtccaatataggtttgataggaggttctaaaatttaagtttttgaggttgatggagaaggtccgatagtggtccaatataagttcgatggtggtctgatacatcgtaaatgatcagtgaacgtatttcctgtccaatggaagtctgatggagtctaatacgtttggatcccatcggacaccattcagacagtatcagacccctatcaaacacgaaatatatccaccaatcaactactatgcatcgagctactatcggaccttcaccattaacctcaaaaatttaaattttagaacctcttatcgaaaatatatcgaactgacacgtaaagacagaaaaaaccaaaaaattacaaagaacgtcttcgttcgtgatctgcgtttgcggtccccattagtggcggtgtcctcttcgttcgcagttgaggaatggattggcgaagtctaagtcgcattgaaatgaaaccctctcagtcaatcgaattggtgtggtctcgatcgaatggtggcaatggtcgcagtgatcgcgatcttggatcctttagtggattttcagtgggtattttagtgagaaccaatgagaggaaaagatagagaaggagcaacaagaaaatagagagatgttagaaaattttgaaataataagtatttttttttagatatacataaaatttaaccaattccactaatattaagtaacttaaattttaattattaattttcacctacattatgcatataaattataaagtcaaattttccatattaaatgcttacaaacctataaaaattaaaaa

SEQ ID NO: 88781 - DNA, 706 bp, Cannabis sativa
aattccccttcttgcttctgttcaattaaacaatcccccagctattgctcttgctcaaaatccctcagcatcagcagcctcaacaaatcctcgacctgcaaagaaaatgaggccttatttctccaatttccataaacctagccacttaaaggaaaagtgttttttcttgattagttgaccctagctatggagacaaaaagaaaatagagcaaactccctctgttcataatgcctcaacctctgcagatcagtatggtgttcttgccaatttgacaaaacaggaagatattcaagctatcatatctcttctcactcaaaagttgcaaccaactcatactcccactgatacatccaaaccgtttgcctctcatgtttctggtaaagtcaattcctcctctaatcatttatggattgttgacagtggtgctacacaccatatatgttgtaatcgttctatattttccaatttacacaacactgctattactaacactgttactcttcccaatggttctaccattagagttattaaatcaggtgacattatttttttcaaaatacttaaccatctacaatgtcttatatgttcctgatttttaatttaatctttttagtgttcccagttaccttcttaccattactaacacaattatgttcactcataattcttgcatactccagggtacacagaacaagaagattggga

SEQ ID NO: 88782 - DNA, 1320 bp, Cannabis sativa
taatgaaagtacttgaacctagaaaatggatagataatataactattcatacaagcaaattaagaatatacgaagtaataaaatcattaaagtatatttaaatttgcttaaggcagattataactgtaatagcgaggcaaaattgacaactgctcaaaaattaaaaagtttggtagatcactaactacttaaacaggaagattatgagcaatggaaaaacccaaaagtactgtacatttaatcaaaatatagttgtttacattgtgaataaaaaggcaagctaacacaattgcattaaattcaaatgaaaacagtacaaggcatttaagataaggaaaaacctaaaactggtttcaaactcgtctttacaaaaatgccactaggggcaaaccattaagtcatcttccaaaacaaaggatgagaggggaagccaataaactcgagaaagaccgtctgcacatagcctgaaaaagaccgtctacaggtagctcggagaaagaccgactacacatagcttgagaaagaccagatacatgtacagagccttaatctctgcacagacatcattcccgtcatcattagaagatcccatttcctaaagccgagatctttttcccagcctcaggaaattcctcgataccagaaagaggttggcgaaaaggtcttttgctggaggtttgggccttgggttggatggattctctgatagaaaccatgccaacttccttcccagattcatctgaaaccatgccaatcttcctctggaattcttcatcagcctgaggaggacctttaagatcgctcacaatatctatgccctcggggatcacttgtgaggatcgcccatggcgggctatagggttcccttagtttggattggtcagaagatcctcagccttggaatccatcattttcggctcaagttgaggcttgaagtctttgggaacaaatggaaaatggttggcacatctggttattataagtttggaaggatgaacttctgaacttagaatggacattctagcaggaaagagatgatccatcctgaaaatggatctcactaaaaagccagaggtttgtgaaaaatgacaagcttgagccgcccttttatacacaaagttcagtgacaagaaagctaaagatggagaaatctaatggttggaagatgggtagaatatgaagaggctattcataatgatcctcaaaactgtacaactaccagaatcaaaggatgcattttttccaaggaaggattttggcaaaaaggccctctgtaattattaaaaagctcttttaactaaaaaagaactttttaagggg

SEQ ID NO: 88783 - DNA, 961 bp, Cannabis sativa
tccccaactttttcacaacaattatactcaatttatttggttaaccattacatacgttgtcctcaatatttgctctgatttttgagaaattcatgttgttaaacttacgaaatgctcaaacaatcatagttgttgtcttttatttgatactttgttgtgaagatctgatctgatttttgaaaaaatcatgttttaatacttaggaaatgatctaaaaatcatggttctgtatgtgtatcattgatttttcatttagttggaacactcaaaaaaagattttttttttttttttttgagggttttggtgtgacagtgataatggaggttgagtctccgcctggttttagtatggaccaaagtgatgacgaaagagctgaactgagcatttctgagctcatttgtaatctcagatcggcattcaggatctctgattttgaccgggttgaggagattctgatcaataaagagaacaagatgaagaaacaaatcactgagttggagtctgagattatccaatttgatcttgaggtcaagaggctgaggatagtgagtagtgagaatagaatttcgagagagaatgacgagatcatggaggagagagtgaaggtggctgaagagggaatgaaattggctgagatgaaagcaagagaagctggtgacaaagttagagagacagaggaaaaggttgtaaaagctgaagagggaaagaaattggctgaagaaggaatgaaattggctgaggagaaagcaagaaagcttggtgaaaaagtaagagagaaagaggaaaaggttataaaagccgaagagggaacaaaattggctgaggagaaagcaagagaagctgttgacagagttagagaggctgaggatagagttatgaaagctcaggagggaatgaaattggctgaggagaaagtaagagagacacgggaaaaagttataaaagctgaagagggaatga

SEQ ID NO: 88784 - DNA, 1548 bp, Cannabis sativa
ctaaaggaaatatattaaaacacttgaaaactaaactcaaaagattgatgataatgataaagacttcatgaacttgtttcctttgatagatactatttattattccccaagaagacacgagtaagaactgttctggtctgtagagatgccttcaaaatattccaatccctattcattaaaacaaaacaacaaaattaataaacacatacatataattaaaataatgtaattataattaaactctaaattaaaaacaaacctcattaataccaacagtaacagtcttctcctgaagagcaccaacctccttaacattgaaagtgttaagcatagcaatgctggagatagtagacatgggcttcacttgaagatcgtccataatcatataagtaaccactcctttcacaaacccaccttccacctcagcctcagaagatgaagatcctccaacttgggtagccttaggtagcacataatttacaaccctcccaatagtacaacagcaactagggcaagtagcatttgaaacatcactcccataattataacagcggttacataagtatagggtttgtttggaggtggtatcatcattagtcaaggagaaaagtgttgaagagcctccaagggtagcacactttggcttaagaaggatatttttatccacattagtttggatgtaagtatcaccaagattttgtaagctttgataaaggttacctaatgtaccaaccatgcctttggtagagagaagccttataacagtcccaactggtattgatagaagtgagaagaggaaatctgtgaagtcctttcctgcttcggcaaagagaacccttttctcctttgaatctatcagaagtttgagagtaataacttttggagtagtagttgccatttttaatttgctataggttttttttttcttgataggtatgaacgtaatatatgagttgtaagaattgaaagtttattatatatatagggagatttatatatggggaataatagctattttgaaattttaattaattggagtttccacgtacttttggaagcggctaataatatcgcatgcatgcacgcatgcacgtcttttcgtttttcaatattaatttgtggatatatgatgcgatgtattttcaagatatatttgcttaatgtatacatcattccccataaaatattatcacaatgatcgaaaagaaattaatgttaacgtttgataatattaatgttacacatgatagtatatttatgagtattaaaataataaaaaaaaagagatatttagtttttacctatttttttttcttcatatttttaaattaatatttaaatttaggtgtttaattgaatattaaattaaacaaaccgattcaatctaattagtaattggattgaattttggggtctaattaaattagatcggatgataatttttcaaatttaattactgattggattgaatcgaatgatcatttttgtgacattcagtagtcccgtggacgtttgggtccttacacccacagaataatgactcttata

SEQ ID NO: 88785 - DNA, 604 bp, Cannabis sativa
taataatacctaagttatatttgtagaacatctgtaagtatttggtcgttaagtgtcaagttaatggccatatgacattctctgattgggccatgttattaaatttttagtttttatttaaaaatagtttaaaaataccattaagaatataacacgtgaataatgacttgacacttaacggtcaagtacctacgaaagttctagaaatataacttaagttttattacggtcaaaaatcaaacttaagtatttatttgcaactaagagttaaacttaaatatttatattgcaaatcacttaaatatttatgttaaaaattactttcattttccacttgaaaaaattgaaacttaactatttttttctattatttatttttaaaaaataattaatgttaaaataaagataactgtttaatattcttagtaaaaaaatatgtacatggatagtaaaatatgtctataagttatataatttactaaacattagatgcaacttttccaatccacaacacttaattttctaattttaatttaccaaatacttaataatttttttacagcacaattatagttattttttttttttcacattacagctacat

SEQ ID NO: 88786 - DNA, 504 bp, Cannabis sativa
agcatcactggcacagaagagatcgaattgattgatacttccccaaactggatgacaccgatagccgcctacctcaatactagggaactccgagataatcggaatgaagctcgaaagattagaaggaaggctgcacggtatatcatagtagagggaattatgtacagaagaggattctctatgtcgttgctcagatgtgttactcaagaagaagctgcacgactcccatctgaggagcatgacagattctgtggaaatcatgctacctggtagagttaatctaagaaaattctaaggcaaggttatttctggctaacgatgattgaagattcaaagacctatgttaagaaatgtgacaaatgccagagattttcaaagatacatcgagctccgcccatcgagttaactcagatgcaaagttcgtggcccttttccatttggggaattgaccaaataggacaattacccaaaggaaaaggacgagtgcagtaagcaatgatagca

SEQ ID NO: 88787 - DNA, 832 bp, Cannabis sativa
ccctcctacagcagatacaacaacaactaaaccagaaattctctctcgaaaccttaggaaatctcaagtacttccttggttttgagatagctcgagcaaaggacgctttagttctcacacaacgaaaatacactttgaccctccttgaagacaatggtctctctggaagcaaaccaacaaagactcctatggacccgaaagtcaagcttgatgatgaagccagtactcttctcaccaacccctctcaatatcgtcaacttgttggaaagcttctatatcttacgctctctcgacccgacatcacatatgctgtgaacactttaagccaattcatgacaactccgagaaccacacacatgcaagctactactcatcttttgagatacttaaaaggaaatcctgggcagggcctaatacactcaaccaactcttcattacaccccaggggcttctctgactccgattgggctgcctgcccaactacaagacgttccactacaggtttttgtatttttcttggggattgcctcatttcctggcgcaccaaaaagcaaccaactatctcccgcagttcagcagaagcagagtaccgtgctctcgctgctaccagcagtgaaattacatggttacaataccttctccaagactttcagattcaacaagattaacccgcattcatatattgcgataaccaatcggccatacacattgcaaacaatccgacttttcacgaaagaacaaaacacatattgttggattgtcatttcattcgtgacaaaatcaaggaatccaaaatcagactaatcctagttaataccacacaacaactagc

SEQ ID NO: 88788 - DNA, 820 bp, Cannabis sativa
tgtgggtcccactactttctctctttccaaaatttagtaaacaattgtatgagaatcaataccataccgaggtgagggatttgggagagaatttggtaaagaaaaagagtgaatgttttggtattttggccttagatgaactattaatatgtttttgagagaaaaattatatagaatatttttgaataattaattgtttttttaaaaataacatctaattattatttttttaacaatgacccattttcttctcttatcaaaaaaataaaaaaataaaaaatctcaaatttcaaatattaaggtttcagtctgtctcaacctaaatcatgtgatcaatttttcagtttgattcagtctctatatctctgtcacaaattcatttctccaatccacttgttacaattagatttctctttgatttttagtgttttgattgttatttttttactattatgcttatatgtgaaaaagaagcaacaatctcaattaattgataatctattttggtacttttttataacaatctcaatctctagattgatggagataattttaatgaggagcaaaatatttaattaatctttaattttataattgttattatattttaaattttttatttttttgaaacaaagattgcaactttattaatgcaaatcagctattaattaaaatagcttccaaaccagtagggacaaaccctgtacgggagagacggtcaggacatgaaccagaagaacgagctaaccaattagccgcttagttcccaaaccgtttaacaaactgaactaaaacctgaagaaacgaaagagatcgtata

SEQ ID NO: 88789 - DNA, 709 bp, Cannabis sativa
  modified_base (661)..(667): a, c, t, g, unknown or other
ttgcgtgagtatactacttgattgcgtgcacttgcgtagtatttaataattttcgcaacaattttctgaagttaagcaaaggatttaagtgttcttgtagctaaggtaaacctaaaacctttagctgtgtgtttttaagcttttactttagtttcatgttgtgaaattatgaattgggggctgttgttgatgcaatttcaaattctaggcttagtttgagttggttttagattctagtagctggttttgatgtctgatttaggttttgtgcaagtttgagcacataaaccttaactttgatctctaatggcatgtttgattcagtgactttctttggtttattggctgaaatatgttgtgtataccctaattaggtactctagaaggtttggtagcattcggtggaggattgaggaagaaatgaaatttcttgggtgaactggtgcaaaccgggtaactggttggccggttttggcagggttccccaggcctttcattttctcaattttcgtccattctgtgtcgtggttgggtgtttccctatttccagagttggattaacttctagaaagtataacagaacctagggttaagggtccgggtttcccaaaattagggttttggtcatgtaactgatggataattattttaccaggatctnnnnnnnactcacaagtatgtttattaatatcctaaatatgaactttct

SEQ ID NO: 88790 - DNA, 2207 bp, Cannabis sativa
tgaccttatctcggcctgacatcacctttgctgtcaacattttgagtcaattcatgtcttcaccccgtactcctcatctacaagccgttcaccacttacttcgatacctcaaaggaagccccggccaaggtcttttgtattctacctcttcatctctacaacttcatggtttctctgattcggactgggcctcctgtcctactactcgtcgttccaccactggtttttgcattttcctcggagattctttaatatcttggaaaactaagaaacagcccaccatctctcgaagctctgctgaagcagaatatcgcgctttagctgcgacaggcagcgagattacttggctccaataccttctacaagatttccaaatccctcaaacacaacctgcatttattttctgtgataatcagtccgctatacacatcgccaacaatcccacttttcacgaaagaaccaaacatattgagctcgattgccacttcatccgtgacaagatcaatcgttctcaaatccggttaaaccctattaacaacaccttacaagtagcagatgtattcacaaagcctcttgcttccacaaccttaaacactcacatttgcaaaatgtctgtccacaatgtgtacagtccatcttgaggggggtatcaagaattaatttgtatttcctttctgttagttttgtttgttattactgtaagtttcttttgttggttaagttagttagattgttcagctatttttctggtttagtcggttaggttgtgtggtatatatatatatatacctctgttctcttgttcactttactgaattaatgaaaatataattcactttctttcattctctctttccgcattagaatgtgcctctttagaggaattgtagtccaagttattttttcttcaatttagaaagccatacatacctatatctcaaccatgaaagcccaaaattgattaaccaaaagtcttttcaggggtcgaaggaagtagttgatctagtagatgcggcagatgaaacagaacccgactccattgatcatatatgtgaagaaaatgtacaacttttcctgaggtatatattacagtttatttccatgtgttaaagactttgattgttgtggttacaacttctcatgtgttcttctttgatttagctgttgctagaagaacatttgaacacataacttgctctgacatgcatgcatactgctattgcttttctcattacataattttgctataatttcgacttcttaatatgagataattttgttcccgttgcttttcgttgtgttttagcatgaatgcagggaattcagagaatcaattcttggagtcatgccacatcattgggtatgataatgagtatcatactaatttcatcttcttttgcctttctttttccttaagttttatttctttgatggtgatgattttttatatgccactttatattatcaggatagaagagaggataccatgttaaaactagcacaaatagtggataagattatatagtcaattcaattttagatttctctctggtcctcaactctttattcccctctcttgacccttatcttgctatgtattggtggtgtctaaactcttcttaagattctcaaattgtgaaattattctttatgactaattgcatttaaactgacatagcaagctttttaacttacaggaagtaccaatggttatggtattaagttatcttttcacagggtatatgcattttcgattctcttgttcatgtttcacttagagatatagcttacttttttttatggtgttggtagttgtttccagtacagaattctcttaggaaataaaaatgttgtattgtctttgtactctgtatgtcgaagagccaagaaggtatgtcgaagctagttactttgggaaggatcagtatgacctagacagtgctttgtatcactatgcctactggggagagccaaaggaattcagtgaagagcaatcatattcttagtctcatatttgttactttgtattcctctaactgtagatgtgtatctgaaaagataaatagagctgcttttttatacatgatgtattcaaacgaatatatactactacaaaaaccccctttagaggcggtttttaagccctttcagcgtcggtttttgcgaaattcgctaccgacgctgatcagggcgacgctaaaggattt

SEQ ID NO: 88791 - DNA, 592 bp, Cannabis sativa
atttgaaaaaaaaaaaaaagattaaaaaaatagtatataaggtaattcccatatttattttggccctataaatatttgagtaattgaaaaataatagtttgtgtaaatataaaactattaccttaattatattaaaatctcaaccattagtaattttttattatcaaatataatcatatttttaaagtaatgttcttctaaaattatttttatagctataataatcgttttgttgtgcctaataacttttaatttgtgtgagattttgtattgcctatgtcaatttgattccacctacatatacattataattataatttatacattccatacaaaaaaatatatatttatatttatataattatacaatattatattttatatgtattaaaaaaagtatttcaaaaaatatagtaaagaagctcatatgagtgttttatttgatatgagatttagatttgataagaatgttaaattaaattaaatttgtgtaaatattaatttagactctatgttttacaaaagttattaattagattatctattttattaaataacaaaatagacattgtatttttcaaaataatacaaa

SEQ ID NO: 88792 - DNA, 591 bp, Cannabis sativa
  modified_base (36)..(36): a, c, t, g, unknown or other
ataaaccaagaattcggttatataggcacactttanatagaatagatatatatattttttttgataataagtaatattttatagtttgtgttttgcaaaaattattaattaaattttttattttattaaatgataaaatagactctatatttttcaaactaacatgcatatgtagtttttctaatttcccaaactacacccgtacatcgaaactaaaaaactgcagaaaccacaccgcaaaaaattggtgcggtgcagtgcggtttttgtggtttggactatcaccaataattaaactatcacaaatataacaaagcttgagcaacacttatcaaaaataccataaggcttgaaaataaatataaaaaaaaattaaatttcaataatacaataattagtagactttggatcggacataaataaatataaaaattaatatttttataatgtgcggtgcggtgcagtttgaatcgcatattaacaattcaaaaccgcaaaaccgcatcgcactacacggtttaagaaaaattcaaaccgcgaccgcagtgcaaagaatttcaaactgtatttttttttttgcggtgcggtgtg

SEQ ID NO: 88793 - DNA, 561 bp, Cannabis sativa
  modified_base (370)..(370): a, c, t, g, unknown or other
actcttgctactccttattaataaaatcaaaataacttacatttggttgcttgataggtgacttggtttcctcgtttactacgtggtcaacttcagttaaagctgagtaacatgaggctacatacattgttcttatgacattaacattcatgtattcataattttataataaaaatgtaatacactaataactcattaactctgttatggaaaatgcactaatcttttctaattgggaagatcgtgtgggaatagtcaggtaattattgggtttctgttatttctgttcttagattttttgtttgtttgtactataaatatgatttgtaataatcttatgttgtttcataaactaagaatcttatgtttnataagggagaaaacaaagtttacattaatattatcaataaacattaatattatttttctatttattgtatttaattatacattaatattgtgcttatgttctagagatcatttctcaaattatctggttggtcaaatagattttgaatttggatatttgtaatatagttttttgttaatttatctttaaat

SEQ ID NO: 88794 - DNA, 541 bp, Cannabis sativa
ggagcaatgccgcgtggaggtagaaggcctacaggtcatgaacttatatcccattcgctccctaactttcgtctctcaatgtcagtgttgacccagcagagtgttttcgccattggtgttctttccgatctctacgcattttaccgctccaccagaaattcccactgcccctaccgtactccagcttggtagtttttaccacctctctagggtgagacaatagcttatcaagacgatgatcagtagttggtccgagacgatgatcagtagttggtccgagacgatgatcagccacactgggactgagacacggcctaaactcctacgggaggctgtagtggggaatattccgcaatgggcaaaagcctgacagagcaatgctgcgtggaggtagaaggcctacagctcatgaaattcttttcccgtagaagaagcaatgacggtatctggggaataagcatcgactaactctgtgccaacagctgcgataatacagaggatgcaagcgttatccgaattgattgggcgtaaagcgtctgta

SEQ ID NO: 88795 - DNA, 1603 bp, Cannabis sativa
agtaaacctgctattgcatagaatttggtaataggaatagaatcatgttaaaccataatcaatagatgcaattgaaatctaaatccctaactttattcatcgttaatttttttattaattcacatgcttcttattttcactgtttttattgttttcaaattttaatgttttcttaaattttatatagccaaatagaagaaaagatttaattttaaagtacttaactacaatctttatgggattgaccttactctttgtgagtccataacttactaacgatacatatacttgcgtgttaaaaataccacaacagcacgacacgtgataaatccaaaaaatacgacacgacatattaaaaaaccttataattattattattaataataatatataaatttttcaatttagataaaataataataaattttaaatataatactcaatattataattatataatgaaaagtattaaaataaaaaatattaaggttacatattactttatttataggatgggatataacaatttgaattttgagtataatttataagtaaatattcaagttctaatgatgcttaatttttttttattatatatttataaaatattattgaaaaattatataaaaataactaaagctataaaatataatatactttagtaattgtaaaaaaaaaatatgaaaaagtaaagcacgaatataagcctagatatcaaaataggctggcctatttaaaaaatatgggctggcacaagtaaagcacgatacgaattcgagtacaacacgaaaataacggacctacgggccgtgttggacataccctttaaaaatattggcacaacattacatgactcatatttttctgtagtataacacgacacgacccgtttttttgaaaagcatagtttaatataggtcgggccatcacaacacgcacaaacttacaatactaatcccaaccttggacccagacttaggacctgagctcaaacccaatctcgggacccagattgggatctggactcaagacccaaacctaggacctacaccagaaactcaaacttggactcagacctgaatccaaacctcaaatttggacacggacctagacctagacccaaacctcggatcgaccattgtccttaacccagaccccccagtatgcccccaaacttagttacgaacctagacttagatctggccctggcctctgaaacgggcacctgggccagggtcggagtcaggattggagtccagtttatgatatagatagtataattttacaatataatacgatccaacacaattccatataatataatacaacttagtgtaacgagcccttagtataaatatatgtagtttttttcttaatttttttagaatgtggagagcttagatttttgaaatttaaagggaaggtctccttccaactctcctctctctttctctttccatttcttaccaaagcaatgaacttcacatctcctttcacctttctctatccacccatctctctcctccctatcaaacactctcttaaattggtatgtaaaattacatatgataaattgtgataccaaaggtttaagagcactctc

SEQ ID NO: 88796 - DNA, 651 bp, Cannabis sativa
gcccgtttggcaagcaacaccatttccgataaggcaaaccttgtgccaatacagttcctaaaagaatgtagcattaccatcccttaagaagttgacctgttggatgacaatccaacatgggtgacccttgttgcaacttacctccaaactggagccttgcttggaaacaaaaatgagacaaaaaagatgagaggaaatgctactaggtatctaatcctagatggagcttctcaatgttgctcttaaggtgtgtcactaagacaaaagtcaagcgtctgacgatataagtgcatgaaggcttttacaacaatcatgctaggggaaaatcccatccaaaaagatactttaacaagggtactattagccaacaatgatcgacgattcgatggactatgtaaaaaaatgtgacaagtgcatacgattctcgaagatccctagagatccacccaacgagctcatgatgatgcatcctccttggcctgtcgttgtatgggggatagatcagattggtcaactcccaaatggaaaaggagaggtgtagtatgacatagtcactgtagactactttactaagtcggaagaagctgaatccctggcaacaataacttccaagaaagacctcaactttttttttttcaagaacatcatatg

SEQ ID NO: 88797 - DNA, 1066 bp, Cannabis sativa
ttataatggtctgttgaggctttgtaaatagatctaatttatttttccttgtaactttatttatgggacaatagtatgggaatttatccaacatccactttatccagattggagagagtagtgaaacatgtaaaagagccaaaggattaaaggtagccgaagaaacaagcattctttatattattattattattatttttttagggaaattaatgtcagccagaaaaaaaaattaataatatatcttctggcatgagatattcctcaatcatacacaaataattacaaacaaaaaattatacattaatgtaaatataattttttttaagaaaaaaaatatatataaattaggttacaagtctactttttcgattgcctattccccagcttaattaattattttgcgttggatattaacatatttttggaaaggaagaaaaatagaaaaagcttctcccctcttctattttattctacagaaatgttaaaatgcttaataatttttgatgtgttaatattattattagtctaagtattgaatcacatataatttaaagtaataatttttaagaagtatcacaagttaattgcaaatcaacatatctaaaaaaatattaggcaccactaatactcacttaggtggtgtttagttggaagaaataaaatttaaaatacataaaaaaaaaaaaattaataaaaaaattattagaatggtttttccttcaattttaaaatagaattgtcattccaccaaaattgtaaaaaaatcattccataagaatgacatcctaacactttaatattcaaccaaacaaaaaaatgaaatagaaattatttcttttccatttcattacctccaaacacatttattctattctatcctacgccaaacattaaaataaaatagcaagttatattattagaccgacaactaagaaagaccattttggtaattccacagagaaagataaagatacaaatatcaagtatgaagtaactagcccaacaacatgacagttcagtccttaatacatctcagtgactaagttatataaatttaaataaa

SEQ ID NO: 88798 - DNA, 584 bp, Cannabis sativa
gaatatgcaaaacaatgaatcatacaaattgtcccctcttttgcaactctgtattttgtaattcatgttgactctattctactgaggttgtatcaaatatatgcatttttgtgtggtattgtacacatgctgctacacacctaatatattttaaacattatgtaaattgaactctttgacgatactaatttgtcgaggcagcaagattctaacatccacccaattttctccaggagatatgcagctctgtatgttagcagacacatattttctcttgatggcgaaattgatgagattgtgggacatacttatttgtatttaaaagagcagcttcagcgttcaaccgtttcacctccttctggaatacttcatggaaccataattggtgtgttttgtaatttcagtttcaattttcttattcaatgcttttaattttataattggaaatcaaatatcattcttgggtcaagctaagttgactctaaatttcaaccaaattcttgcattttgcatctttttaggcaccccttcccccatctgatgtttactcctattgaaaatatgatatcttttaattgtatgtt

SEQ ID NO: 88799 - DNA, 630 bp, Cannabis sativa
ccaaatcaaagattgctttccccatgtcagtttcgggtctaaactctgggagctcaggcaatttttcctttttgaaccttttctttcttttgttcaactgtatgccattattctcatcaccttcatcttcctcactagagtcatctctagcaacttgttcagaatcagattctaccatgtcctcatcttctacatctatttcaacatgtttttttcctttccttaacaaatggtgctctgcttcttcatcaattaatataccatcgtcttcttgtgcatactctggatcttcttcataatcatcctcactaccctcctcactttcatcttcattttcagcctcattaaccaaatcagccctatcatccttactttgtgccacattatgctgaaaattcctgaaaaacatagtgtacattaggagattttttattgaaataacttacagatgtagcacaaaacttatttaatctatgccgttttcatgaaaaaaaaacctagttattctctattttaaatgtgttttaggctggaaaaggaatattataataatagaacatttcatattaatcgtaaatctattcagatttaaaagaacatgttcattttcatttataatcaaaggaatca

SEQ ID NO: 88800 - DNA, 1065 bp, Cannabis sativa
tagtgaatgaagactatatctctctttctctcactctcatcggagttaattaatttcacgtaatgatacatactttgtttaattttagttatatatattagtacaattaaaaagtggattggtgtgaaacttgtacatatagcagacactaaaaattttactttttttatttggagggagggaactgaaggtcttacttttagtatttgtattattttttactttcagccgtccaacttatgccactataattcttagtaccagtttattataaaagaaatgtttaagggaaacttgtcaattattttaaaaggtgataataaattatcgttagtgcagttatttattgacttctatacattttaatttaattcaatattaaaagctactaactacttataacgcactatataagtatcatgttgaaccttatggtgcttttatagtgcttaatagcaatgttgttattataatattatgaaaacttaatatatatatatatatatatatatatttatgagggagacaattaactataaatatatttggaggggttttgttccatttacgcaaaaagcagttatgatgttatgtatggcaagttttgtttttgtcttgtttaattaatcaaagtttagtttactttaaatttgatttgattaaattaatcgtgacttttagtgattaaaatcaatcttatatttgtattattatttgactatgttcaaatatgtattttgactttaattttagtcgagtcaattgaacttctttattatacacttcttttgtaagtttctaataatgttatcttaatattttaatgtttgctaaacgtaacataataaaatagagaagaaattgaaagatatacgatgtcaaaaatggtcaatttacatggaaacaatatgctttagtcatctcaacccttactaaaaaaaataaaaaaataattaatcatctcaaacaatttatttttaaaaaaaaatcttacccatcaaaaaccaagaagtactatattaaagtggagaagaacattaattaatgatagcattagctatcaat

SEQ ID NO: 88801 - DNA, 681 bp, Cannabis sativa
aaaaaaggtaaaaatcatgcatcacttagaggggttcaactaggtcttacttttccaagtaagatctagcttgctaaatgttaaagctggccaaaaattattattcaatcaacatttcatcacaactaattgaacaaagacaagattactcaatcattgcaaaaataaagcactagtccatacaagggttcataaccacccaaatctcaaagattctagttcatagctgaaattaaaaacatcaaaccagaaaatgaaatgttcatggagtttaagagagtacaaaatgaaatgttcatgtaggttgccttcttctccttcttcttagtcttcttctttgtactctctcccttctcttttttctgtacttagatttttgtttcctatgaaattttcgtactccctcctttcaaagtgcagccaccatatatcttatgtcctttcttctcttgtgctccccaattatggtactaaagtttaccctaataggaaatccaagtcatagtccacttgcccttccttttctacctattagttgagtcattggccacattttcgccacctcaggtccttttttctcattaatgctagctggactttctgccaaaatatacttactgggctgacaaattgctacgcgatgattgctatagcaatgccagtcagcaataagcctttttc

SEQ ID NO: 88802 - DNA, 812 bp, Cannabis sativa
acccagtaaaagcaggaaaatcacagctgtatggctttcaaaatcatgtaccgcgtttacagtttataatcagatcccacgatttaagggataatgactgtaattacatttttgtcaactttgtaatgaactaccactatcgaattataaatactggtatataagatcaaaaaaaaggaggaaaaaaaggactcttacgcgagaggccctaaaaaaaacatactcagaaatataaataagtttgactcgtggactatgcaaaattttaactgcaaaaccacgtaaaaattgggtgttcatatttttataatttttcttggttgaatcatttttgtgaggctcaaatttggttaaccaaaatctgcgttaacaatattactttaaatatacacatagatcaaatatgtatattgctttaaattaaaataagacacaaatttacgtagttcatcaaattgtatttgcctacgtcgatagcaaacagtcagttgtgcatctttattaatgtgaaatattacaaggatcaagagcaaatgatgtctatcttctttcaaaaatgatcaatcttggacatatgtggtgacctagattaggttagttttctgtgtgtatttcgtagataagtgatgtgtattagacaatataattgtgtttgtaagaagatagaaatgactgtgaatagaagaagttatgattcgtagaagaaccttggtgagctgatgtgttggaaggtagtgtggacagttttgttttcataaaggttatgaaataagcagcctggtttttataggagcttgctaaataggcagcct

SEQ ID NO: 88803 - DNA, 4110 bp, Cannabis sativa
tgttttcaatatcagtagatgattaatttgtgttttttgagcgggttaatgttcaagaattaaatttgattataatattttcgaaccatcttgttctgatagagttattccatttctatttcttagtgttgttgcattagggactgataaaacggactttgaatgtactaaaagtggattgtgttttgcagctgaaatgacttcaatggttgctaaggcaggtagttgtagcggccaagtatcttcaccagtagctgttcaagaaaagggaagtaggaataagaggaaatttcgggccgatccaccttttggtggcacacataagattgtctctttacctcaaagtgaatgttcagcttatgaattctctgctgacaaatttgaaattgccccaggtcatgagcaatcttgtgtctgtgactattgtagttccaatctagagcaatctgataatttaaaacttgaccttggcttgtctagtaacgttagttcatctgaagttgggcttagccaacctagtgaggaattagaagcagatgaatgtgaagatgctggttggaatgatcttacggaagcccagcttgaagaacttgttttgagtaatttggacactacctttaggactgcaattataaaaattatgacttgcggctacactgaggaagttgctagaaaggcagtcttaaggtctggccattgttatgggagtaaagacacggtttcaaatatagtggataatactttagcatttcttaaaggtggacaagagaatgatccttcaagggagcattgttttgacaacctacaacagctggagaagtatgtattggcagaattgatctgtgttcttcaagaggttcggccttttttcagcactggggatgcaatgtggtgcttgttaatctgcgatatgaatgtgtctcatgcttgtgcaatggatggtgatccctcgtatacttctggtaatgatgatgctccaagtgggagttcatctactttaaaccaacctcaacttaaagtggaatgtaaaagttcagaattgcatctttgttcgcatagttgtcaatctgaggcacctgctgtagcttcagtacccagcataacaaagccaaaggcttcccttggatgtggtagattagtttcgaaggagggaaagaattccatttctgattctatggataaatctttcagtgctactggaacatctcaatctaccgcgtcagaggagaagcttggaagcagtagaagggtccattctgaaagtagcaagagagaatacatgcttcggcagaagtcacttcacctggacaaaggtttcaggacttatggaaaagggacttcaaggtcaggtaagtatagtggtttgggtggtttaatgttggataagaaaccaaaatctatgtcagattctactgctgtaaatttaaagcatgcttcctcaaagataagcaaggctatgggagttgatgtgcctcaagataatgggaacaataagacttctgtcaatgctgcaacctctttcccagtagcatcaagcctggataccgataatgcatgttcaatttctgtccctaagaaggataatagtcagtcaacgttacctgcagtcagtagtgtaacagcagtacctgtggtcgacacagaagtgtcattacctgcatcagatactcaccatgctttatcagctgccgatactgagctttctctatcactttctacaaaaaataactctgctgctattccaacccattgtactgccgaggcatcaaattctagttatgctggaataccatatgataagtctttggggcaatgggttcctcgtgataaaaaggatgaaatggttctgaagttggtaccaaggataagggaattgcaaaatctgatgcaagtgtggacagaatgggcaaatcaaaaggttatgcaggctgcccgtaggttgggtatggaaaaagaggaacttaagatcctaaggcaggagaaagaagaagtggagcgcctaaagaaagagaagcaaactctagaggaaaacaccatgaagaagctttctgagatggagtttgctttgagcaaagctagtggtcaagttgaacgagctaattctgctgttcggaagcttgatgaagagaatgcagcactgaggcaggaaatggaagctgcagaacaacgtgctgcaacgtctgctgcaagctgtgaggaagcatcaaagagggagaagaaaacgtcagtggagtttcagtcatgggaaaagcataagacctttctgcaggaagaattaacaatggagaagcacaagctatcgaagatgatccaggagctagagcaggcaaagtataggcatgaacaacttgaggtatgcgtgagaaaaaattgtcatttctgatttctataaacttccttggtccttttagtaatcttaagttactgttttgagctcttttctcattcaaaagaaaaatatcacaggctagatggcaacaagagaagaaattaaaggaggaactatctatgcagtcaagttcagtgagaaaagatagagagcaactagaggtttcagcaaaatcatcggagaacatgatgaaatttaaagcagaaaacaatctaaagaagaacaaagatgatattcagaagctcgaaaaagaaatctctcaactcagactgaaaattgagtctccaaaaattgctgcgctccgaagggggaatgatggaagcaatggtcgcaagctggcagatgtcaaaagtgaccagtatcaaaatcaagcagctgcaaagatgaatgaccactcggagacaggcagtgtaaaacgcgaaagagagtgtgttatgtgcctctcagaggaaatctctgtagtattccttccatgtgctcaccaagtggtttgcacaaagtgcaatgagctccatgagaaacagggtatgaaagattgtccttcttgtaggagccccatacagaggcgtatttcagtacgttattctcgctcttaatttttttaattttttatttcatttttgttctggaatttgatttgagtggttttgaataaaacattgtgagactccatatgaaaattggataatccatttgagttccaaattggtctcttcagttcacaacatatgatgttgaaggtacctataaaaacagttttgttgactcatttaaaatgagtctaagatataatattgtaaattttaaagaataccattactctctctctctagtgaaatagatttgcacatcttgagtaatgttttgaattttctttgagaattagtgaatttcttaaaataaaatagatgaggataatacccttttgacttatgctagggaaagaaggggaaattattttgctcaaattttatgatttcttttgaatcattttataaaaatttcgttaaattgaaatttctttttctaatttctcaaaaaaataaaatctttttctaaaaaatgtgttctctcattttcattagtgttgacctcgcttctagctaacgacagtgagtaaaaaataaagcgattaagtaagataattaaaagaaagcaaaaacagtatagtagagtgagcaccaaatttaaagaggtttggccccgtaagtatgtaatagtcttttctcctagtattcctcttaaaagctcttacaattgatcactgaataactttttctcttagatcacttttttctctctagagtatatttctgcaacaattctctcgatccctttcatagtgaggattttgtgttataaatataatatataaaaatggatgaggattctgttataaatataatatatattgttatataaaaaaattgaggtaaaattactctagatgtcaaaaatagaaaacattagtatgagaaaaaataatgtttctgcctaagaatctccctatataaatcgaagtctatttatcatttaaaaaagaaaaatataaggtttaataatttaacattaaagaatgaattgtatcataataatgtttattagtggtcttaagtttttttttcattgtttggttccttttaagataatattattgtattcattccattgttataatgaaatctaaataaagggatgagtaattgtgtgtttttaaatat

SEQ ID NO: 88804 - DNA, 829 bp, Cannabis sativa
tcacactaattttgttccttagttgagtagatccatttatttatcatattagagagaaaaagtaaaataagaaaacttacgcttgttctgctcttgaatataatcctaaatatcatgaataataatatatgatatgaagaatagttcaaaaccacaagttaagcatcaacttggacttttgtttctacacttgtcaatggaaattttatttttcttttacattgaatatcgtaacacactaatttttacttaatttctaagtgactgatgtccatatactttgattaatttgaaaatcagttagaccataaatcacatggattaatgcataagatcaaccgattgaaggggtaattttgttttgtaatattaacacagcaacagataagctttagtaagtattcctctacaaacttgataattataaccaataaatcattattcaccgtataaatttgattagtaattattattcataatccgaaagtgactaaattgtcaagtaaagtaatattttttttgccaaattactgcagaattttaggagttctgaagattaaagcatgttgagatgaataaaagtgaattgggcaaaaattaataacaaagtcttgaaagaaatagaaaattcattgtttatagtattctgtaatcatgttccataacgtcctcattaattctgggagccataattaactcctcaagaaaaagagaataaaaaaatctaaaatgaaaaaatgttctatattgtatggacattgttcactttacaaaaatgttgcaatgaatgtgcctaattttgttgagtctcatgaagcattcagattgg

SEQ ID NO: 88805 - DNA, 1190 bp, Cannabis sativa
agagtgccttcatacctggtagacgtatatctgacaatattatggtcgcttttgaagtcatgcattatttgaaacgaaaaagaagaggcaaaaaaggcttcatggccttgaaacttgacatgagtaaggcatatgatcgtgttgagtgggactatctaaaagttgttatggtcaaaatgggatttgctagcaaatggattaatcttattatgaagtgtgttacctctgtcagatattctatggttcataatggtcatatcttgggtcctattattccttctcgtgagatccgtcagggtgatccattgtctacatatctgtttatcatttacgcagaaggcttttcagctttaatcaagagttatgaggctaacaggattatacaaggttgccatgtggctaatggggcaccttctattacgcatatgctcttcgctgatgacaattatcttttctgtcaagccacacctgatgctgctgggagcatgaatagacttcttcacacttttgagcttgcttcgagacagcgtgttaatgctaccaagtcttccatcttttttagtcccaacacagtaactttggttaatgagaaaatcacttctattcttggaatggtcgaagctactgctggttctttctacctggggcttccaaatatcattgggaggaaaaaaacggtgattcttggctttctcaagaacaagattgttaaccgaatcaacagttgggatggtaaatttctatcttgtgctgggaaagaaattttgcttaaaactgtcatccaatctctcccaacgtatgccatgagtgttttcctcattcctctgagtatttgccaagacattgagaaaattatggcaagcttttggtggaaaacaaaaggttcaaatggacaaggtatcatctggatgtcttgggatcgtatgtccgcacctaaagattctggaggtatgggttttcgacatctccatgattttaatcttgccatgttagccaagcaaggttggagacttctttgttcatcatcttctcttgctagtcaggtgtacaaagctaaatactaccctcgcactgattttctaaatgctgaattaggtcataatcctagttttgtctggcgtagcatttggagtgcacaacatttggttcggctaggagctagaatcactattggtactgggctttcaaca

SEQ ID NO: 88806 - DNA, 591 bp, Cannabis sativa
ttacacaatgagctgttttcgtctccccaaaaaactcatcaacaatctccatacattggcagccaacttttggtggggagacacaaaggaaaacaagaagcttcattggggatcttgtgctaaactttgcaagcctaaagaagaagggggtctcggctttagaagtctaacggagtttaatcaagcacttttggccaaacaaggatggagacttacccaaaatccttactcactcctagctcgggtcctaaaaaacagctactatcccaccacatcatttatggaagccggctgtccctcgaattcttcttgtatttggaaaggcatttgttgggggagaaagattttgacggaaggggctagatggaaggttggaaatggaaggaagataagagtttgggaagacaaatggctaccctgaatggaaggagctatgctaacccaaaatcccggagtagaagccaacacaacactacaccaatttatcacaatagatgggcagtggaacatggcaaaaattactcaacattttcatccaaatgacattccttggattcaaggaactccaattgacatgtatgtggaagactc

SEQ ID NO: 88807 - DNA, 532 bp, Cannabis sativa
tttggagttttgaccttgctccatcagattggctttagccacctcctgactataacttttcttctcagagttcttgttaccttcttcgatacgaagtcgaataatcaactcttccatagtcatctgttttcgcttgtatttaagatagcttttgtactccttccacgaagggggtagcttctcaatcatcacagccacttggaatgtctcactaagaattattctcttagaatgtatctcatgtaagatcacttgaaattcctgaacttgactaatcatagttttggaatctaccattttaaaatcaaggaaacgaccaacaataaatttttttgtgccagcatcctcagttttatattttcgatctaaagactcctacagttccttaaccgtattctttgtaagatatacttcatacatattattttttaagctattcataatataattacgacatagaaaatcatctttcttccaagctttaacagcattgatgacgtttgtctttttcatcttctttgagcacttgttc

SEQ ID NO: 88808 - DNA, 4408 bp, Cannabis sativa
aatccttactataaagataaatggtatgtttaaaaattattaaaaaaatatgtatatttttaattttttttttatttgagcccctaaaatagtgagttttagacacgagctaagcccgtcttaaactaggggccaccttgaataattgataaaaatagtaacatttcggactgtaatttgaagcatagaaacataaatttcccaatgaaaaacccactagtaaaggctcctattggatatcaatgcaatgattaaataaacattaatgtttttttaatatttttatatttgaacttttcaattttttgtgttttcggtgtcagaatttttaaacagtaatattataaataattaatttgatacacattagaacatacttaatagtgtatacatccaaaagtcatttatatcaagagttaaaaaatgtcactatattatagaaacaaaaccaatgtttctatcataaaattattttatttatatatgtgtgtaattttttaatagataatttataccaagttatcttcttcttcgaatattcaatttttttaaaactttgtgatttaatttaattttctatattattctaatataataatattaattattcaaaaaaaatataataataataattaatcggtgttcggcaccaaaagaaattgtacttataaagtataatattccattttctttaaaactatatgtaattgatccaattaatcaattaaacctaaattttaatgttaatgttaatatttaaattgttgaattattaattgaagaaagaagtttaaaaagcatgcactaattaattatctttataattgaattgttgataataaaaaatatatgaatgtattaatattgtagataaaaaaaattttaaaagacatgtatacatatatataaaatttaggtgagagtgagagctttagagcgatgataccacaagcttcctttctaactttaaattttatccaatttttaataatttatgttataaagtatattttttaacaatgaaacaaaattgtaaaaactcacaaaatacaaaaaaataaaattctaaatagttaaactgctatatcataaggtttaacaacaagattgtataaatatatagatatatgtatatatcatcctaataacacttataatataaaaataacattaatttagaaggtgaggagtcactcaaaagattgtgtatttgtataatcatcaaatagtttagacaattttcttatttatttggttgtctgttaagtctttctcattcaattatgtttactactaatcttaacttaaatagtagcatcaatacgattttgtcaagcataaaaaaaatatttccatatactcttctaagatttatattaattcctaattcgattacaacaattttttcattaacattgtttgtagtttattaaaaataataattttcctccataaaaaaaaattattttgtgtgtataaactaacttctagaattataatacatgctatacttcataagaaattctgtaattaatttatgtgctttatatagaattgtactttcttaaaagggaatttttttcattttttttttttgaggttttttaataaaaaaaaatatattaaaaatctcacatcatatttatcaatttttttttttgactaaagaagagaattcaataatcaaaacagaaccaatacaaacccaagccacaaccaaccggctccgctcaaaaccagctcaaaaaaacccagccgaacctactcaataagcctcataaccaaggctttttcaacatgaatcttcctcctattctttaaactatacaatctatacttgactttcttttatactatttacaattctcaacttggtataacaacaattattatccacacaagagttcctatttttccacaccatatacacagtggcagcagctaggtgaatcctcacacttgctttcgagttggccagccaaaccttccatcttgtgaagtccgaaggccatagttcagccccacaccagctaaaaaccagttgtaacacctctttagacaacctgcaattgaagaaaatatggctatggctttcttcttccatgccacacaccggacagatgcaagattcaagagcaatatgaaatttagcaaagttgtctttagttagtaaattaccatgaaccacctgccacattatgaatcggtgcttgggcaacgaaacattgcaccaaactgacttgtagaagttgtctatgctacgttgaattgtccccatgtatagccgagctgctataaatttccccttcttgacagcagctaaaacattcaacctagtatatctcttcctcaagtggcacattttcctccaataccaacttacatcccccttcaattcatactcccaaaaatcaactcctttcatatagatattattaacccatttgacccaaaggatatcatgcttgtccataattgcttaaatgaatttgccaagtatagatctattccaggttggcccatttttgaagcctagacctccaaaaggcttaggcaaacaaactaaatcccaaaatgccaaatggattttacttttctctcctttgaagccccataagaatcctctacaaagtttctcaacctctttaattacactttgaggaaggataaaaatactcatccagtagttgcgaagcccaaacaaaatcgaatgaataagctgaacacgccctgcataagacaaatacctcgttgcccaagttgccagcctcaatttaaccttcttaatgatagtctcacagtcttctcgtctccattttgttggtcttaaaggaaccccaagatatttgagcgggaatgttccttctcccatgtgcaaatcttccaagatcaccattttatcacctgtggaaactcctccaaagtaaacaagagatttatatttatttggaaataaacccgttacctcagagaagctttccaaagcaatcttaagatgatgaacacccataggagaacccttgctgaacaggattagatcatccgcaaagcagaggctcaccaaattaagacctttgcacataggatggaacctaaagatagtcttggtagtttccttctttagacgtctagaaagatactccattgtgagaaaagacaagagaggggacatcaaatccccttgccgaagccctttcttcccctgaaatttaccatgcaaccgaccattcaacatgatcgtatatgaagtaccctttaaacacatcattatccaattgacaaacttggaaggaaagtttaatccaactagcaactcctccataaatccccaatccaccgtgtcataagctttactgaggtctatttttacattttacagctctattattttataaaaagaatatttctttttattatagattataaaaaatgcaaatattttaaaaaaaaaaatgaaaaaacataccgatttatatatttattgagaaagtatagcaaaaaaatctatagcttctatcccagtattgagagaaaaaagaaaaaaataaatacaccacatttaataaattaaaagtgtttgcggtaccaggagtgtcgagttgagtccttgaagtcgagaagcttctgcggtaccaggagcgtcgagtctacgcgagtctggcgagttgagatcaggtcaatcaagtccagtgaggcgagtccagggagtcgagaccaggccagtcgagatccaggcattctgagtccaggcgagttgagacctggtgagtcccgcgagttgagtcctggcgagttgaggtgtgtcgagttcggcgagttgagtctagcgagtccggcgagttgagtccgtttcgttcacggccattgttaagcagttttcaatgatggttttaatatgaggatgaaggtttcatgtccttaatcgattctgatcacttcatttattcttgaagggttttaattcattattattagtttgatttttagttttctgtttaatttattggttttagttttttgtcttatttaatattttttattactttattgtttttccaattagtattcttatggggctagaagtattagttttgtgtgttgaaaataattaagttttccctttagtcttgtcttttgacatggttcttagttttttctagtttggttttttgttgggtttcgttttctttgttgctttcaaaattttcgctggttgtggtacgattatagaagacagtacaggggtgcatattcctattgaggaggaggaggaggttatcttgtcttattatgttggtgctacagatggtaatgactatgatgacaggtggtgtctggttggaagattcctgattgaaagacaaattgactttgaggctatgcaacatatgatggcttcattgtggca

SEQ ID NO: 88809 - DNA, 673 bp, Cannabis sativa
taattagattgttggatttaaacaatttggtttaattaattatctaatttttttatgtgttgacttatgtgtaatctactaacaggcgtagatcggaaaatgctggagaaactgagggctgcaagcgttgtaactgtaagaagtcaaagtgtttgaaactgtaagtctctgcatacaactctcttttcaattcatctcaaggtttggttgttttgtgttgccaattcctacagcacttttagtttcatgagatgtctctatttgtgcgtgattaaggagtttggtttcttatttatcagaagtaattgaacttttcatatgacaattcgatattcaattgtgtgtgtgtgtgtgtgtgtgtgtgtgtgtgtgtgtcttgtatttagattggtgtaaattgtcaagcctagaggattggtttgacaactcattaaatattcaatttgatgctggtattcattaatattaaattgagtaaatagatagtattgaattagcaaacaataaatctacaatttgggtatccggtatcgctatccgctagggaagtttagcttaacttattggtttgttaggtttaaagtagaaagaactcattcattgtgtgtgatacatgagtctccatgtgatagatccctatatcgtaatagcagttagcacataagtagtagca

SEQ ID NO: 88810 - DNA, 7422 bp, Cannabis sativa
taattatatgaaaacatcacaagaatagttacattcacatgtttaactggtttttttcattgtaaaaggaaacaattacgaaacataattaagtaccatgagatgacaccaaaaatagtatgcatcgctctattatatatactagttagtggcagaaagttagtcattagtgtaataaataaaataaaattactaagaaaaacacttcagcttactctcaatttctcacccatctcccctttgtttatgcaaaagtgagatggcttagaggacaaacggtggataaaaaaattataataaatcagcaaatcagtaaagtgagatgcctcctctttttctatcactcaaccacatgccaaaggagctctttaaaaccagtaaaccagttatgaagtcaagcatgaaactaaaaccagttctaaccttaagactgaatacacaccactacatctacacccaatcggaacgtatcttgccatactaatcatagttccttgttgtcttttcttactgaaccattgcctaaaactgggtacgtcctcaccaaaggtgccaaattgttggaggtaaatccagcaattgagaggcaatagccaggcaaatgatcaaaacttatgctaaagaacagattagttaactctagataagaatattgtccctatatatttgcaaaaatcttgtccctcccccttgggccttggggagccttggtatttattgtttcacaagccgtgcttcccaaatttaccagcttttgtaaagaaaaactaaaaactacatgcagaagcttccagcttacgagtgattaaatctctgaatatgcgttggtttaagagagttttttgtaaaataattgttctaaatttcacaaacatatactacattttattttttttctaaaaaaggatttgtccattctttgtttgttcaaatccaaataacagataatgaaattctttggaattcattctttatcctccctaaagtttaagatcaaaacggatagtgttcatcactacactgtgactatcaacatcattaaggagtacacagttaccgggaaaaaatttaagaatatatgatgaaccttcctggttggcatctcaacttttcttctcattcttccttactacaataaaataaggagctatttcgttgtcacctaggatgtttccacatttcataatcacctcagcctcagaagactttaaatttacaaacaattaccttaatttcttttcgataaagattaatgatcatagcaatcttcaatcaaacagtcttttaaatactccagaacttgaatcttaactgccacccccatttacttaaaactaactgatggtcatggttctagctttctgttttgtttaaagccaaagtcaaatggtcagatttccccaaaaagaaatgcacttcatcttcaccctacgagactaaattaatctacatcgagcaaaccttgtcaatgttaataataccctgacaaaatatatacaaaagtaccaaagcccataatttgggttggccctcgtatgtggtagatcgattttcatagcagaactctaacagtccaaacattgaagtcttcaataccagaaaaaaggaatactctaccatcagaactggtcttacaggatccactagcacaaacaaatacagttttgcaccagtctagactagatggcgctgcactgcactgcaccctaggagaacactgactggagatttctgaagcccagtccgtttgttttagctacgttgagaaactacactcttcaatcaaaatagacagtgttttcgcttattgaaaacttcataacgtaagaagctatatgaaattcaaataccaccaaagagcttctgttaaatatatcaaaattaacaattgaacttatggtaatgaattcaccaatgctaatatatcatacccatcaaattccttatacgttcaacaatagagtgatcgtagccaccactcagattcaagccccatcaataaatcacaaataattacatgatgaaaagaaagttctacctctcttgccctgctgtatcccatatttgggccttgatgttcttgtgatcgatcataagcgtacgtgtctgaaactcaacaccaatagttgcttttgaatccagactgaactcatttcgagcaaaacgagccaaaagttgggacttgcccactgcggagtctccaatcaacacaatcttgaatacgtaatcgatattctggttaaagttactatgtaaattcgccatttctttctgcaaaattcaacagagagagaagctgatcgagcaatgtgatcgccaaagctatactcgtgaatcgagagaattttttttctttttattaatattattttatcattaaattgacagagaaaatggttgtagacgtggtcaaaagaataaactataaagagttgtactaagtgagacttttaaaaactgagtcccttttttacatgtcgcattgtccctatcccaatacattattttgacataaatgtccctcaaaacaaaaaaattatttgcattacggttcttatatgtcggccaggagtcagaagaacagtttacgaacctagaaaataaaagcaaagagtttagacgcatgatcatatggtgatcacgaaacatggaatgatctcttcaacctttaaacgtaccccgtttctcacattggacaaaacgttatcggcagtacatgactatatttctcatccaaactccaatactctgtcttctgctttgcagcactacattgattcagataatccatatcacggccgaaagattcatgcccatgttatcaaaactgggtacgagcccaataccaatatctctatcaaacttctcatacttcacttaaaatgtggttgtttgacatatgcacgtcaaatgtttgatgaaatgcctcacagaactctctctgcttataattacattattggtgggtatcttaggcaaggacaagtggaggaatcgcttagtttggttcgcagactggttctttctggtgaaaatcctgatggatatacattctcgatgatattgaaggcatccacttctgctagttatgttccataccggagtagtctaggaaaaattgttcatgcccagataataaaatctgatgttggttcagataatgttctttacacggcacttgtggcctcttatgttaagagcgggaaaattggttatgcaagggctatatttgaactaatgttggaaagaaatgttgtatgctcaacatcattgataacagggtacatgaatcaaggcgattttgatgaggccaaagatatattcagcaaaacgattgataaagatatagtggtgtttaatgcaatgattgaaggctacagcaaactggttgaacatgcttccaaatcacttgatatttatattcaaatgcaaagattgaattttcgacctaatatttctacatttgctagtgttattggggcctgctcaatgctgacagcttttgaagttgctgaacaagtacaaagtcaacttatgaagactgaatttttcacacatataaagatgggaagtgctctaatagacatgtactcaaagtgtggaagaattgaagatgcgcgtaaagttttcgatcacatgcctgaaaaaaatgtattttcatggacttccatgattgatggttatggaaagaatggatatccatatgatgctctagagctctttcgtataatgcaagaacaccatcatattgaccctaattttgtgaccttccttggtgctctttcagcttgttctcatgctgggctggtagacaaaggtctggagatctttagaatcatggaagcagaatacttcctaaagccaaagatggagcattatgcttgtgttgtcgatcttttgggacgagcaggacgtttgagtcaagcttgggagtttgtaaaggcaatgcctgagaaacccaactcagatgtgtgggctgctcttctgagttcatctagattacatggttatgtagagatggccagcatagctgccaatgaactttttaaactcaatgctaatgatcggccaggggcatatattgcactgtctaatactctcgcagatgctggtaaatgggatagtgtaagtgaaataagggataaaatgaaggtaagaggcgtatctaaagatactggatgcagttgggttgctgctgaatttagtttgtaacatatatgcaaagaagcgatttatacaatatttttcattcaataaatgttcttcatttttgaactgctttgtctcggttggctaatgacttaatttacgcgaggcccttaatcttcaatgttaatactacaatcattctaaataggctgtaaaagtttttttttttttgcagatactattatgagccaaaaaataaaatgattgtgtactaaagcttcatttaaaaggttgctacgagtaggtgttgtatagattgaaaatgattgtttgatgcaatacacagttctgggtctgtgcaaaagaaaaaaacttaaacaccttcaataaagcaagatattgaacgtcaaaatgatgtcgtgccctgtttttgggtctgttgcagttatagtttcttaaccacctttgtttggattttaactgtttttttgaatgttttctttcccacctctcctcccagattcgttttccttttcttttttcttactttctgtgcttaactgctatcatcctctgcacttgtctaccttttttgctccttcgttgctatggatcccttgttaaaccgtatagattccaccttaactctcactgaggaagagagttctgttgctattttacccactgaagtggatcttgtcaccaatgtcaacaacaaccacattcttattgctagaattctaactgagaactatgttcataagcctacattctacgatcaaatggggggtcattagaaggggagattccctgtgataatttctgaatatggtgaagggttattcaaagtttcttttggatgtgcaggagacaaattccgggtgttgaacaaagaaccatggcacttccaaaacaacttagttgttttctgctcaccaagtactctgcaaaatgtcacaatgaacaatctagtgagtgcccccttttgggttcaggtataccgattacctttcctaagcaaatcaaagtctcttgccactgcacttttaaacatcataggggaattcattgattttcatgaggattctcttgatgagggttggggccctttcttaaggactctagttaaaatctctgtggacaaaccacttctccgtggcagaatgatcagtttaccaaggattcgggatgatttttgggtggattttcgttatgagcgattgcctgaattttgtttcgaatgtggaaggattggacatccctttgaaaaatgtgttgctttcatggaaagaatggacaatggtaatgatgatgatcttgaatatggtcattggatgaacggggcaaaattaccaactactggctatgataaatatcggactgactttgccaagggtaatgcttggccacttttgactcatttcgcccgtaaatctttgacctccacaataccaactctgtatattagaccacaaccccagccaagagtactttttcatggtaaatcttcgactcccactcattctctgcctcctcattctcatactttacctgcctcggtgtaccaatgaaaacttctttccctacaatcactactgctaatttgatttcttcatcaaacactcctattgtagcacctgctactatcccttcttcccaccatctatctgccctcacttctgctgcttctcttatgagcatctctgggttttctacatcacccgatataccctcccattctaccagaaccctctcaatgtcttccaatctctccactactgccaacttaagccacattttcatccctggcattggctcctctctcacccctcatattccctatgcaacctaccctcccactaccctgccaaacacccctactcctcaatctcagatacatgctattgtaaccactacaccatctctcatctccactacacaggcaccaaccttgatcacaaactctcaccctcaaagcagtaaagaaaaccttcatccaaaccgtatgtttaaaaggcaaactgatgcgcctaccatgaggcaaatgcttaagagatatcgcaatcaacaatacacagccgcaccctccttttcgtcgaaaggggattgctcacaccagaatgtttcctcgacttccaaggattctgatggtgactcagacgattcagcggagattgctttgcattcccgcaagggattatgaaaatttaagttggaacgtgcggggattgggaaacccgagagcgtaaagacatttacgattgcttgtacgccagcaatctccccatgttcttttcctcatggaaactagactcaacaataactctctcgatcgttttcgaaagcttttaaaattttctcatggtttggaagcacctcgggtaggacttagtggaggtcttatgcggctatggatagatgatattgttcttcagctcaatacttttggtccctgttattttgactcatggttaagtgtgctagtgataacaagtttcattccactgctttctacggagctcctgttgtgggaaatagaatggattcctggattttactccgtcggctatatgacattgcccccttgcaaccgtggctaatcattggggatttcaatgaaataattttgaatgcaaacaaatctgggggatctctccgtagtgaatcccaaatgacagccttccgaaatgttcttgatcactgccaccttaatgatcctcctttccacggagacagctacacttgggctaaggatagaatagcaacaagcactttaaaggaatgtcttgactggtgctttgtgaacgatgtatggccttctaattttcaacaaccaactgtctctcacttggactattttcattctaatcatcgagccattacattagaagtcttcactcaagcaactgctcagcaacacaaaagacacaatcgttttcgctttgagaaactttgattatttaaccctgacaataagtccattatctccaattgttggttatctaattgttctacggatcccatcagcaatgtgctacacaatttagaatcttgtgcaacatcacttcagcaatggcatattaaaaagtatgggcgaatgaaaaagaatattgcagatgctcaatcggaagtggattctctaaacaactctcctactcccacccatgaaactgctgctgctatcaagcataatgaatcggttcttgatgaattgttagaacaggaagagatgtattggcaacagcgttcacgtattgattggatgcaattggg

SEQ ID NO: 88811 - DNA, 904 bp, Cannabis sativa
taatctatgaattttatatatgatgttatattttcatatattagcaatgtgaaattctctaagattctttcaagatggtgattatattttgctcaccaatcttgaacaactcgatcataagcaatactttttagttcacattaatttttttggctcaccattcccgaattaaaagcgcctcttttgactgtctttttggaccacctgttggattttgatcaaatactcgttagagttttatttggttttgataccatattagaattgtaagatacataaagttctatttcaaaactaactgacaataagagaagtaactcataaaccttatatatagtgtcatatttccatacattaacaatgtgagacttagggatgacaattatatctgcaggggcgggggtgggggtgggtatggatttaaatgttcatactcgagtcaggttcaggacggggacgggagaatagatatccgccccgatatgttatatgtatatatttaaattttaaaatcttaaatattacaattaaaataatttcatatttaagttttttattgattacattaatgagacatttcagttttcataaaatacctgcggtgatgcatattaattatcacacttaactgctttaagaaaatgacacttaaccacttattttcgattgccaattatgtatctactaactctatttattatacattctacttatttttctttttctaatgagttcttatgatgtttttttttttttaattctatttgagacatcatttttcttttaaaaaatatctatgtaatgggtacccgatgagaattcttcctctgccggataatccccgcctcgtccccgctttaatttagacgggtattgaagaggatatggggtgaagttatgaagt

SEQ ID NO: 88812 - DNA, 768 bp, Cannabis sativa
  modified_base (715)..(716): a, c, t, g, unknown or other
cataagttctttgtgctagtttgatgcgttgtacaatatgggtgccccccaagtgaccatgcagacaagtctctttgtcactcgatattcaccaagtttcataaactttgcttgggtactgtcttgtgagggtatcatagtacgcatgtagaactaataaaataactttaaaaagttaatctgtgagcaagtggttcatagacaatacacaaaataaaaatattataattattcaataattggtgtttgttgctatgcaacttacataaattgaatctacaagcctatattacagaaatttagcttctaagatgtcaagtggctactctcgctcgcctacgaagctgacgccaaattaaaaaacagtgggagaccaagcctaagaagggtcatgggtgctagcgctttttgttctctaatgttatgcagatagaactgctactttggagtagagttctataacctagttattggtagtatttgtgaaggttttctccaatccagtattctggtaggagaacgagctccatgttcttgttgtaccttcctagattgtaggctcccttactagttatttctatatctttataagggccttcccaattaggtccaaacactcgtactggtgagtatttagtgtttaagaacactcttcggagcaccatgtctcttacgaagaattttctattggaaatgttttaccaggatctagatnnactaccaagtatgtttcattaacaccctagtatgaattctaaaacaatgaaa

SEQ ID NO: 88813 - DNA, 707 bp, Cannabis sativa
aaatgaactttatttatttatagcctcgcaagcattagttaaatatgtcaatacatagacaatcatctcacaaaacaacataattaagcatgattattccataatcacttcctcatcatctatggtattaatctcattttttattggatccttacgatgcttacaatctcttgcgtagtgcccagattttccacacacaaaacaatatggcctctaacttctttgaattggctattgtctttttttggacccaaatattttctaccatttttattattgttgttgcctttgtgatgcttgtttgagaccacattggtcttagaaacctcatctttaggttctttcacatttcccttatttctcaatctaaattcctcttcaattcagatatgtttttggatctcttccaacgaataatcctcatttttatggaggattcttttcctatagcccttccaagttggtggcaacttaatcgcaccaacttgaaatgccttgggaagctcaatcttgagaatctttaacttgttcacaatgatttgtaactcatggatttgaggaagattggaagaagatctttagcatcactaaaaaaaattcaaaatattgtgaaattaaacattttcttgtacattcttcctccaccttgtattttgcttccaaagcatttcaaatctctttcgcggatttagtattagtgtagagat

SEQ ID NO: 88814 - DNA, 530 bp, Cannabis sativa
aggttgtggaagatctcttttctcatgaagatgcatctgttatccttggtattccgctaagtaatgtgactaaggaggattcttggtattgggttaaagaaaaaaggggtgtgtactctgttaggagtgcttagaattttatttaagagttaaaaggtaattttacatcggaggcaaactttggcttttggaaaaaactttgacaacttaaagtttctccaaaagtcaaggacttgttatggcgtgctttgtctcagtgccttcctactcgaattaatttaaaagaaaagcatgttaatgtggtgaaagtgtgccctttctgcgatatttttgttgaatctgttgtgcattgttttatcaagtgctggtttgctgagggggtttggaaagttgctagttttgttgtagtaggatggaattttgattccatttgtgactggtttaaagctcaagctattgcatttgatcttgacaagtttggtagagtagtaatgttatgcagggcgatctagaaagcaagaaatgataag

SEQ ID NO: 88815 - DNA, 597 bp, Cannabis sativa
tcatttcatccataaaatgtccagtttcgacatttcaccagtgtcatattctacaacattaaaaaactctttgacatttgtagtgtctcataagtcactgaatatatatttaggaattgaacttttcatagcgttgaggctaagatgatttgattttttccattgtgcatgaaaatttttctgggcaaccatactggtatccgtacgatcaacatgtttttcttctcgcaagcataagtctaaattcattatgcctaaagtaaattccacatctcgtttccatgccttaaatttggacgtattcagaatttggatggaaacattattgttgttcacagaaaggagaccgaaaaattcaaaaaattaaaacttgatcaaactattatgagtaatgcaattagaaaatattgtaaagttaattggtaatgataaacactcatttaagatgagaatataacacacacaataaatagttaatgcttgtattataatctctctccatatgatgatcattattaaaaagaagaaaccatcatcatcattaaagaaatcatctaattctaattagtaatcaactaagttttttggtttgatctc

SEQ ID NO: 88816 - DNA, 598 bp, Cannabis sativa
  modified_base (154)..(160): a, c, t, g, unknown or other
tgcggatcggattggatccaaaatatgaaatccgcacttagtgtggattggatgttgtttgaccaaaaaagtgtggattggattggatgaacacccctactaataagggtattttttagggaaatttagatggtatactaacttttgctatttnnnnnnnaaaatactgccaggcggtattttttactttttcactgtgtttttttataactttcatactgcaatatactgtgttaagttttcgatggtgttctaatggtattttttagttgttttactggtgttttgagttgttttgttttgtgttctactaatgttttataaaaatacagtatttttgaaaacctttccgtgtaacagtatttttgtaaaagttaatccaaattcttaatatttttgtaaatttcctagcaccaaatttagtggaacgaatttcttctactcaaagtagcttgcacgaagacaatcgtaaaatactgtcggacttgtactctccaattattatttcaatgaaatgtttcctactctacacaattaaaaataaaattaaagaaaaaaacatgtagggtgacaggtgccttgtgatcctaatttaaca

SEQ ID NO: 88817 - DNA, 971 bp, Cannabis sativa
agaactaaaatagtttcattaatcgaagacatatcaacatgattattcagagcatccaaaacagcattgcaaaaattattaacaataataacccaattattttgatagaaataaggattcaaaccatcaaggccaggagctttgtccccataaaactgaaacaaagctttcttcaactcatcaacagcaaaaggtttggcaagaaatttaagttgttggctgctaattccactagtaatacccataagaatattatcaatagaaatggcattcgaaccttaaaaagagaaaagatctgtgtagaaacgaacaaagttatcacaaatatcattgaaatcattaatagtaaaatcattatctaaagtaatagatctaataatatatatatatatatatatttctaattgaagccttattgtgaatatatttggtgttcttatccctagccttaagccaaacaatcctagacctttgctttcaatataactcttccttataaagcacgacatccgaagaagattggatatctttagcctaggtaacatcagtttgggtaataagagaagacgagaaaatattatctaaagcattttgtaaatgcctaacttacatttaaaatcattattattcctactccaatcttcaacatttttaatgcaattagattgcatattaagaaaagaaacaaggtggtcactattagtataattagtattaacatgctatttatttttaatcagactataaagtcatgggtacgtaagctaataattctaaaaaaacctattatgatgagagcctttattgttattatcattaagggtagcttttaaagctctatgattcgactcaaagaaaggaagatgaaataaagattcatgagggaaaaggtcgagctaatttttattagcaaaacaacaatcaagtattttcaaaaggcttccatgttttcaagtgaacctattaccatt

SEQ ID NO: 88818 - DNA, 544 bp, Cannabis sativa
aaaaatcatcattgaacccaccagctctaacaaatgatccaataagaagagtttccttttagcatgttgataacaattttagagtcactttctattatcacaaaatgaaagaaattgcaaacttggaaccaaaaaccccattggtaatttctagccaaggacaatacaattcatctttattcagtcatcaagattggtgggaacttatgctttcaatcaaaatatttagtaacacttctaacccctaatctttttttcattttatatttatcttcaaggaatgctgggttatctcctttttttcatttaatattttattagaggaaggatatacaaacttaatgtgtggtatttctgtgactacattaaaagaaacatgtaagcaaaccatagggtattatgaaaaaaaaatagtaaaaatagtaaaaatggtaaatttctgaatgtaaaattagttttggagtccattatgttgttccttttgggctttagtatagtttattatcttttgggctttagtatagtttattatcttttgggcttt

SEQ ID NO: 88819 - DNA, 750 bp, Cannabis sativa
gcccgaaacttacctttttttacagcttgttggaggctttgctcgttagttctatgtctgagtctcaacagttttttaaagtaccagctcatgtcatttttgataggcatagtctagagattgttgtctttgatatatatggcatgaatccatctaacccaaagattatcttgtttgctggagactgcccataagaatttagctatttgttccattttcttccttctcgaaagccaaggccacctagattcttaggtaagcaaaccttctcccaagatgacagatacagtatgcttctatttcctttcatcccccaaagaaagtcacgacaacacttatcaatagctggagtaaccttttgaggaaggataaacaaactcatccagaagttcttgattcccaacaaaactgagtgaatgagttgagcacgccctgcaaaagatagatttctgctagcccaacagtttaaattcttgtttagtttatccaatataattccacagtcagctgctttccattttgtaggtcttagtttaacccctaaatacttcagaggaaaagacccctcttccatttgcacctcatccaaaatcgtcttcttgtcagtctccttaacacctccaaaataaatgtgagatttggagttgttagcagccagacctgttgcctcacaaaagcttcggaaagcattggaaaccaccttaaccgccttgatgttccctctatagaaaatgagtaaatcatctgcaa

SEQ ID NO: 88820 - DNA, 570 bp, Cannabis sativa
  modified_base (46)..(49): a, c, t, g, unknown or other
taggttgcaacgctaattgcaataatggtttctatgtagaattccnnnnaaatacaaaaaaaaaattatttttgaggtgtaaaaatgaaaaaattcctaatttttaactatatatttataaaaagtatagaaaataattattgattatataaatttaaaaataaaattaattattagttaagtatgtattttttaattattaataatcactaatataataaaatataaaatgtgaaattgatacatatattatcatgaaaataaataaatttatattagaaatattgtattacactttttttaacaaattatattgcactacataattaatcataaatttgattaataatttattgatggttttatacaccgctacatatttatcaatttacaataaatatttattggataaatataaatatcatttcaattagtagtttctataatcatatgaatcatcatatatatatatatataagtttttaaaagcgcagtttcgttctctaatactatataaaggaatgcacaagaagagtttaggtgtcattctacttttttttcttcctattt

SEQ ID NO: 88821 - DNA, 519 bp, Cannabis sativa
tattctattagtattaaactagtttatataatcacacatgtggcgtccctatagattagggtgttacacttgccatagtcaaggctaaaaaagaagtatcctctagccagagttcgaacaaggggaaaaacattcctaaatagggaatttcccaaggcggggatgaagatgtggatccttgacttggggacccaagcagcaatgttggacctgtggaagaactagaagagattgagattgacccagatattccgaccagaaagcttaaaattggaaaaagtttgttactcgaagtaaaatcagcattgatattatttttgagagcaaacctagacatttttgcctggtcagatgaggatatggtcggaaatgatccttctgtaattttgcacatcttaaatattgatcccaacgtccaaccagttcaacaaaatcgaagactattggacaaggagcgagccctagccctgaaggaagaggtagagaagctacgcaacaacaatttcataattgaagctt

SEQ ID NO: 88822 - DNA, 1067 bp, Cannabis sativa
caccgtaggggagagtctaatagatacaagaacttacaaaatacttatcataagagatcgttacggtgttaaatgctccaacgaataaccatccataggcataggtggcataggacgcttctctcggtgcctagaggttccctctccatgtggttgtgtagggacaaaggttcctttaccaaggggttgattaacttcccccttgggacttcaacctcttcttcaaaaattttcctcctggtactcatcaccattgttgtgaaaaaggtaaattaatgaattttccaaagggaaaataatcaaatcttcaccgtggcactttcaatgaaagcaacaaactgttgacgcggtttttcatcaactgatctaagaagatcataaaataaaagaggaccacaaaaaattaacttgactaataaaactgcaaaaaattaaatggacaccaaggatttatagtagttcaccccccatgtcgcgatggtaatagggctacgtctacttgtgatttattgattggattcgacacactagagttatgttctcaagagtatgtggataaatgtacaacaaatgatgtctaggtgaaatcttaatcgagatttatgaatataaggctcatgggagacttgatattcataaatatgatctaaattaaaggttgtaaagttcttgggaacaataaaccaataatttgtagaaaaaagtgtgtattaaatggtattttgaggtctggtgtcgcttgagtatggtggactcaatgaataaggtgatggaaataaatagtgttcttggcattgtcaagtgaacttcaaggggaaggtcacgatgaggaagatccaaaaaagagggaaaggtctctaaaggaagaagccaaaaataagccagatagaagaagaagaagaagaagaatatccctttctcagcctccacttgagatatatatttcactaacaaatcccgtataccactcctttttatgactaaaatattacaagtaaataaatatcaataacaatctccttatatctaggcaaatatcccacaaatattggacaattggttatttt

SEQ ID NO: 88823 - DNA, 609 bp, Cannabis sativa
taaaccagatgagtccctcaaaacggcacctaaaccaattatcttactagctttattacatgccgcatcagtatttaacttgaatttaccagcaagaggagcaatccactgatctgttgatgctgcaacttgtgaacgagatgctggatgtgtaattgaagtagcagcagagttatttgacactgactgagcttgagcagattgatattttccaaggtagtccgttgcaaatgcaagaactgcagcaggttgtttaggggatttatcatggaactcagcattcctctcataccagatactccagcaaatggttaaaaactgctcaaaatctgaagtcgatgtgttgtccgaggcatagaataagaattcctcagctgaagaagtagcagccaacttaaaattcagttttattgatgaaagtcgccatacttccttggctctggtgcacagaaagagtgcatgaggtatggtttcttgctgctgtttacacaaaggacagtaaggggtatttgcaatgtgcttcctgtgtaattctgcagcaactgggattgcattatgaaaaaccttccatacaaaaatccgaagcttagagggcaactttagcttcca

SEQ ID NO: 88824 - DNA, 848 bp, Cannabis sativa
gagagggaattgtggtttctacagggatgacttcttcatgcccataagtcatcgaatacagtgtgtgccctgttgaagttctcttcatggctctgtatgctcggaatactcgcaaaagctccctctaggcaataagttttacaagcttggagtttcttcttcaacgttatcttcaagatcttatacacagcttcgacttgtccattttcatgtggtttggcaacaaatgagaagctcttcacgattccgtgttggttacagaagttggtgaagtgatcactgtcaaattgcctcccattatctcaaacaatcttatgtggaagtttgaagtggcacatgatttttttgattaaaaagtccaaggccttcttgcatgcgactgtattcatgggctctacctctaccctttgggtgaagtagtcaacaacacctatggcgtattggactcctccttttttagtgggaagggatcctactaagttaattacccaaacaacaaagggccatggactactcatcaagatgatctccgctggtggcactcgtggaaccttggtgtatctttgacactgttcgcacttctaaatatactctatacaatccttcttcattgtgggctcaaagtaaccctaacagaggatatttttggatagccttggtcagaagtatggtctccacaaaaacctctgtaaagctcgtgtatgatagaacttatctcgatcctgaatatgcacctcaggttttgcacatataaccccctacaataaagcttcccatctagcatcacatattaaggagcctggtactggaccatccaagaagtcgctatgtttgccagaagctcccct

SEQ ID NO: 88825 - DNA, 650 bp, Cannabis sativa
aatattttagactccgactagacccggacccaaattccctcccatggccctagcgctgaacccagcctctgacccgaacttaattaaatctgaccctagacttaaacccgacttaaattaaatcaaaaaataattagcaactgataaaaattatataatcttaccaaataaataaaatgtacattagtaggaaaaaggaaataatcatatcaaatattaagtattgttgtaaattttattttttgttttaactgctaataagcattattgaaaagtaaaaattaagaaagaaataacaataaagaactatatggaaaatgtgaaacttatcttaacaaatgtgataacagaaccttgaacactattttcaataattaataacttgataactaataataattgttatactcacatttcaattaataaatatatgggtctaactgcgtgatacgtttagaataagggtaataaattaactcgattaattaaaagaccgagattcaataatctcctcataatatgaagttcgtatatgttcttctcaggataagttgatactttcaatattaaatttaaaaggttaaatactattttggatcctctcttttacaaaaattactaattgaaccctgtattttgttaaatgacaa

SEQ ID NO: 88826 - DNA, 902 bp, Cannabis sativa
agtattgttgatgtactcattcagagcagggacaaagcagcctttaattttatctcttgatttcgtcttcaaaagctcacgcaaccccatgagcatacgttgcccatcagccataaccatctcaccagattcactacttattatggcccaatttttgtgttcagagtcaaacctcaacaacgtaataatcccctgcaatatagagtcccaattccctctctggtgtagttttttggagtacagcatgctctccaaccgtacccaaaaataccatataatattccaatcaagtgagttgctgaaagtttcctttcgaataatgtcaataacttttaccaatttcttcttaagtttgctcctcccaacataaagaaactttaaatcaacccttgctgtattagcaacaacttttgcagtcttgataaacttcttaatccatttcacatcatctcctccatataagcaaatgtgttttccctctaggatctgaaacaaagcttaacacattattgtcaaatagttgacacgaaaataatagctttaattctaatataaacttacccaaatgtccttatttaagtccatgttgtccaccaaaaggtcaatggaccaactcatttcctcccacaatgattcttctatgtgagtagtaaaagggtatgccaggcttccccatgtacacatcatgtatattccattgttatgtacaatttttccttgtgtgtccaatatcactaacagagggttttctaagaagtttaaatgctcgatgatgaacttaacaaccattaaatccagttttgaaggattatccactgaataccattccatctggtcccttagcctcataaacaattccatattctcttcactccaattgttattagaatccaggttaattg

SEQ ID NO: 88827 - DNA, 1055 bp, Cannabis sativa
taataggaaactgcagaagcagcaccttatggtaggaatgaaaatctacttgatcttcttctttggcctcaactgcaattcaagttacaaaacaatcgagttttgaataaacgagttcataataattattaatcgaaacttggaaaagaaataatcaaagaaaagttcgtttacctggttgctgtgtccacacttcttctttctgcagttaacagcacgagggtggagacgggcatagcacctataagcaagtaacaaacactatgagcatcaatcaaagaagtttcaaacaaagcatatcgatattgatacataaagacacaaaaaactgaactagtatcaacataagacattacaagaacaccatagcttaaagcataacaggtaagggtaatgaaaacaaaggaaccatatagcttatagcttaaatgaatcattaagccaaatatttttaatgaggggaatcccaaaatccaacatttgttaattaagaaacaaacacaaatgagttgagcaaagaacatatcatattgtataaaccaaacatatatgttatattgataaattaagattatgacttacttgcggcaaatcatcttttcttggttgtatttcctggccaatgccattagagatggctcgatgattccaccacggagcctcaaaaccaaatgcaatgtggactctgtggaaatgacccaatcaaattcacacaattttgttaaattttataaacaaaaaccattgcagaagacaatacaaaattcaaactcaaaccctctaaaaaattctcaattttttaaccaaacaaacaataacttcactcaaatctatatagataaactcttattcgataatctcaaaaaaaatggtaaacctttctggatgttgtaatcagcaagagtgcgaccatcttcaagctgctttccggcgaagatcaacctctgctggtccggaggaatacctaacagaacaaaagcaatcgcaacattaatcatttgcaatcgatatttgccagcaacaataagaaagagaatgaatagagtgaaaactga

SEQ ID NO: 88828 - DNA, 509 bp, Cannabis sativa
ttatgccctaaaagtaagtatttaatggataatatattaaagaatatataaaataaaataataagataaatgagtacattaattgtagcatctcgcgtagatacacctagtaaaatctaacattacaaaagaatacaaggagtatcttagatgtaatacctcggcaaagaaactgccttgaagatagacgcgaaaagcgattaccagtatatgttgcgaggcatagaaacttagtcagcataactattttagataaagacaataacagttatataagttatttatctatcccatgtgctgtaaatatgaaatgtgagcattgtcatgtttcataaatagttatgaagataagatcaaagaagaataactgtctttcccaaacacctataaatagaggaatgattattggttaaaaatacacttttatttattttaaatgataaaataaattgagttttaattgatattttcatgaaattattgtaatatattttataaatgaaaatatt

SEQ ID NO: 88829 - DNA, 1056 bp, Cannabis sativa
gccacatggggatcatattcatcatgaaatcttctacttctcttcatcctagccatgatgactccaaaatttcagttgcttacaactcaagaaaagtctaattgagctttagcaatatcagaggaagtaattttcaatttacaaggaaggtgttttagaattttagaggtcttgaaaaaaaaaaatcaaagggtttttgggagtttgtgaatccttatagcaagctcaacaaaagaggagaagaataaaacttttcaaaaaatatatatattttctaccttgagggatgaagagtgcttgaagaactgatgaaaaaaattccaaaggcttaggctcgaaaagcttaaatgggaagtgtgagaaattttattgaaagctctattatttatagatgaactcaatctcctaatcctaaagcaattgagagtcttttaaatttaaaacctagattaaaggaaaagataaatgataagaaaaagataaaaatatatgttttctcttctcctctagctatcaaattcgaaattcctatagatataggaataggatttgtgaatttaaaaggtaacatcaactcttaatgctactaagattaagggaaatttagagctttaaaagaaaaaaagataaatgattaacaaaagatcaaagatcttttctctttttctttttctctctaatttttgaatggcacatatgaataggattaggattcaaatctaattaattataatgccacaagaaaagaaaaatagaacaagggaacaagggaactcatgatcctaattctaattgggaatgcttgaaaaatagaaataattgcctaagattatcaaaattgatgcccatatggtagtttgagaaaaacaactccacacaagtgtaaagttgaattgggggacaaatgttaacccgaaaaatttctccggtgatgtggacatcaatgtttgacatgtggaaagaaagatgacatcacggagttgagtagacccgagtcatagcagtcgacctgggatgggtctctaaccttgagcccaggttgacttcgggaactct

SEQ ID NO: 88830 - DNA, 598 bp, Cannabis sativa
aaagactcgagcattgacttatacttttcttttttaagtcattattataattttgaatcatccataataccaagagctagtaacggcgtctctcttattctttaacatgtccatgaacaaggccacaagagatgagtcaatgttgactggactattgttaatatgatcaatcatcaatggcatatctataagtggttggcttcgatagtatggctttattgtcaaagaggcaggccatgtgaagctcaacttgttcatttggtccatcctttttgatcaatacacttgctcccatttttatggtcaacaagtcaatccctacggtagtttgattttgatccaccaattagttttttgataaattgttttgagcattcttatttgatattagtattgtttaatactttttagatgtgttatcttataatttgtaaagttattacaattaataattatatgaaacacaatatttaattataccaataacgatattgacatgtaagaaaatattagtacgtaccaatgctacctttaatagtatttatcattagttatattttgaaaaggagaaatattaagaggcataccaatagtgtct

SEQ ID NO: 88831 - DNA, 517 bp, Cannabis sativa
attgatatgtggtgtaatataaaactatatggtgaaataaagaaattttattatgtattttagagatagaatagaaaaattgttaaaagtgctcttaaggttagcatttctttatttgttattagcttaaccatcataccaaatttattattttccagatacatcttttctcaattttttttaaagggcgattgcccctgcttctatgtgggtaagtatcaggtgtcatataattttatttaataaaatgggtaattaattacaaggcgccacataacaataccattatttttagagtttatatttggtcactctctctcactacactaaaatttaaacttaaaaagcaaaattccaaattttaagcaaaaataaccaacttttgggcggattttttgggttttgttttgtacccaacccatacatactttttgagtatgaattcgagtttgtgcgggcgggtgtggacattttgggccccttatagtctcccttccctacagcttcaagtcgggcc

SEQ ID NO: 88832 - DNA, 1378 bp, Cannabis sativa
  modified_base (32)..(49): a, c, t, g, unknown or other
aaatattatgtcattattcacgtgtcattttnnnnnnnnnnnnnnnnnnttaattttttaaaaaaatataaaatttaatgacttggatcaataaaaaaattgtcatatggcaatttacttaacaattaacagttaagtacctacaaaagttctagaattataacttaagtattattaccgtcaaaaattaaacttaactatttatttgtaactgaaagttaaacttaagtatttataccacaaattattcaaaattttaaatttcattctcgtttattttctataagcgataaagcgggaaatctccagatggagtgagaataggatgggaaatctcctaatagaggtggagaccgttttagagtgttcattcgtttcaatttacttataatgcattcaattcgtgcaaattttttattttaaatttaatttaatttgtacaatagttctgtgataatataaatttgattaattattttgaattcattactttcttttaatttaaataaaatatttatctatattaatttatatatctatataaaactgagattttagaataagagatgatgttttgaatttgttttaatactatttaattaattattttctcccatttactcttttttttattctaaaaatttaacccaaaaatatctaaccctaagcatttaaaaatatctacatttttttattctatacaggtataaatatctacactaaaaaattgcttcaatactatttatttatttatattctccaattgatatctaaactaagcctttataaatatctacatttttttcttttattaatttataaatatctacacttagtagttatgcctaattattaaataaaaatatctacacataatataaatggaacactttgaattacccttactaaaaataattatctataaatactaattttaaaaatattaaatcattaagttttgattcaataataacagaaaatttctaatttctaatttcttaaaaaaaaaactacttaattatttagattttaactacttaatttaagaaaaaaaaatgcattatatttacactatatcaaaaatatatttttataaaaatacttaagttaaactaatatttttgtatcttatttttttgttgaataattttttttaatttatttcaacaaacaacgccagctatacaatgtaaaaataagagatttttttaattagataaaaaaaaaagcataaaaactcataatttatatccatatatattctattaactgagattttcggcaaccaataattaaggttgtatgaagtgtttagtgaaagtttgttgcgataattttgcacacgcaagtgtacgtatcgtttcaagtagtagactca

SEQ ID NO: 88833 - DNA, 541 bp, Cannabis sativa
ttatgaaattttaatgctttgttcagggaaatagttagtaattatacaaaaaaatcataatttttaatacttaatatttaaaataaaaaaatttgagtaattacacttaattctcacgcggcatgataattaaaatgtgtaattgagacctctcgattatttctaattatacaattatagtataattacgtagtttattaaatatgtaaaattgtataattaattacttttaattatatataatcctaatatagtgtaataaaattatataatcttttaattaaattgaattttaatctcctcgtgactttctaaatacgttctaattattattattatgtatgtgatgttttttttttttgaaatagggtatgtgtgatttttatttatttattttcttaaatgggtgtgtgtgagatgttcaagtatgtatgaattggatggattaatgcctttttgatggagagagattctttagaaaataaaatttccattatagttttataaagaaaattctaaattttggattctttgccacttc

SEQ ID NO: 88834 - DNA, 664 bp, Cannabis sativa
tttaatcattgatttcttttgttctcatatttttttcaattattaatttgtgccataagaaaataaactccaataattttttccgaaaattcacctagcataaactactaattttagaccttaatttggcataaatctctataccattcgatgattattgcacgtggtttgataagcagaatcaattagcacataggcatcattattaagtgtatgtggcgactagtttaaatgatttgaccgaataaatgaaagctttttccattttgataaaaatattatgatagttgttaagccatatcagtggtgccaacacttgatatgttatttatgttacaattttttttaaataaatttatgtttcaatttaatattgtaacatattttagtttaataattatagtaagatatcttttcttgttgttatcgattaagagatcactttatagttgggtggcactattatccttaatagcataatcatgtgatttttgttcataataaagaagtgctaccagggtcgttttagtcattaacttagaagacattgccctaatattccattaaccataagttagtgatcaaaacatgaaatagttttggtttaattataattgaaagggaccaatttgccatttatcacaaaaagggtagcaaagagtgt

SEQ ID NO: 88835 - DNA, 771 bp, Cannabis sativa
ctaccaactgagctagacgggccttttgttttgtataaccttttatataataacatagatttatataacaaaaatattaacaaagaaataaagtgaaattaattaataattattggttaattaacttcatcttctcctattctttttcgtatatatttccattaactttgttttctgatttaaattcaaatttatatcatcaatattttataataacataattatcatattttattaactaatgtaattttccaacgttttcataaacattttatgttttgttaaaaaaatagtattattaaattttaatttattttataattaattaaggtgatagctaataataaaattggtaaaacatatttattatgcatacaatgtctatttttctttaataaaatatgcttacagcatatacataattaaagaacaacaatccaaacataaataaaaaaaattgttaacaagaaattgataaaaataattaatacattttttaaaaaaataaaaaataaatttaaaacaaagaattacaacagttgctttctctgaatactgtcaaaatacaactgtaaaaaatttgtcttgttattgagatcaaaatagaactaatgtaatatagttgggctaaaattaaatacaaaatctattaaacgacttttttttagtagggaaaaagcataatatatataaagttatctaaattccttcaaaaaactagaaagttgtaagttatacagaccaacctacaaaaatgcatgtgcacccttg

SEQ ID NO: 88836 - DNA, 570 bp, Cannabis sativa
  modified_base (474)..(480): a, c, t, g, unknown or other
ttttatgaaatttatatttttttttattctaacatattttcatatttattcccacataataaaaatttatatttttcatttttattcctacatatttttattttatctttataagaatttttttgtacaatacaaataatattcttcatgaatatacttattatttttcattaaaaagaataaatcaaattttggcccctattatttttggctgacctcgccatatatgtttacaaatagaggaatatgcagcaaaactagtccctttatattttaatttttatatccttaattttattttttatttttttggtaaaactcttttaaatttacatttttgcaaaattcaaatttttttcaaatttaaagtttcatagatattataattaaataccaattgaattactactgtatcgacttcaaagttatattgttacatatatacataggtatatactagatgagagttacgtnnnnnnncacgtaaatattagttttatataagttttagtggtttttgtttaagaatgcagtaactgagcaacggcaacaacaatggtagataaatct

SEQ ID NO: 88837 - DNA, 733 bp, Cannabis sativa
ttgcagtcattctctaattcatttatctcatctctaatgccaatacaatagttggatctgcagccatggattaaaggtatcaccttcactcataactgttgctttctctgataccttctgtaatcccatcttagttcgtatccttagctttagcttttcattcaagaggtttccagagaagaagacagttgttgatgctgaaaattagctcaacaacaaattgctattaagactttgaattctttacaccatgtttgatctagtcgatttacacacttaatcggtttaaatattttttctctcaattcaattggtcgggtctaggttatcgattctctgaattcaaatatgaatttgagagtgtattccgatagagttttggctagtttggtgtggtcaagaattcgtcgtcgtcccctttttgaatgataggatctggtatttataggcgggaagaaatgcgtaattcattcttctttcctttcttgatttctccacgtgcgctaattttcttttgttgttcatcactccttctcttcctttttctagctctgctctgcatttctcttttcgtagagttctgctcttccgtttttgagtttctagctctgcctctatttaatgaaatgatacattttacattaagtctgccacattataggatcatctttttatttttatttatactttctaaaaattacttaattaccttgaggcttatttttatctctta

SEQ ID NO: 88838 - DNA, 841 bp, Cannabis sativa
attttcactaagcaatgactaattgtaaagaaaagaggttttgagatctatttgttaattaagaaattttacattgtctaattaataaataatataaatggcaattgatgtgtgtcgtatgccctatcaaatttactatttttttctaatactttcaattatttcagtataaaagtaagtacaggtcgaacccacgaggactatgtttattcaattattcaacaattaatgataagagttaggaaaagggggttttgagattaagattaaaatagcagaaataaaaataaaacagacaaattaatatttagattttgacatgagaaactaattaaaagttatccgcctccctcaacaaccattcctaattcctattaattaatgtaatttcagtttccaaagaaactattaatcccgcagataacgctgaagcagtcaattatctcattctccttattgtatgtaaccaaggcgaagcgctcaataattaactcttttaccttagtagtaaatctacgaaacatgcaatttatttaacttagataaagctttgagttttatggagatagactaatctagacaacaaatcaatgaagcatataattcatttaacctaggttctattcttcgatcatcacaataaaaattgtaatttgtcacaaacacttagaatcctagactattaggtgaatagtaatcctaaggtgacattagattaaagtaaaacctaatttagaggctctctaaacaagattaaaacaataatcataacattgacataaaataattgaagtgatttgatatgatggaaactagaaattaacattcaataatgaaatta

SEQ ID NO: 88839 - DNA, 1591 bp, Cannabis sativa
  modified_base (60)..(64): a, c, t, g, unknown or other
  modified_base (152)..(153): a, c, t, g, unknown or other
gcataaaacccaacagattatcctatcagttaaaccatgtgtactgataaatcataggannnnntttaatcacacaatcttgattgctttccaatgtcttaacaacagaataaacaagaatatcagtgcgataaggatttggatgaatttannaatcaaataaataaataaatgatcacatgaaccaaataacacaataaataagttgaaataaaattttattctttattgataattgaatagaaaatattacattaaaatagagttttatttagggcacaaagcctaacaaggtaagttttagaaacaaacacgcttttcaactttttttataattataatgcttgtgatattaaggagtttcttttgagtggttttgatttgtttcaaaaagagaagctgactattttctttggtatactttgggatatttgggatcatcgtaacaaattcttctttctagataacaggactctttgtacgaatatatggaggcttttataacttcttacttgcatgaatacaacaaagctcaagttcaagaaatttcttatcctattagccctccacttgagaaagaaccctgtgctcccttcccttggaaagtataaattgagcgtggatgctgcagttaagagccaagataacaagcatggatttggtgcggtagttcaagactcacaaaacaacataattgcaggtttcttatctccagcaacctcaggccttcctcctatctatgcggaagtagaggctttttttggggccttacgtttgtgtaaggcggttcatttccctaattgaaattattgtcatagactgtcaagtccttgcctcgaaaattctaaagcaagagaaggatcacttagccctttccgatttgatttggaagatcatccaatctttgtccccttttcctaatgtagcaatcaagttcacatttagggacaacaattttatggcgcacgaccttgctcgcagagcattaggaacagataaagagcttaaacaattgtgtttcaagtcctctttagatctttgtaacatgttctcttttgctgttgttctttgattacaggtcttgttggttcaaaaaaaaaaaaatcgacatttcaaattcgcactaagtaatattttgggttcccacgaaatattgaaaagaaataaaataacccatcaaactttaaaaatatatataattaggtgcttcttagtgaaaaaaaaaacctccacgtgtagcgtttccaattatatctctaacatccatctattggacttttctagaggtcttgtagtaaaaaattcttatatatatttgtgatatgtcaactttggcatgtgtatgcatgacataaaatatgatatgatataattatgtacatatattgcttatatgagtctattttgtatttgttatgggaaattaatgctaattggagattattatattgatgtatatactttgacactatattaatggtgttatctataactctattaaaagagagaatgttgtttttgggctttcttaaagtaaatgacaaaaatgtcattgattttcttaattaattacttttaaatccttctattt

SEQ ID NO: 88840 - DNA, 781 bp, Cannabis sativa
acataggatcatcaccccaatttcttttaagctgttgcagcaagtggtaggcggttttgacagtataaatacctgcccgatcattgagccaataccaggagtcttcgaaagcagttggggagagttggagttgaagaatgaggtctttgtcacgatcgttgaagagatcattcaagatatcgatgtcccaatctttgacatcttgttggagaagagaggaaacagcctgttggagaagagctgggtgagatgaatgaataaatccatccatttcagctggcagccaagggtcgtttaagatgctgacagaagtgcctgatccaatgagttttctgcagccagcaaggactagatttttagtttcaaaaatactacgccaaatgaagcttgggtttccacctatctccgagttaaaaaatgaagtgtttgggaagtaacgagccttgaaaatacgtccaacaaggctattgtgattaaccaaaagacgccaaccttgcttacccagtaaagcaagattgaagtctctcaaatttctaaatcccataccaccttttgatttacttttgctgagatttttccagctcttccaatgaattcctttagaattttcacccttagattgccaccaaaatcggttcatgagagtttccatttgattgcaagtggctttggacaggagaaagacattcatggcatagctagggagggattgcaccacagatttgatcatgacttcctttccagcacgagataagaatttcccatcccagctttggatcct

SEQ ID NO: 88841 - DNA, 1093 bp, Cannabis sativa
attcttctttctcaaaagaagtatcttcaagatttactttgcaaagctgagatgcaaggtgccaaaactcatagcactccaatgaatagtggtctcaaattgtcaaactatggcagtgatcctgtgcttgatcctactgcatataggtccattgttggtgctttgcaatatgctaccatcactagacctgatattgcttttagtgtcaataaagtttgtcaatttatgcataatcctcttcaatctcattgggttgctgtgaaacgaatacttagatatttggcaggcactcttgactatggtcttcaactaaacaaagtctctaatttgcatcttgaagcatattgtgatgctgattgggctgctgaccctgatgataggagatccaccactggtttttgtgtattttttggtgaaaatttggtctcttggcaatctaagaagcagcctaccatttctagatcctctacagaagctgaatttcgaagccttgcagctgtggtttctgaaattacttggctccaatcattacttactgaacttcatgttcctaaagctccttctccaatgatttggtgtgataacataagctcggttatgctagctgcaaatcccattcttcatgcaagaaccaaacatatagaaattgatctatattttgttagggacaaggtacttaacaaagacattcaagtgcaacatgtccctgcagaacatcaaattgctgactgccttacaaagccaatctcaagcaatcggtttccagcattaaggagcaaactcagtgtctcttgttcagaggacacttcatttgaggggggctgtcaagagaagaagagttagttggtttatacaactaactttctattattctattatctggtttttaaccaattctgttatagtttgttgtattggttcagttgtggtttttaagtctttcctttctcttgtatataaaccttgttattggctattcaatacaacatacggaattcatttctttcattctatttctctattgtttacaaacttatatagaaaacatgaaaaaaaaaacgatttacaataaacagcgtagaaatactaattt

SEQ ID NO: 88842 - DNA, 2043 bp, Cannabis sativa
ccttgtcccattttcatcttcactttcactaacaagccattcatcatcaggtggaaactcatcgatcaacaaaggatcttcttcaattgattgagttgttgaattgatcttcaagaatctgtgtttcaatcttttgttgaacattatgtatgccaatgaatgcattcttaaggtagtcagccgatttttttcttgtatgaatttgattgaaagtactccaatttcgctcgcatatcgatgccgagcaagtaagacccaatactttgatgccaaatttctgtaactccggtgtttgatctccatattgagtccaccattccactaaaagaaagaataattacttatttttattattcatactactacacattttgaaaaactactagaaatagatttagacatttaattacctgctgatcgtttttgaaatgtttgttgagctaaggtcaatccaaagaacccttccttcttgtgaaaattgctacattgaaggtcagctttcattctgtcttcggggtccggtataagtctgtccatataatgaaacaaacccaacttgatctctggatggttggaaaatccttgtgaataatgacaacggggattcaaaaagtacgcagcgacatgcaaatttttatgtaactgaaatttccatttctcatctatgatttcccatatctttttgtagtccttttcttctccacctaaagatattgatatttttttcttttgctgtatccatagcattgtagagataacccatagctggctctttatcaccatcaactagcctcaacacttcaactaaaggttttgtggtcttaatggcataagacacacttgcccaaaaatatgtgtctttcaaaaccgtgtgccttacctcctttccatcaactttagatgtctaaggaaaagttgcctactcttcaaaagtaaacatagcttccaaaggttgcctcacttgatttatgctttgcaatgtaagaaatgcagttgcaaatctagtggcagcaggtcttataatatctcttttgacttttgcaatatttccttgtcaagtttaacaacatttgatgattgtgaaggaacttgctcaatctttttcctttggacaaggcactttggtgttgtggcaattcaccaattttttcaagcatcaaatcaagacaatgtgttgcacatggagtccaatatagacaatttcttttctccattaacaatgtgcccgccactttgtaggcactagcattatcagtgaccacttgaacaactagatgctttccaatttcttcaatgacatcatccaaaattttaaataacctcgatgcatccttactaaatgaagaaccatcaatacttttaagaaacatagtgcccttgggattattaactaaaatgttgattatgcctccatttctgatgtctgaccagccatcagacattattgaaactcccgttagtggccatgactgcttcatatcctcaattatagcatttgtagtattcatctcctccttcaatatccatgtcctaagctcatacatactcggaattttcaatcccctcccataatctccaattgagcgacacatattgatgaaagaaggactcttagccaagtggaaaggctaagcattctcaaagaaacacctcccaatgtccatgcaaactttatcatgcaattctttcgcatttttaggagttacttgggtttgttcagtttccgtccctccaccatggctgcccataaacctatccattgggcctcttacacctctactaggcatgggggcagaatccttttgagaatagtaagcacccgacccaatcatctcttcaaaattcatttgactaacatgctttgtcaatgttttttattttaagtgctccataaattcatcctttacttctttgggaaccttcggacatggtttagcaccttttctagtttcagcaaggtgttgtttcaatcttgtcacaccacccttaataatttgcttacaatagttacacttaagataaacaaaagtttttttttttttt

SEQ ID NO: 88843 - DNA, 551 bp, Cannabis sativa
  modified_base (500)..(522): a, c, t, g, unknown or other
taatatttatatttattttctactgaattgattaatagtttcttttcaactacccaggtagataatttgttaaaaataatatgattattatttatagggtttaaacattacatggcctgcatattgagagtaatagaaataataatagtaatacaaaataaatttgttaaaaataatatgattattatttatagggtttaaacattacatggcctgcatattattgagagtaatagaaataataatagtaatacaaaattaccgataatgaaactcatcatgattatattttaggaatcaagattccggttaaaattaaaaattggtgttccatactgtattaaacttattaattaaaatttgacacatcaactaatttaatttatattaaatatatggccaattaggatttttgcttcctgaactttaacatgtactaaatcatggctttcgaacttttaaggtagttaaaaatactccctgaactattgagattgttnnnnnnnnnnnnnnnnnnnnnnntttagtaaaaaaaatttaacatggatgaa

SEQ ID NO: 88844 - DNA, 1394 bp, Cannabis sativa
agaggatacccagccaatttatatgttttactatttgaatcattccccttcttatcgattccttttgtcttagactgtgctttcaatttagcacccttcttacctttcaaaccaagcctcatatagtacaatgtagagtcataaacaaatcttccccatgagaaactatcaaactcacccgatcctatcaaatataacaacccgttactaacatgtttagctggaggtttacttatcaaatagttagtaaccaaatacaacacgaccatcctaactgcaaactcgtcatctttgaaaatactatttagaaaattctgcttaacagctccatgagtcatagtcatatcactaaagtacttgtctacaaacacatctcccttcccgacatacttaaaaacatatcaatatcactcttacacaataaaccactaatagcagcaaactcctctaaaccaaaataaaccgtatcacgaccaaaatcaaaccacatctctttagaatttgattgatggactccctattcaatgcaatgtgaaaaatctgatgttacatcttataagacttaatatccaataaatacccaaaataagttgaaataaacataacacgcttcttctcaatcaattttcctcttatatctactaaaacatcatcattatgagtccaaaatatgatttactacaaaatttttcctctggcttcaagtaatatttctacaactgcaacacataaaaaaaatataaaattagaaactgaaaagtataaaatagcataatcaagaaaccaataaactagtaattttaaaatatacaatctacttatatgtcaaaaaagcaacaaaatagaaacttaaaccacatacaacacatgaaaagcacctacactacaaacaacaaacactaaagcactaactacactatttcacaataagaaactaaattgtaacttgccaacacaaatacaacatcatgtataacacaaaaaatatataaaaaacatcaaaaaaactcaagattctaaacaaaacaccttttaaaaatataaaaaaacaaaaataaacctctcatataaaataacaaaccaaaacaaccaaaactcataaatcagaacaaaatctagaaaaatttgaaacaacaaaaaatgataatgaaaaataatagaaattaaactgtcacttatcaacatgcaaaatcaaaacaacacatcttcacaaaaaaataaaaaataaaaaaaaataattaccttagctcttgaaggaatcgcaatacgactttcatcctcagactctaagtctccatcatcaacctttgtcgcactcttcaactttaactttttggatttacgatcatcatgagatatatcaggaacatgattatttttctttgccaaagaac

SEQ ID NO: 88845 - DNA, 582 bp, Cannabis sativa
catagattttatttatctaagagacagtttcaactattctagaaaagataaaggccaagcaaagaattccttaggatcaatagtgagaggtctcatatatgcatatgcattatggctgagcatcagtcgatttggttgatttttttacaaataaaaatccaaattttgatttttctgtttggattggttcaatctgaaaaccgaccgaccaatccaaaaaaatccttaaaaccgaccaatataaaccgaagtttggtcggtttaaaccgccaaaattgatttttttgtgtaaaatataatcaaatttattttgtaagcacattaatacttgtttttctccttaattaaccaatttcatttatctaataaagcttagttagatattattaattttggtcaacaaccatcatcaacaatgaatatcagaaatgtatgtaagtatatataaaaatttatttataatcaaagaaatgggtagatgcagcagaaatgtatatataaattcttttacactgtaagaaattgctctgtttgatattttttttacagaacaaaatcgataaagcataaaacaagaacatt

SEQ ID NO: 88846 - DNA, 998 bp, Cannabis sativa
ataagggagtttcgccaccaaaaataaagacaagggggttaagtgtataaaaatcaaaacataagggggtttcgccgcaaattgctctaaaaaatattaatggacacacatgatgcctaatacctttgtgaggtataatattgttagtagtgtaatttaatatcaggtttaatttattttactttaacaaaaattataaaaaatcgctaatcaattataggacactatcttacagtaatatttagcatattgatgtcccataacaatattctttcataaatattatgtttggtatgatttaaaaaaaaaatccaccattaattttgtatccctttagctattactactactatagccataatcctatagctactaccactactctatctcttttttttttaacccaaatcttatacctatttaattctaattgaaaaattcctccaataattttgtaaccatatattcaatcttaaatttccaaccaaaaaaataatacaattttagggtctattataaggtgaagggtattatggtaaatgtggaaaagggtagtgtggtacccatatggtagttggtgttgacaactttgaagacgccaaaagtgaagagctttttcatattatttaatttaagatgaagtagtgcttcatccaccatcactctctttctctcacctaacaatcttttacatttgacaacctcaatggtgttctttcctattcaactatattaactccatcaaacgaaacaagcctttcattgtgattctctcctcactctcattctatatttggactttcgcaataaaagcacacaacacaacctttcacaaattaaaattatagcaatttgcagcgaataaaaactctcttatgtatttatttttatacatttaacccatttatttaatttttgtgacaaaactctcttatgttttaacttttatacaattaactcccttatattttttcttttgtgacaaaactctcttatgt

SEQ ID NO: 88847 - DNA, 1440 bp, Cannabis sativa
atgttccttctcaacagaatctagtcgacattctcacaaaacctctactcacaaatcagttttctacattggtctccaagatgggtgtacttaacatttacactccatcttgaggggggctactagaccttagagagttagttgtttagtcggttattcagttaggaatactgtcagaagtttgttgtattggttgtactcttgagctgagactactgtattgtattgcctatataaggcctcaaatgtaacaaacattttattttgttcaatacaatttttcctctcaaaacagcgcaaattactctgcatctggttcttgttttctcataattagagagggccctccaaagaaaattcttaacatttggaggaagttttatataccaaaactttttccaaaaaccaaaattatcttgtgaattccatctcccgttaagcacttgcaacgcacagtaggcacttttaactgaatagcttccataatcttcaaacgcccaataccatgagtccatagtcggagttaaaggcaaaggaatgttgcgaatgagatcaatatctctcaattcaaatagatcctccaatacttcttcatcccaacacatattttcatcttgtagaaggttgaaaacagaacaatgacgaagagcctcatgagaagaagtcacatacgaattgtcctttgaaggaagccacggttgattaagaactgaaatggaagtacccgaacctatcctccatctagctcccatttttacaacttcctgaccctcaaaaacacttctccaggcgtagctcggatttgaacccaacttagcatcaaaaaacgacccttgaggataatatcttgcttgaaacacacgagcggcaagagacaatggatttgttaataacctcaaaccttgcttcccaagcattgccaaattgaaatcccgcaagtttcggaagcccatgccacctttgtgcttatggaggcataacttatcctaacttttccaatgaataccacgaccttgggaagatttaaaatgccaccagaatcgccccataagacgatcaatatccttacaaatctcatcagggatcaaaaaaacactcatagtgtaggatggtaaagattgaataaccgactttagaagcacctccttacccgctcttaaaagtaacttgctatcccaactctgaattcgctttctaactttctccttcaagaaaccgaaagccacattcttgttcctaccaatcacacttggcaaaccaagataaaagctcttctcatcagcagagcgcatgtgaagattggaaaaaagtctaagacggatcccatcacccgtgttggagctaaagaaaacagaagacttacttagattaaccttctgacccgaagcctgttcaaacttgttaagaagctccaggacacgttgagcctcctccaaagta

SEQ ID NO: 88848 - DNA, 792 bp, Cannabis sativa
  modified_base (77)..(77): a, c, t, g, unknown or other
tacaacaaggtaccgtgattttctatctaggaacatataatagtattgacctcatcggttgtatcaagacaacagangcagtgggaccatcttatataaaataagatgatagaacattttggaatgatcattatctcctctactttgctactttgttttcagatttagtcatgttcttagagaagtagtattttgttgaaacaaacacctacttatcttaatgaccataagatggtccaaccctaatcacttagaatagttattaaacatgcaaacttaagttaaccgttttagctttcttaaatttatgattatgacatccctgaatctagtaatggtgtacactaagtacacaactattccatcattctgaagtttttctatcactagggtatttctctagaaggacttgaacactagtttttatattataaattgggatattggcagcaaaaccacccgaactttatattttttaacacttaatcacataaactgattttttgacagtaaaacctaccaaacttacattatgttttgctttttacacttctgtccaaaaaccttagttaagtgtcacagtagactacgtacgtgtacacaaatacacgtgataaaattttactggtccgcctaattttaattttaaatataataaaaacaatataaaaattataaaaaaacaatttataaaaaaaaaaaatgggaaactttttttttcttttttctctttctctttctctttcttctcgaaaaaccaaaatcccccaacccaacttcttcatcttcctc

SEQ ID NO: 88849 - DNA, 1027 bp, Cannabis sativa
ataaatcagtattaatagcatccttattggtaccttgagaggtaaaaagagaagattaatatttaacaacttctaatcctatatccttcttcgtagagaatgctttttggtgaaatagtttagtgttttcatccccaattttgagctagtctattctaaatctcttgtgctaatgtacttatttagggttcgtttagtacgtcgtattgtattgtgtttaattgtgttagtttatattgtattgtattagtattatttaatataataatatatttggtattgacttgtattaatagattgtgtaaaattgtaatatatttttaatacactcgaccccaacaccaactacgggtaaagtccacgtctgggtcttgggtccgggtctcgggtcgcgggtccgtgtccaagtccaggtctgggtccgggttcagagtccagagtccgagtccgggttccagtccgggtctgggtcccgatttgggtcccgagttcgggtccaaatctgggtccggggtctaggcccatgtccgggttcgggtcctaggtccaagtctgggtccgagtctgagttcgagtccaggttcgagtccgggtcttgagcctgggtaccgagtctcgggtctcgtgtctgaatccgagtctggttcggagtctgggtcccggttcgagtttgggtttgggtttgggtccaagtctaggtccagatatgggtttgggtctgggtccaggtccgggtccgggtccgggtctgggtctgggtcctggtctttggtttaggtccttagtctcgggtccgggtttgggttcgagtctaggttcgggttcgggactaagttcgggtccgggctgggtctggattcgggtcccgagtctaggtctgggtctgggtctgggtccgagtcggagattgttgttgaccatgaatactttgtaaacattataatacaagctaatacggaccatttgttatgcattaaataatacaacgtatcttgtattaaaaaatttggtcgtaataattaataca

SEQ ID NO: 88850 - DNA, 622 bp, Cannabis sativa
ggggggggggggaaattacaaattagccaaacaaaatatatataatcattataatatattcatatatttcatttgtaaataaattttaaaatattcaaataatttgaataattagtggtattcaaataaaaataacatattacttcgttaaagctattgttttataattagtttttacaactttttgaattataaatttactattataaaataatgaatcggtaattttatatggtatagttattaatgtttgaagtaaactcgtacatgaatttgtatgagataaaaatattttatggttgtcttattaaaaaaaataattcgaaaataaaactgtgtaataaaataagaagacatttcttttttgattttttaagataataaagaaaaaataaaagaaaaatatttatttgttgaagaaagattaacatactaattgggaggagaaaattgttgtcattttgtgttgtcgtgtcaactcaactcatttttgtttcattcccttctctctaagataaaataagtcaactaaatatatttcctttaaaaataagtcaagttgatatgccttcaatgtttggaattgttgtaaaagactgcaaagttttattgtcttctttat

SEQ ID NO: 88851 - DNA, 566 bp, Cannabis sativa
gtaaattggcttgggctaattttgcaatttagatttagaagaaataagatctgcagcgtctgtttataaaagtcgaaagaagtattatgagtgtttataaagaagtattatgttattagcgtctaatatataacaaacacaaataacatttttttagtgttagttccaaacattcgcataaatttatggcctactgttcacgtcggttaatgaaataaacggtagcattgatcaacgtgaatagtgcaagttgtagtaatgttatcacgtcagtacaaatccaatgcattgataaatcgtgggattaaacagtttgaagcatataattataattattttctactgtgttgacaatactataatcatgaataacaatatatatattcggaatttagtagaatttatatattaaacatataataatgaaagtaacatgtgaaccaagtaacatagaataatttctcatcttttattaattagtaaataaaattatattgaaattagatttatttagagcataaaattccaacatagttacctcctctaacggctatataatgatagct

SEQ ID NO: 88852 - DNA, 545 bp, Cannabis sativa
gggttcgcgggttgagtttttggggacaccgggtttcaggttgaacccaaacctgcccgccaacccgcatataaatacattatatatattttttattttttttattacatattaatatattatatattagtttttgaacttcaccacacacactagagagagacggcaaatatattatattatatatgtgacaatgatataatgtgaaaacctaaaaaatagaaagaaagaaggtgatgaattttttttaatatgtaattataaatttataaataagttattacattaattaattttttctaatatgtaattataaatttataaataagttattacattttatagaaattataaattatagttaataaataaaaaataaaagaaataattatttgaacaaaaaataatttttttaaaagagttgaccgagttgacctggtcaactcgccaactcggtcaacccagccaatcgaaattcgccgacccgctaacccgccaacccgttccctattcgggtccaagttcagtttcatttttttgaaccc

SEQ ID NO: 88853 - DNA, 656 bp, Cannabis sativa
agctgcacagcatgtttaaaaaaatcacgtaatacgcctatgttagtttgggtgttacaatgatcatggtatatgtgtgtgcaaggtagcatcctagattttagacaataattaacattctcaaaacaaattgaacatacaatttgatcatcttttattttcgctttttctcacctttccaagaactcttcagtggctgggacgaaattaattttgtcatcatcgatatcatattgatcatattcaatttcaccatcgtactctgtgtttccaatataaccaatagcgtcggtgtaaacttttatcgtgaaattgcgactcgcatcaacccatttctctttcgcgtacttaatgattgtatcatatatattaaacaatgaaggagggagatggacacgtcgaagcatctcgtcaagtttatctttagccacaacgcttccattgtccattaataacttacgtcgaaaaatgacattacttgaaaattccagtgtcggattgccattgttcgttgacatgttttcagaatttgatccattgtaagttgcaaatagatcaaccataaaaaaaagaaagatttggatctctttgcagtgaatgaggtcgaagtaggcacccataaatttcaacttatcacctatgatttcaagaggtct

SEQ ID NO: 88854 - DNA, 867 bp, Cannabis sativa
tttttttgaatttattaaaataaaatataataataaatcttgaaaaattattctaatctatgttgatctaaaattagttaatttatttcaacataaatataattttctaatttaattaaatatatctagaaaaataaaaaataatctacttagaaaaaaactatctacatatttcatatgctaagtgtttttttttaattataatatattctagtctatatattttaattaatatcactaatgaaaattacttggttaagttgttctaaaattaataaaaaaataattaattttaaattttaatctaattttcaaaattgaaaattttgaaatatctacatgtaaagataaatgtatttcaaaattaaaaaaattatcaaaataaaataaaatatattttaaaaagaaaattttacaccaaaaatacaaaatgcatactttattactaaaataccaccacacggttaagcttatattattactcttcaactctattttattacaattttaccacttgcacacacattccatgcatcactacacgtcagtggtctatgacctctatcaatcaaccatccatcatatctttctctttttctattatttttccatttattttctatttcttttcaatttttttgaaaattagtaacctccatagctgaactcttcccctctacgatcccaactctattttccctcttctttttgttcttcaaattttttttcaactcccatttaccgaatcccataactgtttttccacttttttatttttcttttaatccttatataaatatggttgtaactccttcttcatcaactccttccgttgttaaaaaaaaaagctctaaaatgggattgaaa

SEQ ID NO: 88855 - DNA, 718 bp, Cannabis sativa
agagtcctcaccaagcactcagaagcctaagacaagggaaccaagccccatacagtacccttccgaggaaaaccatgggaaaaatcccacttcaatccccggaagaaagaaaaaggtgcaagatccgcaaaaattccgctcagatttcccgaaagggaaaggttcgcagaggggcaagctccctagagcgagtcttggcccgcagaattgagaggaccaaaagagcgtatccgtgcaccaggagcccagagagagaggaaggaaaaaccagagataccctcccgttgacttaagacaaaaaatcaacgaaaaacacagtgatgtacgagatcacctaaacaaaaagcaacatgcaccagcggtctccgcgggaacactaaatgaaggaatcctggctgagctggcaaggctgtgcaaagacatagctcgagtctctcgaaggcaaaaaagggacgactcagattctgattgcgaggactgagagtcttgcgcccgacgcatactggaggcagaactccccaagaactttaagatgtccgaaaaggcagcatataccagagactcagaccctagtgatcatttatcccgtttcaatcgggtgatgacactcatgagggtaagcaatgatgccaagtgtctttgctttccgctaacattaagtggttccgttgaggaatggttcaaaaagttggatccaggatcagtggactgctggaac

SEQ ID NO: 88856 - DNA, 1350 bp, Cannabis sativa
ggtcagtggagtctccattgttgatcagatcccagtcatctttttgaaaagttttaaagttatgccaattttgggtagcataatgcgagcaagcctaggaactctcaatacctgcatactttggcaggggcaggaaggctccaaaaacaccatctctggataagtcgcaaagaatttgacttgatgtacaaatcctaagggttgcacatctgtggagacattcagacgaggtaggagtggagacatttagagcgattgttccctgctcagtgatgacactagatgaggtagctttcttcctattagccccttcttcttcttgagagctttaggttgtttctcggaagtaacttccttaggaacacttcttttcttgcctcgcttgatagggatgttgggactgcagatgagatcttccaaattattcatagctgcaagggtaaaacaaaggaagttaagatctacagaaaagggataaatttaaagtggcgagaacaaaactctcatataaatgtttaccaaaagtgctaggcaagaaaggattactgttataattactagactccctaaaacctatgatcatgaagagatgataagggttaagtggagacatattccaatcctgactagcagccttattggtattagtaccatattaattagcaattccataatatgaactattacaagtcagttggacatgaaacttggggtaccaactatcaaacctatgggatatcaagtcaacacaattccagatataaaaattatattggttgtccttaaatttcactgaggcagtacgcttggccctaaggacagtaggagaccatccataaaagcaagaagtattaccttggggagccctttcttcaacatcgatggctttcaaaatggttacatttattagatgatggatacgagcaatgtagttgcggtcttcttcatccttgggcactggaacttgttgccaagtagggtacttgggattcttatagtccatggtgcattgatctttggcaaggaggccacctgactttaaattattatcatgtagcaagaagttagctacttacgatctatatgaaagaatcactaggatctcatgcctcctttggatctctggtattgggatcggtccctttgtagcaactaaaaatatggaagaaataatagaattagtataaatataaaaccataaaaactttaaaactctaaaactcaaaactaagattttggacatgaattatacttacgtaaaattttaaatctggtagtgttgattggatggaaccttgtcattccgaagaagttctctttaaaatcctttttatttggaagcctaacaat

SEQ ID NO: 88857 - DNA, 885 bp, Cannabis sativa
tgatctatgttgctggattcactggtatgcgaataagggagacttggagaagggagagatgtccaagaagagctatgaatgatcactagtggtggagtatgataattgttaagaaagccgttttggaagggaaactccaactcgttaaatacaacattccgagatatgtaaattcttcctgtgggacttagacatcgatagcctttatgggcattgctgaaactgagattaacacatttaatggaatgaaattgaaatttatgactttggtagggacgaatgcaaggaaaacatgccacaccaaaggtcttaaacaatgcataatcaggtttggtggagtaaagcacttcatgtggggatttataactcaaaactggtgtagggagattattaattaactggacaacaacatgaaaagcatcacaccagtacttaagtggcatgtgagcttgagcaaggagagtcaatcccatctcaacaatatgtcgatgtttacgctcggctcggccattttgggctgaggtgtgtggacagggatgttggaattctattccatgtgcacggactaaatcagaaaacatctgatattcacctccagaattagttctgaggctttttattttggtgttgaatttgttttcagccaaggccttgaactgaataaatgcatccaatgcatcatttttgaatttaagaggatataaccaagtgaagcgactataatcatccacaaagtggatataatatcgatgattcacatttgaagcaataggggttggaccccataaatcggtgtgaattaactcaagaaccgaagtagcacgattttgagataatttaaagggtagagcatgagatttaccatattgacacgcatcacaaaag

SEQ ID NO: 88858 - DNA, 953 bp, Cannabis sativa
taagttcctattttagttgttcttcttttactttttaggggtcaaatgctcttaatttagtattaatgatttaatttttattgtttttattgtatttaaggttagtgaatttttttgtctttaatttattaattacgttttcttcttttaagttcttatttacaatttttaatatgatttgtattatttatgatctttattattttaattatttactttttcatttctttttatttacattatagtaagtttttttatcattaattttattaattattatatcggttaagtctttaattacaatttatgtaattgcttgagtggtggcttttttgttttgattcttaaatattttttggattatttatgattttttattatcttaattacatgatttttctttctttttatttacattacataaaattctctattgtagttgctctttttatgagtcaaattatctttattattttaaaggtattgtaatttattatttgattgtttttaagattagtaattttatttgattggttactttttagattgtgattttctttttataaattattttttacaatatgaaaatgttaacttttttacaaacttttatttgttttattactatatttctatttatattaattagatttagtgtctttgttttgacttgtttatattaattttttttttctttcatttattttaataacttattttatatgtagattttaatgagattacgtgcttttttaagctgctcaaaaattatattgactttttctttcagtaacattgtttgttgacttctgtctcaaggaatcgtgtagaatttttcagataagttttctttattcaaatataatttgtgtatttttttcttcgtaattagtttatttatttattaattttataataataaaattgttataaatattaataattatgtggat

SEQ ID NO: 88859 - DNA, 1227 bp, Cannabis sativa
  modified_base (1189)..(1192): a, c, t, g, unknown or other
tcactgagacagccaggcattttcatatttgagaggttggggatgacccatgatctcaaaaaagatctaaacaggaggagaggagtggacgatcagcttgacacgccgatcgtaaaactcaaaatccatgttcaaaatcccgctcagaaagatgctgatgcgactcagatcgaccaaaatgccgaataggttagtccagccgtgcaggcacagttggacgaactaaagagtatgttccaaggtatggccagtcaaaggaacaacaatctcgagaggatcgagcacgtggaaccccattctcccgagagatgaatatcttggaattgccctacaagtttaagatgccaaacctagaagctgtatactggtaaggaagatccgctatcacaccttaagtattttgagatgcaaatggatctccaaggagtacgaggagatatatgttgtaggatttttccgcccagcaatggtatttcaagttggcgcccggaaagttaaactcgtggaaggatttttcctcagagtttcatgcacaatttccctcctcccacaaacttccgttgtacctaggggatttggtcgaagtaaaacaacgaccaggcgagcccctccgagcctacattagcagattcatcacggaggcgaccaaggtttcacgagtaattgaagacagaaagttgtccacgatacttgggggcattgaagtcctcggtgaactttggaaggacataagaaaaaacggtccaatagactcgatgagcaattttcttgaccgtgcagaaggttttataaaactcgaagaggccattcaacgagcagaaggagaacaaaaacctggcaagtcaaaatcttcttctactgcgacatttgtccagctcccccattactcgagcaattcaaattcaaacagtaaactgtccaacaacaataataggcaggggaatggaaaaaagtgaaagttcactggcaaaaccgaacaagctccccgggagaatcctactaagtataccgcatttaccatcctgacagaggacatagaaagtgtttacatggccactcaatcactggcctcgtacaaaaagcctgcacccatgcaaaaagatgtcaataagagagacatgacaaaattctatcgatttcatggacttggtgttgtccctggaatggaaaaaccactggttttgctttnnnntaacactggagccatagccaatagtaaagagcctc

SEQ ID NO: 88860 - DNA, 1191 bp, Cannabis sativa
ttttatatatatatcatttaatgcatttattaaaagaaaaatatatagaactttttccatttctatataaaattaaatttaatcattttatgctagaattttgtagaatattctaaacagaagaaaaatatagaatccttatattattattttctgtttagaaatttcaagctcgtaattaatagagaataagtagattattataacaaattatttatagccatttgatagttaattacgcgtataattcggttaattaatattaatatttatgatctcattgttgtcataattattcttgaattaaattgtactatattagtattattattattatttgtcttcttataatatattaattcttgttcttaattagaagacttttttttttctttgttgatttgatcatatcattaattacttctaataattagcttaaagttaattcgttatagaaatgttgtcgatgctagattggcttagatttgagattgggagcaataattgagaaatattttcccaaagagtaattaattacttgaatctgaagttattatatatattataatttaaaaaatatatattttaaaattattttttcttacacaccattagtgatcttttaattactacaaaattataattagaaatgtgttaatttggtttttatttttaaaattgtttagaatgtgatcatgacaaacaataataacatgcaagtccttaaaaatggactattacttaaataaaatataagataattagtggcgaaattctcttatattttttttatacacttaatacttttattttttttcaataaaaccctttacgtttattttttttttgtaaatttgagattttagttagatattaactggatggccagtaactactatgtacatctgtatatacatgatagtaaaatttcaaaatcaatacaataattatctaattgatatttaacggtgatatatatatcttattgtggtatctcaaattttgcaataaagaaaaaagaaaacataaggggttttgccaaaaaaaaattgttaagttaagtgtatacaaaattaaaaactaattaggatttgtgtcccctaaactttgacatgtaccaaatcatgccccatgaactattgagattgttagatttaaagacttttctccaattttagtaaaaaagtctaa

SEQ ID NO: 88861 - DNA, 1066 bp, Cannabis sativa
cacatgcgtctaatattgctccctgtatatactcaaattgtgttgactaacttacatgtgcttctagtgatgttggcttgtgtagatgtccttctacggatttttttcaagcattggtgttcgtatctgttgagctatttttttctcaagttgagtgtgtgtattccatgtggtaattctccaattcttagtttccatattttttacgtattgtctaaatcgggtttgggctgctgtgtttttaatattattaatgggcttgggcttcatgaaatataactctaagggcttttttgtctttttcactaattagtaataaatatctttttaccataatttgatttcacccaccttgtcaatcaaactatccatcttcttaagccaaggtcatcttcttcgtggtatccctctgtgtattgtgcttacagtgaaacaatgggcaaaaaggctgggcgtcttgtcaaaacgtctgcattgtctggtgatggttcgtcgtcacccttgccaatagtggaacctcacttgtctcccactaggtctaaatcgcctccatgcacaccaaacccaggtaagacttcttcttctgtaagtcttccaagacgttttacacgctccatgtccattccttttgtgtcgtctaaagaccattctcccccatccaccacgttacccaaccctctccctgagtcagactcgtctcagcgcccctgtcgaagccaaaaccaaaaaggaaaactgtttcctttgatgttactccttcgtcagtgtctaagaaaatgaaaactcctcaacctagtgtgtctgagccaaacacaactaatgcaccgttttactccaatgataaggagttaattaaaaaacgtgggtggtccctgtctgttactcatctccaacccccaaatgagaacctggtcagggagttttatgccaacttagatgagagcattctaaataagaaaaggcaattcctctatcttgcttatattagaggtaacaggtttcggtttgccccctcaacaattagttgtgtccttaaaatcaaaaccatcacccatcccacatttaa

SEQ ID NO: 88862 - DNA, 1010 bp, Cannabis sativa
aagcttatccgtgatcttaactccaatttttctcttaagacttgggtccattacactattttctaggacttgggtacatcactgatctcttggctaaacttcatcttgagggtgctaaagcttgtccaagtccaaccagttctgctcacaaattgtctcgtctgaaggtgctccttttttttttttctgatcccactctctatcgtagtacactaggagctttacaatacctcacattaaccaacctgatgttgtctttattatcaataaattaattcaattttttcaagatcctactattgttgattaggaagcttgcaaacagttacttaaatatttgaaaaaggattgattcttagggtcttcttattacaccaacaactactatggatcttcatggttgttataatactaactgggctagcttccccaatgatcatcactctactagtggttatgctatgttccttggtggagatttgatctcttggtgagcaaaaaagcaacaagttgtagttcgatctagcactcaaagtgagtttcgtgctcttgctaatgtggttgctgaaattaagtggattgtttctcttcttggtgagctacaagtttcactatctcaaggtcttattttgtgggtggacgatcaaggagcctctgctctttctgcgaaccccgtgtttcatgctcgtagaaagcacatcgagattgatctacactttgttcgtcactgaattctcgctcaataactattagtccgatatgtcccatcgatttatcaaattgttgatgtccttactaaggcccttcctactgatcattttaagtacttgaaatccaaacttcatttggtccattcccgtttcctttgaggggagatgttagccaagacactaagtcgtttatacagttagtattaattagctgttttagaattagttagctttagctttgttactctgtttagaggttgttagagtcaagattgttgtaactaattgttctgtattctt

SEQ ID NO: 88863 - DNA, 523 bp, Cannabis sativa
tgatgaatgtatgtgttttaagaaatttttcaatgaaaataattttattttctttctgaaatattttatttggattccttgtgataaattaagcgactttcatttttacataactcaattccgataaaaaatgagagagttatggtgttttgaaaaatcgaatgcatatggtgtcgagtaggtacatcgggttcactaggcgctcggacaaggcatgcctaagcgctcgcgcatttcagacaattcttgtctgaagcgcccgtgtcttgagatgcacgcccgcgatgaccttgcatcccgcgcccaggaaccctgcaacccgccgagatttctcggcagatgaggctgcaactttttgcttcgcacgcgcgtataggctgctagtagcctgttttggctgcacgtgcagcctgtctcgtgagcaacccccaaaaatccgttttttgtgggatttttcaacaaattttgaatttttgcaattttcaaaccccaatttcaaaataaaatatattttttaatatat

SEQ ID NO: 88864 - DNA, 944 bp, Cannabis sativa
aactcaaactcacatatataacaactactggagcaacccaaactgtaaaaattaaaaaaataaaaataaaaatagtatatgggatgattcccctaattaatatggtagattttaacttttttaattatcttaattaattatgaaatatatattgcagtgattttgttataatatatgtattttcttttagtcgcttaaattgaaataaaaaaatatataattattgatgactctataaaaagcttatatatgattttaaagcgttgttatcacaacatcttatctgtagtcatcactatatttaaagtcgctgtcattaaatactgtattttctaataaatttgctatatacataaaactaatcaaacaataagtttaccactgatcacttttatatataaagtgaatctagaatatatttctttttaaaaaaaataccaaataaaatctataattaataatgagaaattagataaaattgtatctaattatcaattttaaattcaaatagtatgctttagatatttttaattataacttgtttttaattaatttttttataatcatttaataaaagagctatcttcaaatgttagagtaaataaaagattaaaagttgaaattgaaagagatatcatcatatgattacaaaaccgctctcataccgtatcgtatctcatttgtagttatcactacattcaaagtgacaatttgatagaaaccataaaaattattaaaattaagttaaaaaagacaaaaagaatagcaactacgaaaaattatatatgtgtataagacagttttataatttactttaataaattgtttgataaattcatacaataaaaatttgacaatttagaacacaaacactattcatgattaagagttattttttatttatttattttttttttaaaaaaagagttaataatcatataaca

SEQ ID NO: 88865 - DNA, 905 bp, Cannabis sativa
ttgagacactcaacaaaactgtcgacatattgtcgatatcatatcgataaagattggcttcaagaacctatcaaaaatctatcgaatagcatttgagaaaggtcatccctgaccttggaacatcttcttcgagaatcgttcgagaacttatcgataaccattcaagaaaaataatgtcatgacatgacattgaggcagttgagacactatataaaattgtcgacatatcatcaatatcatatcgataaatattggctttgagaacctatcgaaacctatcgaataacattcgagaaaggtcatccctgaccttggaacatttgcttcgagaactaatcgataaccagtcaagaaaaatacaaaacccagaatactcatatcgataaatattggcttcgagaacctatcgaatagcattcgagaaaggtcatccctgaccttggaacatctacttcgagaagcttttgagaactaatcgataatcagtcgagaaaaatacaaaatccagaatactttgaaaaaatagatcttgcaattttgacgaaaattttacaaacaacaccatagatctaccgaaatatgctatacttttacaattatttaacaaatgttttaaaaaaaacacttacccattaatccacaatgaagagaggtcaaggaggggcgacgcgatggttggaatgaggcgtgaaggatggccgacgtatttcacggtggttgggctagtgcgagttggctggccggacgtcctcaagggttgtaggccgcggagctagggagaaaagaggagtgctttatttatttatttatttatttttgaaaaaaatggagaagaaccattaatggagatgagaaaggggaggagttagttgatggggtggttggtggggggatgttaataaaaa

SEQ ID NO: 88866 - DNA, 1216 bp, Cannabis sativa
gagcttgaaatttattattatttaaaataaaaagattatttgacaaatattttaattatttcttctaaaaattaaataataataatttatttatctcatataagattatattttaaatttaatcattttgagattttgaatttaaaatactaccgtatatttaaattatcaaataatatcattattttataattctaattctaaactgaattataagaattttaagatattaaatgatgttgtattcttgtatatatgtaaagactgcttaattttaatttggaaattaacagataattagggtttaattatgaaacttgtttatgagttatgaattattaatttacggagatttatttgaatttagaatgcattttataggttatatatggaattttataatttcgcatgttttgtgcccgacaactttggaacgcggtgtttggctattagaatcatattttagtattcttagtatagcggggcattatagttagagattgagaatgtcaggattagtcgagattttagatttgaccaaaatacccctaggtggttttatgaccatttggcttaagtgggggcaaaatgatctttttgccctatgttagttttgtcttttagtgggattattattctgattttattttttaaagttaagttaataaaaccatttttattatatgttatttcattttattttaaaaagtcaaatttagaaaaaaggaaagaaactctcgctctctcgaattccctagagcagatagggtttggtgttttcttcatcaattccagtagtttacaacaagttctaagtagattcaagctcaaggtaagttcctagtacctctctttataatttcttgagatttaagttaaggtttttgcatgaaatggggttatgagttctgtagttgctcttgttgtttgaattgtatttctaaggtttaattatggttagatatattgttttgaactgattttggtcgctgtagtaaggtttgagcaagctttgagttttagaactcaagcttggctctttaatgttgaatcttgaatctgagcatgttaggttgttttattgccttggatatgttttatgtggtctatataacaggtgtggaagctttagtttgatttggggttgattgtgtgagttacgaatttttgaagttttcctgcactgaactggtccggttcagtgggacctgtagga

SEQ ID NO: 88867 - DNA, 1227 bp, Cannabis sativa
ctggtaaaatatatccaacatgaagagtataggtgtattatatctgtttaaaaaaaaatattatattatattaattagctttaaaattactatgatgttttattaataaaataataaaataaaatagaagttataagaatgaaaagtcactttttttaaaaaaataaataaataatgttacatgattaaatgaaaaattaacaaaaaatgaggaaaaaaatgatagagtaaagaaaataaaaggaaacaaatataagatgccacatcaaattgtcttgcaagaggattatataaatactaggaaacttcaccgcgcgttgcacggttgttcttagaaatttgatattataatttttttatttagaaatctataaaaatataattgattatgatattatattttaatattttttatttattttttaaaaaatacattttttttttaaattattatattttgtaagattatgaatcataaattttatttatggtaaatagatgaaacatatatgtacgttaaaaaaatgagactatacatagtaatattaagtaataaataaaaagtttatatatatatatatatatattttaattttagatgaatgatgaatactatcaatttttttttcagtgtattactgtgcgtccattaatttatgtatatatatatatgttaatatttttttttttttttatatatatgttaataattatgattttatattgttattactttggcaggatctttgtcattaatgatttgatttgcatgtaaaattttttattggctaaataaatagaaatatatagtaaaacgcatattaaatattgaaagaaaatatcgctttaaaaaaaatatgaaagaaattatagcagtgtcattgtcattatgtggaaccgttaaattccatatttacaataaataaataattaataatacacctaattatattcagaaaaaaataacaataggcctaattaataaatattgaaaacaataaaataaaaaatttattatattataataaatgctttcatgttattgtcattatgtggaaccgttgaattccacatttataatgaataaataattaataatacacctaattaaaatttatttaaattgaatacaatagaatacacaaaaatgtattttgtcaatatataacatatataattatacacattgtaatcaataaatacaaaaaaaaaacaattatatttagc

SEQ ID NO: 88868 - DNA, 920 bp, Cannabis sativa
acaccaaaaattagatttactaacatttgaaaatgtcacttttagctagttttagtaacattaatagttttaataacacatctcaaaaaatagttttaataacatttgtgaaaaatataaattaatatacctatgtgggtataggtgaaaatgtcactatattctttttagtatcatttggaaaaatatcactaaaaataattaaatattaattttataataataaaatcgtatatatttaaattattttattaaataattattttgatataatgaactttttatttgttaataagaaaaaatataattagaaaatagaattttgtaatataaatttatagatattatcataagatgaaattatataaatacttttcattaatttatatcaataacagattaatacattacattaactcaaatttaatttctttcactgataaaaaaatatatatctttaagcacttatttaagcctattaaataacaatcatttgagttaatgtaatgtgtgaatatgtttgtgtgtatctctttagacacaacgacagttttggacctatacaatacaataattgacgataatttggacttatgcaataattgaccattattattaaagtgatatactggatgatttatgcacctgtttgggcttttcagtacgatcataatttttgcctcatagaatcgaaatgccaacattaattaattaaattaaatcttgttttttacaccatctccaatacataatataaattttactactacaaaaaagaaaattctcatccatcataaaatcgatttttttcaagaactaacactatatatatatactagcaaaaagctacgtgcaaggcacgtatactaaattttatgctagttttttctatgttaattgaaagtgatacaattaaaaat

SEQ ID NO: 88869 - DNA, 524 bp, Cannabis sativa
tagtagtaacggtgtaagagaattgtaacattaggtttttttccaccaaaataaacattaggtatttaagtgtataaaatcggaaacattaagtatttatgccgcaatctaccctatatatttatagcacattgttttggttaaattaaatctaaactacattatatattaataagaatatagtaacatattattttacacagttaaacataattaatatattttttttacaattatattttcttttataatataacaaacttatttgttaacacctctgttagtcatagggactatttagaatgggttaatgctagtaagagaatggtcatgtaaaatattattttgtttgttttgagggtttagccttgaattgttactccctaattagtaatataactacccttgaggagggtaatgttaataccttaaaaagggtagggttgaattattaccttccattatattaatttgaatagtatttttgaattaataaataaatttaaataccaataatattatca

SEQ ID NO: 88870 - DNA, 1162 bp, Cannabis sativa
  modified_base (865)..(865): a, c, t, g, unknown or other
ggtgtctttaaagtttttgtgtcgccgaatataaacccaaaatataacacaatcttgatagaatcaatttttatcttttagtgaattatttcatgaacaatgaataatgcaaacgagacaataatttaagaaaaatggtaaggtggtgtttggtttgatataatataatataatataatggtaatggtaatggtaatgataatgtaatagaataagaatgacaataggaattgattacaatgtttggtttgtagttgtaatgaacattctaatcagaattattatatttggtttggtataagaatataataaaagaaaatatgtattgactaaaataactttattacttttattataaaattataaaatatttaaaaacacgagcaatctacactttgattttttttactgtatttttattaaaatattattttttttatttgtaatggagtgtaattgtaacagaaattacattggttttagtattgattttggtatataatcatcattacaatacttaatattgtaataagcattacattgtaatatattacaaaagttaaaaaggaaaagcaaacaatataatagatctattcatcattattatgattaccattacaataaaccaaacatgagaagactaggaattatgcattgttttacttgttgatagatgggaaaaaaactactatcccaaattatgtgttccattcttgtcactttaataacagcttcttcaatagaatgctataaaatggatgtttactactaatatgaaaagaaaaaaaaaatacataacaatcacatttttcatatttccttttttttttatcattactaatttaatatatattaaataataatntaatattattttaataatttttaaaagtgtataatattagaacatttacaacaaaaaataatacgtctctataaacaaaataaaatatattatatttttttaaaaaaatactcttaatagctatcattgtctttcacttttcttaatttaattttcaatattaactttgttagttccaattttccttctctcttcttataactaattatttcctcagtaaatactatattaaaaaaataagctaattaggatttttgtctccagaactttaacatgtactaaatcatgccccttgaa

SEQ ID NO: 88871 - DNA, 1080 bp, Cannabis sativa
  modified_base (26)..(27): a, c, t, g, unknown or other
tacccggtgtttccccttacggatcnngggactactgactgtcacatctatagataccacaactagtttttttggccgaccccatccaaaatctgtattgtaaaagcccaaactcgacgacccagctactccaacgtggcaagaattatcagactccgtcgccgggaaagtcactatttcattctctatttcgcaatataaatccttttcttttcccacacttttcactaaatcacttactatcatcacaatagcagtgaatgagtccaccccctccttctccttacagatcacgtactccctcatatcgtcgatattgatcttggataccagacaattgcccaagtcattttctggcaccggaggtgtcaaacgattccggtaatcggcggcaaataatataaaaactttacttttagttttatcttcatttgttgctttgagaaaacaatcgaaaatgtaagcgtaagtaagaacaaaagaagataaatgaaggttatttggatttgaatttggcacctttcgacggagtttatctatatctgatcgacttagttcgaaaatggctctatataattcatcaagatcagagctttgaaacgattcaaattcaaacagttttgggttgtttctacaatctgaggacgttgatccaggattgttccctattatatgattcaagaccttcatttcaaacccagatgggtcttctataacagtccgatcataaaagggtgtaagcttctccggcaacaatggcggcaatggggaattttcttgagatgataagtaagcccacgatttcataaacatagctgcggatttcccatctacaagaccatgatgggtagtgaggccaatacaaaatcctttattagggaaaacagtgatttgaagagccattatcgaaacccctgtttccgaaacatgtaacggagaaaccaaaggtcaaacctttgaggcttggaagggtttgtttccagaaagggtgtcaaagtcagcattggattcggcgattgagagtgaaacgacgtcgcctggtgtgtaaagagcgattggtttgggggaatgttgaggcca

SEQ ID NO: 88872 - DNA, 654 bp, Cannabis sativa
caaaccctaaaattttttccctccgcctcccccaaccgcatcagcccactccgaagcctccgcctgcccaaaccgcctccggccgaccacccttgctctgccactgccgcttccgaagtctctgttttaaggtatttatattatgtgtatttatatttttgatttgtataatttaattttttattttatgtttgaaatgttttttgaaatgttaggaattgtaatgtataatgtatatgcacataaaatatatatgtgcaaactgatcatgtctatcttgtatatatatatattgctattctctctctctttcgtttttcatttttgtgtatatgttttttgaaatgttacattttattgctattctctctctctttcgtttttcataccattatatgcaattgaggtttgaattttatgattaatttttttggatgttttactttggttactgaagtaacagagtaaatttaatgtgtgtatattatgtgtatataatggagtctgaggattttagaagggggactgttattttgaaagcaactactgttctgtttttttgttgtgataggtcatattctttagttatcaaattttaaaaatgtcactttctcaggatgtaggtctcttctattttaggggaagaaaatatat

SEQ ID NO: 88873 - DNA, 1078 bp, Cannabis sativa
cggatatccgcattttgcggattggattggattgaatcgtgcggattggattggatcggatactttgtgaacacccctaaataacgacgtatatgaagaaagacacataactatagtggtctagttagagcttgatctgcttagtccacttttttaagagatttgtgattattttattttatgttggatcactcatttatataaaaagcgagtgatcttttggattacataatcgatcagatatgaccattacaatattaattacatttaattaaggtgagtaacgtttactggataaatgaaagattagtttcgaccgatcttatagtaaagaacgcatgcgactttgggagtcgcatattaaccgtttactaaagttacggattctctagtgttactcgcatataaagtattaaaattacaaatttgggatcatttgtaagatggaaagcctgcgactatatcaattgtatattggacgttcatgtactaacaaaattaaactttacagattcagaataagttgtcaaacactttagtaattcggaccaaacatttgtaaaaatgcgatctttacgtaggatgcattggagattataacaaatgatcaattcatttcgcacatcaataacccagtccaataaatgttgacacactcattttccattttgctattgacataaatcaagatgagatgttaattatagcaaatgagatgggagtaaagaacaaatttgagaaacaaattcaatttttttacttgaaaatataaaagtgaaatgtgagggagcacggatacgattatatcagttctaaattattaattcatttgatcaaaatttcatcataattttgtagctaagggtatttgaacgaaaataatataaaaatggatgatctgccgagaaatccttctattgcaatctaaaacattaaattatcaacaaaaaaggaaaagatagactactagaaaaaacattattagcaacactttgttaatagtaaagaaaattataagacaacacttgtgatcattgtttccttcaatataattcttcaactttcctgtatgaagctc

SEQ ID NO: 88874 - DNA, 1014 bp, Cannabis sativa
aaatggcccatgttgacaaagtgtcaacctgtgcgttgaagcctagccctaggtcaattgggagctaagtcagcttcttggccgccaaacggttttgtttgtttctcgaaagcacccatgtcttaattgttaatgaaaacagagaatatgcctggaagacttcgttagtatttctgttggaagtggtccaggttaatgaagtatttgtagactcagaaatatggatagagattcctaagtcacatctactcgctagattggcaaaaatgagatataagttacgtataaatagagagacacaaaaatagctacttctacttcgaatttttattctcacgagatggaattacaaaaaaatagataagtgtttaagctttaatttctagagagaaaaattagagagagatgctctgaccttatggctacttttctgaatgtaaaaaataaactagaggagctcttattttatacgtgaaggagatccttgaaaataggaataaaataatccaaaaatatgaaaaaaaaaatacaaatcgaatatttttgactgtatacgatgatctaatggtaaaaattaacttctgaggttgatcgacaatttttggagctcggaccgcgacgacgggacttgctccgggttagctgtagcttaaattcataactctcttagagtgaaatttagagtcaataactttagaattgtgattgaagttctagacattacttaatagagcattgaaattgcttcaaaaaacaagtttaatcgtgtcaattggatcactattgagtgagttatgtccattttactgaaggttgttcatgacccagcgcccaggttgacgtatgatgtcaacctggatgttgggtgagtggaaaaacatcctgggaatgtacatttgaatgtctaagtgatattttgacatcacttagtttacttctgtgttctggcaaagctagtcaccagttctcaaagatgtcgctgttctgcgaagataggagactcgaaactcctaa

SEQ ID NO: 88875 - DNA, 1166 bp, Cannabis sativa
ttaaaatacatatatcaccttaatatatatatatatatatttatatatattgaaatataactttagcttttgtggtataaataaatgttatttatacatacaggtgacaaatatgtagttacaaataatcattataaattcacaatccaaatcaaattgttgagttggtctagatgaaatgatcatgttagagcatatatgtgtgtgtatgcttttttttttttgggtagagtttggaagtgtaaaaagcttgcaaagaaaatgacttatcagccaatagccctctctgcctacaagacttgtgcctgtggtccatactctataattatttattattttttttttttttggggggatctttggatcacatcgatcattgactctttgatgtggttttaccatgtatgctgcacaatatcatagtaattaatttgtagtctttatgagtgtggataataattccttcttcaattcattcatttatatgaataatttctcttcttaatttaatgaaagttgtaagtctggtttgttttttctatttaaattttattctttttaggagtttctatttatatttatatgtatttattgatcattggtgcagatctcattaacgtttctgagttacaactttagtagtgactggtatcattttatgaaaatgacaattagttgttattataaaagaagaaaaagctcatctgtacccattagattatattttttttttgagcaaattatactatatacttatttcaatgtgatatctttaattttaactctattttttaaaatttattatgtttatttcttttttcaatcattctaccaattttacccatatcactttacgataattttcataattttttattcaaaatgttggccaaactttctcacaaacctacacatccatctacaaaaaatataaatttattatgtttgaaattatatcttagttatgtgagtgtgtgaggatagtttgggtacgatactcataaaaagagatatattttaattaaattttatttagaagtaaaattgattaatgtataaaaaaagaagtattcttcaacttctcctgtatcatagtgcttgttttaagtgagaattctaacatgaattgggctcaggactcagtaaatgaactcagaattattagg

SEQ ID NO: 88876 - DNA, 821 bp, Cannabis sativa
taaaaactactattacactaactcaaatatatatacttaaaactaaacatttactgataatctaattggttaaataacgaacaaacaactagataacaacagtagttggatatgtaaattaattggacttcaacaaatattgtcgacaaccttacagaaacgtaagcataacatgcaaacaatcttaatacatgtaccgataaaaaaactaaatatctatttagtttgctactatttgaacaactaaataagaacgaacaaacaactgtataacaaccctttctttaatacgcaaatttaatatgcataaacacgttgcgattctaaaaaaatacacatcaataatctcacgaattaaaaaaaaaaaaaaaacccttaaaaataactaaaaccactattacactataactcaaaaatatatgttcctaagaaaaactaaacatatactcatttttagattgattaaacgacttaataacaacaaacaaacaacttaataacaacactagttaaatatctaaatcaattaaacatcaacaaatagtataaacaacgtgaaagaaagaaataaaacaactcataaacaatctaaataaataaaattaaaaattgatcacctatacaaaacttaaacatatactcaatcaataatgattgtgacacttaaatttcaccttatctacataaaataatgtgtaattaatctcaatcatccaatatataattatctatggtataaatttaataagtattattgtgtgttaaaaatatgtataatttttgggtgcctctagtactactaatactcatttgctagattt

SEQ ID NO: 88877 - DNA, 586 bp, Cannabis sativa
acccacaccaaacccaacacaaaaacactaattctaacaaagcttcacaaacaaaaccaacaatacatacgatcaagaactcacaaaaccacccaacctatgacaaagaaactaaagaaaccatgtcaatagacatgaacttttttatccattttctatatatttgatatacatgtattatttatattttttgtttagtgtatatatatgcatgtatatgaatttagtatatgtgtaatgaatatatataaatatatatttttgtcaagtgtgttctaactagtaactagttagataactagttataactaagcataactagttacataaatttggtaactagaaacaattttttttattattatttgcgtttgtttcttggctttgaagtaaagcattactgctaaaaaattggtttttgccgacagttttaaacagtcaggtaaagtattccaattaatttctataactgttgcctattcgacgtcataaaatgagtggaataggcgatagttcaaaatagttgccaatcaagcattttcaacgatttaaaaccgttggctataggtgacagtttaaaaccatc

SEQ ID NO: 88878 - DNA, 808 bp, Cannabis sativa
caaatagcaacaataagatcaaagcggtctaaaattatgcgagtacccctataccgcttaatataaaaatgcaaatgaaaaatcctcgaaaggatatatgttattcgagaatggaaaaagttgaaatttgttcagagtacaaagtgcgagtacccatgtaccgctaacaaaaaaaagttaaaagttgaacaataatagaaaaggacttggataaattaagaagctagaacaatggggtcatctgcgaccttactagcagctccatcagcgacttcctcagtattcgcattatcagcctcctcagggaaaaagtttcctccgcatccttgggtctgagtaggcgacataacaggaaaagcctcttccgcccaagaattgagaagtcaaagtgtggcagttttgataaagtcgtataaatatagtcagagacagcctaatcgtactgtctcttcacatactcctcgcgatcacgagtcaattccttaactcacaactctgaaaggttggccttctcttctgcctactctttggcattttggaggttctcagcatctttcaccctagaagtcgcctccaacttcagtttcttcacattgttctgaagaagggtgttctgctaccacaaaagctcgacttccttggaaaatatttacctcgcacatgagtagaaggtagcctttagcaagcccgagcctatgaggaatttgagtaacaaaagagatcctaacaaatattataaattccataaatatattgggcatacgaccgataaatgtcgccaattaaaagatgagatagaaagtctcat

SEQ ID NO: 88879 - DNA, 519 bp, Cannabis sativa
aacggtaattttccatcaaagcaccaaattagaggcaaggcttgccgtgaagcatatgacaagagaagcaaatttccaagaatgaaccatatgcaagtatctcaaagttcaccagaaatcaggctcatcttaaaacatatgtatttcaatatacacatttatatgtaaatgtgtaaatgttcctgcagaaaaacatatatcaatacacagatatgtagcatgtttgcaggtattacagtatgcacacccaaagaaatgaactatttccactcgttatctaacaaagattcctttcttcaacaagataaccagcagatactaaacaatgagaaggacagtcaaaccttttgaatactcaattgttgcactagacttaacatgcaatccatgtttcttgctaggttcaattaaagccttcaaaagctcctcaagatcattgtataccatcagcattcagcacaaacctataagcactgttttgtcaatataagatagatttatctagaactgctcattata

SEQ ID NO: 88880 - DNA, 631 bp, Cannabis sativa
tgatcaccttatgcatgattcatgatcctaatgtcaaatttaaaaagtgaatgttaagaatgctctaaatgaataaacataggtttgatgtgaaacataagtatttacatagcttatgtgaattttagattattctttagtacaaattgtatgttgttctatcttagagatgcagtagtatgcaattcaggacctttataatctgaaaagagtttaggttaatttataatctatcatcacataagagggaaaagaatggtttattagtattaacaaatgaattatcaaatcaattgaaatcatatccctaatttcacatccattgttaaaccttttatttgtttgttttatttaattttttatttagtttcaaaatttatttattcgattgtcaaatagaaacaagaattcaatttattaatacgtaaatacagtcctcgttggcacgatctcacttacctgggtattactttttaaaacaatatgtaaacttgcatgttggatttttcacaaaacctagtgattccgttaatcaggacaatgggatagaagaacaatttttcgaagacagttgttatacctaaaattcgactatcaaccaaaagctaacacgtgtacttcaagaggaata

SEQ ID NO: 88881 - DNA, 772 bp, Cannabis sativa
ctcaaagagattctgatgtgactctggtcgttcaagagactgaacaagttaatccagccgtgcaagcacagttgaatgaactaaaaaatacgtgccaaggcctggctggtgagatgaacaatgcactcgagttggaccgagcatgtggatcccttttctccccaaagattaatgtcctagagttgcctcataagttcaagatgccaacttggaagatgtatactgggaaggaagatcccttatcccatctcatgtattttgaaatacaaatggacctgcaaggagcacgaggagatgtatgttgcagattttttcctgccaccctctcagaggctgcctagtaatggtatttcaagttgatacttagaaggttaaactcatggaaggctttctcatcagaattccatgcacaattctcctcttctcgccaatacccattgcatttagaagacctggtcaaagtgaagcaaagactaggagaacctctccaagcttacatcaagagattcatgacggaggcaactaaggttgcacgattgaccaaagataggaaatcgtccgcaatactggggggcatcaatgttcttggagatttttggaaagatatcaggaaaattagaccaatagactctatgagtgacttccttgatcgtgcggatggtttcattaagcttgaagaagccattcaatgagcagaggttgagcaaaaacctggcagcaaaaagttcctttgctggaacatccgtctagctaccccagtacccaagcagtt

SEQ ID NO: 88882 - DNA, 871 bp, Cannabis sativa
tcacacataacaaatacaaattgttatttgataattacattggaagtcgacaaattggcctataggctagcaagctggctttgtataaaattatgtttggtaagatattgatatatattagataaataatacttcctaactataacttaattattgtactgtgaaaaattatttatgtaatatgtaatggtgagctaccaaaattgacccgagaaatgtattaattaaagtgtatatatatatatatagacaaacatagatgatatgatacagaaaccttattcaaaaaacagtgattaatttgggaaagaaagaaagaaaaaaggaaacaaaatgaactctttcaaaatgcctcttctttttcttttgctagtcataacgatgctccatcaaagttgcaacgcaaaacatatgaaatgttcttcttcttattattcttcatgtggaaatatctctaatataacatctccttttcgactcacaactgatccttcgagctgtggagacttaaggtacaatctttcttgcgagaacaacattacagtcttaaacttgcctgttcatgatcgagaaagttcttacagttcggagatcaaatatcaaagattttacgtaagagaaataaactataataactatacgattcgagttgtagatccaaaatttcacaaacatgatgaaaattactcaaccttgtttgccaacaatactttgtcccttgaatatgtctatggtgaatatgcagcgcaaatatataattcgaggaatggaaaaataatttatgatcagtacaaaaaaatttcgaaaacagttgtgttaattagctgcgaaagaagagtggtgaattcttcttacattgatgctactccat

SEQ ID NO: 88883 - DNA, 616 bp, Cannabis sativa
ctgatacagtggttcgactggacttttttatcatggggacgatgaggctaatagtctgcttgcacaattctggaaagtgttgtgaacgtcttaaagagaacgacttaatccgcgactcaatctaaattttactttggtaaattcgttccttttattttctgcagcaactatttcaacactgatacgtcattattggagcatatgaagaaacaataggaagagaaaacattcatggaagaaagagatggagagtttgaggaaggagcaagctgaggcaaagagatggaacaaggaaaaggagatgaagaatagatctaagcagcagcaagccctgtcaacacccggattgccaaagggttcttctagctagctaagaccaaagaggcttgggttgtaagtgtaaaagattatttaattttagttccttgaacgaaaaacctgttatattcgcaaagctgttagagttagttaggcttacagttagtttgttatttttctgttttactttctgttaaagtcggttcatgtaatactgttcaagttctaaagctatataatagactctctcagctccagttttggactgagcttctctttcaaattctctctgtttctc

SEQ ID NO: 88884 - DNA, 736 bp, Cannabis sativa
ggcataaaacccaacaggaatatcctctaaccaagtacaatcattatccaacactaaatcttgtttagctaaactatgagcgtcttggttagcatcttgcctaacacgagatacacaaactgaaaagagataggataattaatttttaacatcagccaccatatcttaaaaagaagagtgacctaatatttgacgattaattgaattcgccaatagcaaagaatcagtctcaatgaaatccacatgaaaatgaaggtttcttgcccatacgagaccttgaaacaaagccttggcttcagcttctaagtcaaaaattgcctacaaaaggcttggaaaaagcagtcttgtcgaacccttgagagtcacgaattaaagcacacactcttaatttgttctttgatgtatcaatcaccacatcgacactcattttaagattgttaggaggggtggcttccatggctcatagttagcaacacctgatgttgttgatttagaaggagcagtaggaagttggtgctattgaaaattacagatgtaggcttgagactttgcccagattttgaatggatgttgagctattttaccatggatgatattgtttctatccgtccaaatgaaccacattgtacaaagaatctgttcaagttctacattggtcattttcaaattgtctctaaaatatgtaacttaaagatatatatagatgaaattagggtttaaatatgatgtataaacc

SEQ ID NO: 88885 - DNA, 841 bp, Cannabis sativa
atattttctcatattcatgtgcaccttaatttcatctgagaaaattatcttcagaggaccataataaacataagatttcaagtttactcgcttaagtatattgccacataaagtacattgttatataatgaatatatcgtaatatatggaataatacttgacatataatgagaacctattgttataattcataagtttattgtataataagaaatattgagtttacgtggtaaatctaaatgctgaccaagtgggtgaatattataatattttttatattaagtataaaatcattttaattgacttatatgtgtatgaatatttcatatttgattccaaatcaattatttaataaatataaatattttatatatgatcagtttttgattaactaatttatttattttctgatttaatttttaagattatttatcaaaatattctaacaattaatgtagtgtagatactaatagagtttctcacctataaatatagggtctcagtccctgagctcctcactcattctgtgacatacattaaatttatctaaagaaagtagagagagtttagaagtctgattactcacacttaaccaggttctttttcttttgcagattcaaagctcatgtgggattgaagctcaaaaaatcaatggctaaaggtatatctcgatctcttattcatagtgcttatatgttcgatttataaatttcgcacttcatacattcatgttttacataaaatttctaacagtgatattatgagtccacccactaatatatctaatattgttataaatattaataattatgtggatgtccaaatcttttatttattacca

SEQ ID NO: 88886 - DNA, 999 bp, Cannabis sativa
tgtttcgacgttgctactacctacaggaaaacaacatgaaagtaatatttttctcttaaaaaaacaagtaaaaacctgtaaaccaaaatctgtaaaaaaaaagtaaataaataataaaaatatccgtaaaaatataaaaaaaaattcaattttaagtatatctaaatttccctaatttgtagtgtatttagtaatactactacaccgtatagtctattccaccatatctaaagtattatatgtatatatatactaggttaatattacgtatttaattaattatattttttgtttttgtttttgttatatagatttttattttttatttttgttatatatatttttagttgtataatttatttttttggatgttattcaataaacatcatcatttttagtgaaaaatatttaatttaagtgctatttataaaaataacataatattgagtaaatactattttggatcatggattttgtaaaagttacatattggactatgttttgttaaatgacaatttggaccctaagctttttaaaatagtacaaattaaatagactctgaactcaatttttgttatttttttaatataaccaacttgaaactaattttaagcacgaatagatgcaagaaaaaaaaaaagatgaaatcatatttatcataatacctctaggtgaagttattattaagttttaatttgacgaaaattaagctcatgatctattttatactattttgaaaaatacaaggtccgaattgtcatttaacataacagaagatctaatcagtaacttttgcaaaacatatggtccaaaatagtatttacccaataatatctaaaatttcttgttagttataattttagttttaacataatacttttccctttttttttaagaaacatcttacactttttctatttttttttaaataataataggaaaatatatttttttttttttggtaattgcaatatctaatgacatcacaatagcaattct

SEQ ID NO: 88887 - DNA, 1280 bp, Cannabis sativa
caatcaaaagcttatcctttcctatcttgcttcaatgaaaggtaagaaatcaacatgtgataatacaagggtaagaattgtgatattttgtaattcactattttttatataataatatgtatattaacatattttcctatgttgcgataaggatttttatgttattatatgtgagatatatatgagttatatatatatcagtgtatatgttatattaatatagtgacatataatatgatatttgaatatattgtatgtgagatatacataatatataacatatatatgaattgtatatattatatatattgagcatgtgatacatgatatatatttatgatgagaatatttatgtatgtaagacatatatgatatatattatgaggagatgatatatattatgatgagtatatgatatatatatatatatatatgcgagatatgtaacatgtatagttgtgatgtatattaatattatatgtatgttatgtatgagatgatagtaacatacataatatactaattagcataaaatttgggaattataattttatgcatgagagttatatatattatttgtatataaatatatgtataactaatcatatttagtgtatatgataataatagtgattctgataaaaaagatgccttcatcattttttgagaatgaagagttttggaattaattttctattagtggtttttatctcattttatgagatgagaaagtgaattgtgagagttactcctttttgggattatcttgccaaagaataaatagatcatagtggatctaaacttgtgaaatgagtcataattggaagatcaattttagactcaaatcaaagtgaatcatggtggattcaaaaaaaaaaaaaaaattgtaaaaagataacaaaattggagaaacaattttgaatcttaaataatcaaagtggtgaacaaaatagatgagaattttgttaactttggtgtaatatttgggttgatctcaatgaggagataaccttaaaattataggtaaaaataaacacattattttttaaatggtgatgtgagtttgatattttagttttgttgagaaactaaaattatcaaatgatatttttcaaagtgaccttataagtcattttaattaagaggaaaagaaaaatatacaaaagtgatatttcatatacattttatggtgggaatgtggggtgagccacaaacttagtcaaaatgtgatgagacattgttgattagtttatttcatttggaatcaaattctaaatcaa

SEQ ID NO: 88888 - DNA, 1049 bp, Cannabis sativa
tagtaaataagaagattgcaaagaacttcatctccaattttctcatcctgcccgctatttgaaaaaaaataaaataagtctaattaaaaacttggtaacccagtgcctaattttgcttcctcataaaattttaagctttctattgtgccaaatgataatttataagctttttttttttttttttggaaatcaaatttataagcatttgaacatgaaatagttatcaaaaaaaataaaaaaaactaaactggtcgggcaacagcaaaggaaaaagattaaacaaaggttaagaaatgaacttaatagaaatggcataaagagagtgaaaacctgatggagagatagttgagttagagagtgtttgaatctggtaaatatgttgaagagatcataattaaggattatatatagttttacatacttgtatatggagtaatagggtatggaagtatggagggagggattgcaagttggctactgcaaggagcgtggaatcttctcctaaatataccattgtcatccggttttgaaggaaagtcaatcctagttgataacaataatattaaattaagtggctatgattcccactctacccattctacacacttctttgttcttacttgtactaaccttcaagcaagagggaatgtgtatgagagtactctccattatcttatcatgattaatttgattataattaattcatttgttcacaatgcagtattgacgggtaataaactctctcaattctcatattacttcaacaagtttaaattttgatagaaaaacttgctaaactaatattccatttatatttttaaggtgttgtcctacaatttttatcattttgcatcagtggctagtaacatatccaatataactgcctttacataatctaaagagaaaaaaaattataactaaataattaaatcaaaataaaaattaaataacaaaaaatacataaactagtaatttctctctctctccctctctttcctcctcctccttcttcttcttctacagcagcaacttcatcatcatcatcatca

SEQ ID NO: 88889 - DNA, 1433 bp, Cannabis sativa
  modified_base (1387)..(1401): a, c, t, g, unknown or other
aaaaaaatacacaattttgagagagaaaaccgtttatacaaattagaaatttataaatcctaaaaataaattgagatattctattctattcctaataggatttatttatttatttaattattttttagaaaagaaatgaaattcctaataggattatagtgtaatagggtacgtactaccagtaaattataaatacacagagaatgccagcttcctatctccaaaaaaaattaattcgtaagcttctaattaaatcgatttactttttttttctttctaattatttttacgtgttgaaagtttcaattgatttgggaaagagccaagatgtcatctaatactgaacaacctattgctcctcaatctgatcaacaactaatttctaacaatgatccacaaattagtaatcacaatggtcctgaggttactaccattggttctgatgatccagtacaggtcacttcttctattccacaggtttgtaataaagatgtccctactatatattataagagttataattattattcttctttctcattttgtatttgtgtgttgatatattgattattattattattatatatagaatggtgtagtaggggaagaaacaaatgccaacaattctattttctacaagaataagatctttattggaggattgcctcacgtgattgatgaaactgaagtaaaagcgtatttcaccacatttggtgaggtactaaaaacccaaattctgcgtgatgtggcaactggtagaggcaggggtttcggattcatcactttcagtacggaagaagctgtggaacaagtcttgaaaaataattttcacaacctcaagaacaagcttgtagaggttaagagggccaaaagaagggagaccaatcgtgttggtggtgtacttgcacaatctaacatcaacaacaacaataacaacatgtactgctactacaatagtaatagtatcaacaacaactattataattactactattaccacaacaattatattaatgagctttccatatataatccacgtcaaataattatgcctgtaaaccctcctgtctacccgaattacccattctcacatcctcacggacctcacccttcttgaattatttatcatatccataccgttgtaagtagattaagtatttttattttttttttggactaagaaatattaagttacttttaattaattatgattgtaatattggtaaagatttttatttttctttgtttagaaagtacttgatttgtttcttttcttttatcgattttttatttatacatatgcaaacttttttcttaatgttaaaatgtggatacttatggtgtcgtttggtaacacttttgttctttaattttttaatcacaaaannnnnnnnnnnnnnntgtttttaaaaaatttattttttaaaaataaa

SEQ ID NO: 88890 - DNA, 790 bp, Cannabis sativa
ctattaacaaactttctagtttaaatgtttctttcatattgtcttgataaataatttactaaaacaaaattaaaatattctttttacactcaaaagtatcaaaacatattaaacacattccattccattctttaaatacaaaagataataataataataataataataataataatttaattggaaagtgtgattcttgcaaattaagttaatccccacgatagaaaaaacctttttgtgtactcatgttcgaactttttagggaaataaataaatatctatatatgttctgtatgcaattaagtatagtactagctaggaccacttttatttatttaacattatctaattttttaggaccacttttcatatatttaaaaataattaaaattgaagattacttagcttggcaaataagaagttatatatgtattatattaatattataattaatcatgcttgctttgctaatatggcacatttcaaagttactttaggtaataatcactttcaccatttttctcaaagtgcatgccttctatatactaactcattattatatataattatatattcctactttgacctaacttgtgtttgctatctagtaataaaattgttgataacacttttttttttttttagggatatgtatggatctgtagtaaaattagaaaaacaattttttacttgaataataaaataaaattcaaataagttcgtaaacattttttctagtaaaattgctttttggggccttatgaactcggttaaatatttcttaaataaa

SEQ ID NO: 88891 - DNA, 678 bp, Cannabis sativa
aagcttccaatattatatgatgaaaaaaaataaatctataaatattataggggttatatggtgcttctataatgcacccccaaaaaaaaaggtgcaccgaagcattctttactgttttggcatctagaaattttttttaatctattttttttcgtaattgtatactttatgttacttgcaaaattttgagaaattcaatataagttacaatataggaagcaatgttcaaataatttatttacacgtatataaaattaaagagtcgtgcgtgcaataaattatttgaaccctatgttcggcgatcgacgtgttaaatttttagaatttctaaaagaaaattaggatatcttggataactacaatgtcaaaatacgagtggaacgaagattctcagccaccttcgactgtcccaacggagcaacccccgtcgaccacccttgtttttgcacccccgtcacctgttccccacccaagatgctactcgaactcaatccttctagcccattacgtaaccacttttcaccaatcaactttgtttgacatcataatggttctctcatccatgctctatatggcttaactatcttcgcttatggtgtatcgaaaaatcggtcacagaagccttccaagtgtcccaataaaccacataaagcagaatgttggcacattttaatactt

SEQ ID NO: 88892 - DNA, 636 bp, Cannabis sativa
aagacatttgtagtccatattacctgagcaatgctgatcaccttggttttgttcttgcaactccaattctcactggtcaaaatttccaacattggtgctgtgagttcaagatgtcaattggagcccgtaacaagacactatttcttgaagatactattcttcaacctcctcctaatgaacttctttattgttcttggattagatgtaaccaaatggttatgtcttgaattttacattctatttcccttgagattaaaagcagcataatgtatttggacactattgctaagatgtggactgtcctccacagctaattcaatcaaggaaatgggccatggatttctgaactcaatgaatccttgacctatcttcatcaaggtgatgattctctgagatgctactttactatactcacagcaatctggggtaaaatcaaccaactgagataaagatttccctgcacatgtgctacaaccatccaaaaccatggtcatctcaatcatgatcaagttctccaatttctcaaaggtctcaatgaaagttaccttgctatccgtgacaaaatccttctctttcacccttgtccacctctcaacaaagtcctttccatgaccatacaccaagaaagacaaagaa

SEQ ID NO: 88893 - DNA, 557 bp, Cannabis sativa
aatttgagtgataaaaagaaattgagtgataaaatgaacttgagtgagcaaaagaaagagagtacaaagatgaatgagagtgggaaaaaagagagccaaagagagaaaatgatcaaaacaagcgagagagaaaagaaagagaagaggtcaattaatgagattaaaatagagagaaaacaaaataacttttatgcaagaaaaagtgagattacgcgagcttggcggacaaaacaaccaatgattttgttcatttacaaggaggctattttaagcactaaccaacttgattcttcgttgcctagtgttgttgtttctattttgcaagaattcaaggatgtgtttcccgaggaggtaccatatggtgtgccacctatttgaggaatagaacatcaaattgattttattttaggtgcttcaatcccaaaccacccagcatatagaactaacccggatgaaaccaaggaaatacaaaggtaagttgaaggattgatgaccacagggcatatgagagaaagcatgagccgttatgctgttctagtaattcttattcctaagaa

SEQ ID NO: 88894 - DNA, 692 bp, Cannabis sativa
agggcataaaacctaacacatatgacctctaggaggaatttaggctaattgcctttcgcctcttcaaggtgtccttgagggtcttctaccaacccatttgcttgaggatgggccacgatagagaatcttttgatgatgccatatctattgtagaaatcattgaacatgtcagtgttaaaccgcttttcattgtctaacacaatcttttgtggaagtctaaattgacttatgatgttcatggcaacaaagtcaaagactttttttttgaggtgattattgccaagggtccagcttcagccaacttggttgtaacaccctactagcttcggcatgttaacgtgatttttaactaactgtgcaacctgttgctaatcaacgagtttattgaaaatcgtgattaattaaaagattttcttaagtaattataaacattgaaataacttacttatataaaactgggatcccgtttacagaaatatttacaaaagttttcactgtgcttatacaaaagtttgtcacctagtgactatacaaaataagccctgattcccaaagaccgtacactccaggcttaactgccccgacatgtacaacctccatccgctcggtctcatggctgctcaaccttaaccttgcccttacctacacatgcaaataatagatgttagtcgacagactcagtaagaaaagca

SEQ ID NO: 88895 - DNA, 538 bp, Cannabis sativa
tccactttacctctaacacagcaagagtattttcatatcctccaattaaaaatacttgatgagctaaagtccaaagaaccatgatcagatggtatatgtgttgatgtcttatatttagatcaaggggtgaaaatacaactaatttcaagaatgattggatatttttctttactttgcaattatagaattatcaactatatacaaactagaagtctaatggagggttacttttgatagcttttttttttctgtttaggacacaacacaagcttaaatctacaaactcaaccatagctttgtatgaaactatgcacatgaaggcaagcataattacttttataacttttttttttttgttgttgttgtatagaactcaacacatgatgataaaaatgttttttttttcagatcctttgttgtgtctatttatatttatatatatatatatatatatattgttctttgtttatttacttgtttgataaaaaatctcattactatttatttatgtttaactttataaaatttaatttaattt

SEQ ID NO: 88896 - DNA, 600 bp, Cannabis sativa
acttgaaatcttcaaaattgcagtatatgggtgtgagacatgacttgaaaaaatttgaaagatatttaaaatacaagttgaatcacgtcaatcgaattaatattgaggcagttatggtcgttttactgaaagttattcagcaccgaacacctgtattctttgatgcctaagtgatatattgacatcacttagtcaatttattaattttggtgaagtcactcaccagttctcagagatgtcatttttttgtgaaattgggtagacttaaaactctccaattttgtcgatattcccccttgtcgaaaaggtgaaatatcaaacttttcacaagtcgtggctcttgtttactacaaaaaaatagtcaagacagaaccataattagataagcaaaacccaacgcacaaggccacatgtcaacctggacgatgggtgctcctcgggggagttctcggggctcgttttgatacttctaaggcattcgtgattgcaaaaacgtctcctaccccatttttgacaaaaataagaagaatgtctgaagaagaatttgtgtttggtgagtgaaagcatgcgaaccaggccatacatcaaccggggcacaag

SEQ ID NO: 88897 - DNA, 728 bp, Cannabis sativa
cgtctctcaaaaaactcctgccgagtgatgctcgcaagcatccatgagtgcatccatgcattgtggctctctatccaagatactcgcactgtccatagttcccactatgataaggcaaatcccaacaccgacgctcaccttgtcactcgtgaccaaggtagtatgtgtggcaagatgccaatacgaagccgacgtgccaacgcttctatcatgccccattcgatactgtacgaaaagtctcccttgtcgcccaaggactctcatacgtccatggactaatcctcaaggcttcatgcctccacgcatgttggcaggccctcgagagaagccactaaactagcagcatacgttagacctctgtctctttccaacatggtacatccatcccatgcgtgtatgcaaactagcccacaaatgactactcgtgtcatctcgtgttgagactcgtggccaaggcactccacaacatctcttagaggtttgggccatgtcccgtgcaagcggcataccggcaagccaattaaaacgtacccgctaacctctggcagcttcttaaatgcactaccgggtcggcccgataatgtccatgagtactccaactcatggagacatatgagtcccctttgtggtcttcatatgcctgtcctactagtcccactaactagtagtagctcacttagcaccaaggtgtcaggaggtggtggagagctgacactagggtaccccct

SEQ ID NO: 88898 - DNA, 809 bp, Cannabis sativa
tgctgatttgaatatgtcatttgcattaagagatttgggccctattcattactttcttggcattgagatatatagggatgctgcagggatgtatctctctcaaagtaaatatatgactaatttactttgtcggctacagctagatggtgtcaaaagttgtccaaatccaacaagttcaacacaaaagttatccttgagagatggggaaccattttcggacattactttatataggagcacacttggggctctccaatatctcactttgacacggcctgatgttgcttttatcataaataaactaagtcagtttattcatgctcctactgtaactcattgggaagcatgtaagagacttctcagatatctcaaaggcaccatctctcacggcttacttctcagaccagtagccaccatggatgtttgtgcttattcgaatgccgattgggctagttgcattgatgatcgaagatcaaccgggggttatgtggtcttccttggaggtaacttggtttcatggtcggccaagaagtagaatgttgttgctcgatcgagtacagaaagcaagtttagaagcttggccaacacatctgcagaaattaaatggctgctcaatctactgtccgaactacacatcaaaccagccaatactcctgtcatttgggttgataaccaaggagcagctgctcttgcagctaatctggtttttcatgctagaagtaagcacatcgaaattgatcttcacttcattagagatcaaatcttggccaaaaaacttgctgtccgatatgttccagcaatcgatcaag

SEQ ID NO: 88899 - DNA, 648 bp, Cannabis sativa
atatttcaaaatttattgattcaaatatatattccattattatttatataaaaaaatataatttaaaataaaatttaatattttcttaaatatataaatttttttttgagtttgttattttttactttatttattttaattttttgtcaaaaatatgaaacaacaataatttattttattttgttgttagtgatgtaaaaaaaatatttgtttaattaattttaaataatttattataaaaaagtaatcaatctgaaatttatggattagatttaatttgagttattatatgaatgaaagatgtataagttagatatttttggtaaaaattcttaaccactttgagttatctaattcaaatactaaaactcttattagttattataatgtcaaaaagtaatgttgaattcatacaacgtggtcccaaattatatttctagaaaaaaattgtaaaaataaaagaattctcagaactttaattttatttttgtttttttaggcccactttatttatccaagttgatgagtgtgacaaattatttcagagacaaaattaataatagcgcttacgtactccattacgtaagcatatttattggcaaacgatagttttataagcaccaaaatgccaaccactaaattgtgttt

SEQ ID NO: 88900 - DNA, 754 bp, Cannabis sativa
acaatagtatagatattataattttgtctaatattcattttgtattacttaactaagtaatgatttgaatacataaaaatatatacattttttatagagtggtctataattatattaattttaattataggtaccagacataaaaaaaaaaataattataaattgaaattatattattgttagttgtatggttgaaatatatatatttgagcttttatatatatcttttagtgaaaatagaaaaatttagtaaattggacaaactccattacatgtatatatagtttaaagagcaaaattaataataataggtcaactaagtcgtttacaataaattagaaaaaaaaaaaaaaactccaataacaatttcaactaaaaatccaataagccatggtcaatcatcaaagaagtatgaaaatatactaggtttcttaatcaaatgagcatctgacagagtccacctattaataattatcggtcaatgatcttccaattaaacttgaggacataacaatcctactatttcaatcataaataaagaaaataacacgaacaacaatgttgcaatgcttaatcattaaagattgaaggtcataacaaagggtatgtaatgatcaggagatccccaaatctgatgatcaaaaagagagaccaagacgtctttgctaaagggatgtagatccattgatgagataccaacaaaagaaaaggaaaaggtcaccaatggtaacatcaagatgaaccatgttccatc

SEQ ID NO: 88901 - DNA, 1152 bp, Cannabis sativa
aaggtaaattaaccaagacccaagtaccatttgcaactaaagcattcatctcttctatcgtcgcagcaagccaacggggatgagacattgcttcacgaacagttttaggaatagtgatggaatcaagagaagcaataaaagagcaagaagaagaggagagatgattataacaaacaaaagaataaataggaaaagtacattggcgtttacctttatgtagtctaatgggaaaatcatctttgatttccgaatctaatgacaaatatgcacgtgcaggacatgaaactggaggtggaggagggggtgcctggtgtacactataggaggccgagggagtcgtagaggtggtggaggtgtatacattgtgggagttatggccaaggcaggtgaaggaacaagagaatcgtcagaacatgtatcaagcacataggatgtgacagaatataccaataaatcatcatcctccccctaacgagtaggagtagctgaagataaaaaataaagtgtattctctagaaaggtatcatcaataaaaccaagatatttgttgagatcaatacaataacacctataccctttctgaagacgagaataaccaagaaagacacaccttaaggtctactttggtgatagatggacgggtatcgtgagcaaaacaaacactgccaaatacccgaggagcaacttgaaacaataacttatgaggaaaaagaattttaaatgggatttcaccattaagtacagaagatggcatgtgattaataagaaagcatgttgtggaaactgcatcggcctaaaaaggtttaggaactttcatttaaaacaagagggcacgtgcggttttaacaagaatatgtatgtttttatgttctacgacacaattttgaggtgcagtatcaacacaagaagtttcatgaagcatgccattagaggtcatgtaagataaaaattgagtagatgtgtactctttggcattatcacttctcaaagtgcgaacaaatatattaaattgattttaaatctcaacacaaaaatcatagaatatagaaaacagctcaaaacgatttttttattaaatataaccaagttacacaagaataatcatccatgaaagcaacaaaatacctgaatccaggttgagacaaaatagga

SEQ ID NO: 88902 - DNA, 930 bp, Cannabis sativa
gcccagtttacctgctcggccaccttcccctgtaccaggaaaagggaaggccgtcctggcggagataagagacttatcaggtgacaatgaacttccgagtcttactcggacaaacggttctcatgaagcgcaggatactccgtcttgtttttaaacttcttgattatcatgcttttatacttctgatgccttttttcttttaatcatgttgcttttatttcgtgcagacatgtctcagaagttgctcgatgctctgaagaagagagttggaggaagctcaagctcatctcttccggccaagaaatctaggggtggtgaggcgaccccatccaaggaaaaggcaccgaccaggcaggttattgatctttttgaggagctaactgtcgcgtaccgttctgctccgaaatctactaagtttaaagattctcgaggaggaagctcgaacaggccagaacagtcgaagggcggatctgagctgaccaagagcggatcctgagctaattctgctgcttccaagaacgctgccatgtccaacaccgtgagggcgaaggtggacttggccaggaaagacgctgatgatgccaaggtggaactcggagctgtacgaatggagctgggtgaagtcaacaagaagcttttcactgctgagaggaaaataacttagttgactaaggacctcgaggcttctgaccaacttgaagctaccatctacttctggccagaatgttgatctgccttccgctcagacaacagatcctccagctcctgctagcctagaagacccaaacaaagagcttgggactccagctgcctaaatgcttctccttttatctttctttttttattttatatatatctatccgaccataaggcctcttttaagacaccatgaccggccaagccttctttaaacttggaattatttttcat

SEQ ID NO: 88903 - DNA, 749 bp, Cannabis sativa
agttctaataccaacattgatttgccaacccccttttgccaacacatcacaagtaaattttattttactagcgcaataccaacttttgcccacataaaaatgtgcgggcaaaagtgacatttcttgtagtgaatttatatctttcttctatagtataaagttgttgactcaccgtgtacacccaacgaaataaaatcattaaggatgaattggcgaaatttattctgaacaaactcaataaagcaaacatcgaattgaagcattttttagtatgagtatatagttttgttatattcattagtttgagtatgaatataatattttttgttatattcttgttactaaatatatttattgattttgttatattagtgtgttattttgtttatgctattctaaagtatatgttttgtttggtgattatatatatactagatagaagttacgtgacttgtcacgtatactaagttctatttaaggttatatataccaaaaaaatatcatatgtaaatttaaagctagtctgaaatcataagcagacatatacatgttcttcccttcatgtgatacaaggaagattatgaaaccgaaactgagagtaaaataatccgctgcaacaagtttaggaacaactcaaaaataaagattatgtaaaactctttcaaattattatggtgaagaatcacataacacaaaaaactaatgatgacaactggaggaactttaaataagaatattgcactcatcaa

SEQ ID NO: 88904 - DNA, 661 bp, Cannabis sativa
tgaatgttttactttaataataatgcttctattattacttcaataataataataaagtggatgaatgtttttgtaaattggcttagttgttggttgttccattacaggtcaagataaaaaaaaaaaaaagttaagttaaagagagagataaaagtaatactaaatacaaatatatttttaatatagtataaaaaatattttttttaattaaataataaaattaagtacaaaaattaaaattttttatttattgttagattaattttttaaaaaaattaatatttttaagttgacatttaattataattattttttaaaaattacaaacaatcacatatatattcatttcctttttgaagatgatgaaaatactcaaatatcaaacaaatagggatgtatcaatgccctaaagggggcattgaagaattttcttaaattttataatgatacatatgttgtgttgaacaccataaaatataaaaaaattctacaatccatttcttaaaagaaatacaccgatgcatcctatttatttcggcattcgagagaattttttaatgtattttttttcataatcgtgatgttataatcataggacattctacaaaattttgaaaaattcaaaataatttaacatgccgaaaaatatgattcaaataat

SEQ ID NO: 88905 - DNA, 1048 bp, Cannabis sativa
gccctgctttagaaaaatcttgtctatagcgatcatagttggactttggaagaggagatccttcaagccatggaccataaggaaggtcaggttccttgccttcatccagtttttccaggaaagatgggcacttgtcaaatacatggcctataataccacattcatagcaaaaatctggtagtcgttcgtaacgataatcaagccaaagttcatcagacatccaaggaaaagtgattgtttggccacggagaatgggttgagaaacatcaataccaactcggatacggagaaatggatcccatccttcattgagcgagtcttcatggacatcgatgtaagtaccaagtaagtttccaataaccttagcaagagattcaaacttactcaaaaagggcaatcgaaacacttgaacccaaaaatgagttatagtataagaacccaatggagcatttgacagaacagttggagtgcagaggatcatatgttggttatggaaatgctaaggttccttggacaaaactctcagtaagtcaccttcacagccaaaggtgatcataaaagaattctcttcataggtagaaatagtgacttcaaatctccctttccattgagtagtaatgaagttggtaaattgctttgggttgaagcctctatgagagaaaattcaatagataatgcgatgagaaacagggtgagtgggcggcctggggagattggaaaaattgacaacttctctttcccgattggagagagctcgtgagatatcaggatgaaaagaatccataattgcagatggagtgagatgactgtaactgatgctgaagaagaaccttgaagaagaagaagaagaggttataatttgaaaaaagaagagcgggagtggttgagatacaagggaggaggttataattcaaaatctgggaggaaattggaaaagaaacagttaaaaagaaaataacagaaacaactgccacagagcaaattttaagggcagacaatgctcacataaattttagaagttttttgtacatgggagacttggagttat

SEQ ID NO: 88906 - DNA, 872 bp, Cannabis sativa
ttacaattcatggtaataaataaaaggtttggacatccacataattattaatatttataatagaaagtttaatttcttgcattaatattaatatttaaattgtagttttacaatttttgtaagtatttaaatattaaatgttaagtaaattattacatggtaattcttaattaatggaagtcattaattttttattttttttaaaaaaaataatttaaatataccgtaaataacatttgaataatgatttaatatacttatagagttctataaatataaattaagccaaaaattaaatttaaatatttatttacaatttagagttaaacttagatattcataccttaaaatactcaaatatttttctaaattaaatataaccgtccttaaatcggtataatttaaatattatttattattattattaataatgtatgacaatgtttatcatattttgttaagaaaaaaaaagacaatatttatcatatttattataaattttcatttcgaccattttagtaagtttattgtaaattattttgaattatttaaaaatttataactaatcttaaaaaattattataattaaaagctctcgtaaatgctaaaatagaaagtagagtatagcgaaaaacaaaaaatagaaattatatctgtttattctttgtgatgaaggtttctctagtttgttgcgtagctatgaacaaagtggcttacttacggggtgtaaaattgctcgaggcgcgctggtaatctctcatatgatctttgttgatgacaactacatttactgtaaggcaactgaggaagaagcgtacaatgtgaaggagctattgcatacttctgcagtggcttcggggcaaagaatcaac

SEQ ID NO: 88907 - DNA, 717 bp, Cannabis sativa
atgacttgagactactcaactctgtaaaatgttgttttctttcctttccttcttctttcccatgtgtcaaacattgatgtctatgtcatcagggctagttttcatgtaaaaagtttccccccaagtcagctttgcacctatgtgaggcttacttcatgacgtagactaagaccatttcatgtgaaactatcaggtgggcatcaatttcaaaaatcttagcaatttttttctgattgtcttgagtgatttcgtttgatttgtgagacttctaaaatttatcaacactaaaatttcaaaaccaactttgatcttcaactatcttcttagcattggctctcttgtcacactatgcgttaagtagatatagatgtagtctttgttctctcctaggttgtagccttggagttcttattggaaattattttaccatgatctatatttactaacatgcatgttgattataaatctttagtctaacaacctaaatatgaatattcctaaaatgataaataaacacatataaagtttagaaaatcttacaaaaatggcagcaaaatataatgtctcattccattcaattctataatcgttaatcctttatgttgcaaagtatgatcaagaactgaacatggatcttttcctctttcaattttgttcatcacaatcttccacataggcatgagtatcaacttgaatagtgtgggttgatactcaaat

SEQ ID NO: 88908 - DNA, 813 bp, Cannabis sativa
actcggcctactagagaatctgtcctctgcaacaaccgccaagcttgcttcccaagtagcgacaaattgtaatctctaaggttacggaaacgaagacccccattactcttgtgtcgactcaaacgactccatttcatccaagtaatacctcaagaatgttgggacgaattcccccaccagaacttggacatcaacctttctagcaaagtgcatgtttcaataggtaaaaggaacacagacatagcataagacggtatggcttgtgcaacggtcttaataagaatcttcacgccccgctttagataagaatctaccctcccaactcaagatcttaattttttccattttctcttgaaggaaattctgaatggcttttttgcttctacccaaaatacatggcagaccccaaatagaagctattgtcactagcatgaaccattcccaaccttgcacaaagtctgtctcgaagatcaaaagatgtgttagcactaaagaaaatggaagactttgctcgattaacttgttgacttgaagccatctcaaacatgtgtagtaaccggagtacattgtcagcctcattctcagttgcgcgacaatagacgtagctatcatcggcaaaaagcatatgagttatagttggcgcaccattagcaaccttacaccctctaatgtggccgcttctttcagccctctttatcagagaagaaagaccttccgcacaaataaggaatatggggataaagagtccccttgtcgaattcccctactagaaatgattggaccaatctcatgccccccatgcattaccatata

SEQ ID NO: 88909 - DNA, 602 bp, Cannabis sativa
catttgaaagacttaaccaatgttctcgcaacaaaatacacagagtataaaatcctaaggtttaagcaacgactagaagtgataaagtctatgtgaaacctaggatgagcaggcgtgcgagtatttgaggtgttcatccgaatacccgcgtttactcaaaagataaagatgcgattattcaaacattcttcctaaagttcacgattatgcaaatttcaggtctatttttctgggattacccagtcctacccgaaaaaaacatatccctatgaacatttcctacaaacatgcatttctaaacccctcaaaataccaaaaacccagaaaaggcagttttaaacagaaaccgtaaatgcaaatgaattcgaaactaacctttagttttggtgatttgttcctgcgattgctctcgattgcttcggagattgaagagattttaaaaggagaagtaggaatctgggcaaagtatgaaggtttctttgaaatctcaataaaggagggaaaaagaggttaaagacgagagggaaaaatgaaggatttagttcgtatcaaagggtttaattacccatatcccttattaattgggattgtgacacgtggca

SEQ ID NO: 88910 - DNA, 700 bp, Cannabis sativa
cattcctttgtgtgcaagactgcatctttggctgcactgcacaagtccaagagtctaagggatccatccactaattcatcaacccatttctcttggtggcctgtggaaaaggtttgttgtgttaggggtagctgaagcaatttctcaacacaaatgtgcaaatcctcaagaacactgagctggtgagcaatggaagatgatgatgaggtggcatcagaacatcctattctcaacaaatggccactgcactcttcgataacagggtgtgatttggatggcaagctgtttgagcggacatggaggttggattttaaggcagccattttttcttctagagtaagagatttttggctagaagttttgaatgtgataagttgttgcaaatttttccttgctttctctgccatctacttcatatgtatttatattaaaatcattaggtgaggaagacgtgaagcatcttctaaatcaacacatgatattcagatttggacatatacagtgtagcgatgtctgtgccgtgctccctgcccacccatttctccaactcatttcttatattaacatatataatatcttagaccatctgttttagttaatatgtttatctcaagtattaattatatgttccatgatatattttgaaaattttaatgtgaatacagctcttattgttggagccctgcccgtgcacacgttt

SEQ ID NO: 88911 - DNA, 760 bp, Cannabis sativa
  modified_base (512)..(526): a, c, t, g, unknown or other
  modified_base (661)..(678): a, c, t, g, unknown or other
ttatatgtgtttaaattacattattttagaaattcatatttaggatgttaaataacgtacatggtagtaaatctagatcttggtaaaataatccccaacacaggtttgtgggaagatttgataaaattttgattagagaagaatggagactatgtgaagtgatagggataaaattagtaaaatgattaaaaaataaggtaaacataataaattttaaaatagaagataaaaatttaaaatatcaatttaaaagatatatatgctgtaattttttttttaataatttacattgccttgatctccaatttatcttgcaccagctctcgggccaagtaacataaagtaggggtgttcacggtgagggtgatgcgatttttgactatttattcaaaccaacccgcactaatttttcaaactgtacccgcactgcgaaactaaaaaatcgcagaaatcgcactgaaaaaaatagtgcgatgcgatgcggtttggactatcactaaataattaaaatnnnnnnnnnnnnnnnaaagcatgagcaacacttgtcaaaaataccataagacttgaaaataaatagggtaaatactattttggaccctgtgttttgttaaagttactaattagatcatgtgtttcattaaatgacaaaatagaccctgtnnnnnnnnnnnnnnnnnnaataggaccctgaattgatttttaaagtttataataatcggatctaaaagtgctatgacaaaactgtttacattttttgtat

SEQ ID NO: 88912 - DNA, 701 bp, Cannabis sativa
cttatttgcttcattggatgttgataccataatagaagttcatgctcatatagttaaggtcataataaacggcaaaatatattgtattatgatcactcaattgcagctaatggaaccttcaatggaaccaataagcttcttattggataattttttattttaatttctcaataacataatttaatatatttataatttttagtttactttctaatgactttgagtagtcggtgtatagtttgaatgaagttaacatgtctaccaaaaagaaaattaaaaattaaagtctattgtctttgcttaaatttaattgtctggactatgttctttttagtaacatgaattctttcataattttagtaacatgagtggatcatcgtcaaacatgagaaaacttaattggtatgcaaatatttcagaggagcaacgagaggcaatacgaaaaaaaagacgtgatgcttatgcttccaagaaactttgtaagattgtcttctattgttattttatttttatcttgtttagtgctcctttccatattaattttatatcaatttcttctaggttccagtttcagttctgtgtcctcaaatttaccttcaactatcatttctccttctgtagtaacattaaaagatattgttactgttgataaatctgtggcatcaagtttaccgtcaaaaattatatctccttctgtagta

SEQ ID NO: 88913 - DNA, 659 bp, Cannabis sativa
cagtttaaagtttgcattctatttttgtttaatgatgtgtttcccaggggtattgtatggttttgctaactttattttgtaggtgtatattacttaaaaatattttaattatctaaagttccaaaggggaagattttaaagtcttttttttttagcaaattaggtgtcaaaatatttttttatatgtgatattcttgtgcatttgaaatgatttatttacattgattctgtgcctttattgctcatttatttcttagaaaagattccttttcagttgtcacctttttgtttagaaaacttcttgtaagagaatgaattctcttatggaaagttgtctatgtttggtaactttgactttcctctttctctttaaagattttggttgtgttttgataagattagatcaaacataatatatttggtaggttttaagtccatattcatgatcgtgctccttttttttttggaaagtttcctttctggtcctactctgttgctgcagagtccgattctgatgctacaaatcatgatttttttaggaaagtgttgcacagttgtgaaatcaaatttgtacctatctctagggttgctatgttctatagatagaaccaagagagcagccaatcgatttagcacttttagttttcattttttcatat

SEQ ID NO: 88914 - DNA, 562 bp, Cannabis sativa
attaattaaggtacaataattgtgcagaacatgatcagtattgaaaatgaatagagaagtgatggttgtttaatatactgggtgcttttgtcttaaaaaaattaatttcaaatacattgaatttggctcatccttttcattttcttatttatttcaagttttcttagttgatgttgagactctattttattgagacattttattcaaacttatgtacagtttttgttttttgtttgctagatatgttgtttagagatttatttattgtgtacttttatttttataaaccatcttattttttctcactttctactaaattccttttacttttttgggtaattcttgtttccacataatatttatctaattcttcattagtcagtcaaatgatcaatcaaagatacttaatttgctaatcaattgttctacccaaaccaaacaaatacattttattcatgtagttgtacaaaaactctcttttggaattgattccattataactttgattatgaagattaggataaagttacaatgttttgttttagcttttttaggttattct

SEQ ID NO: 88915 - DNA, 970 bp, Cannabis sativa
  modified_base (915)..(915): a, c, t, g, unknown or other
aatcaacatacttttgagtagatcatacttttgagtagatctaagatcttggtaaaataatttccaacagactccaactggctctttcctatctatgaaggtcctttagcgagtgccttaaaacgtgactccaaaagccttcatactcgcttccaaatgaactcttacttaggctgacatggagatcgaccttgcttaaaggagagttggttaagtcagttattgcctaactaacttaacaacctcgattcttgtagccattaactttaggatcttgatcctaagcctataaataccaccaaaacttatcatttttagaatgacaaccagattgagttaatagtgagagagagagagagagatatgtaaagagaaaagagagagattatgtttggattttgtaagaagaatctgttgggaattgccaataatatccctacacaaagtcaactcacacatacaattcacaaggtctatcttgacctttatcagctcagcaaatggacaaaaactgtccacgaatcacatgcaatatcaacacattacattaattaaaatcatctaactttaccaaattgaatagcaagaagagtgatcaagtttttttagcttagtttcgatagggttaggttcaaaatatgcacgcaatgttcaagtgattgagtttgattatgcagaagaaagtcaaagaagaagagaagcaaacacagagattttatagaggttccccctgagttgatgggctactccactttgagctcgcctcagaaatgagcaaagcccttgcactattcaatcaagatccaatacacggtttaatgaagcttccagctataagatcaactggtaagacttaatttcctctctctgcttagtttcctctgattctacttctttttttttcatttttttttnttttttttttatgaattagagaattatattgcacaaaaccatttacatcctagga

SEQ ID NO: 88916 - DNA, 621 bp, Cannabis sativa
ttctcgtaaagaactcactgaaccccttcgagctagggttgtacagagtgacactcaaccattcgcagtactcacactaccactggcagtgtttaggggtctcgtggcacatagtatgtaatcaagttagttgtggtgtaccggagtcactattctcttaacgaactcactgaacccagtacaaccacggatctactcggtgatgtcgatgcactatgacagaagtcgcactatcaatgtaggtggtttgggctgagtatgtactcagatcatcagtagtgtaccgggatcactattctcctaactttattaccggagtcactttgtgtctcataatactaatgtattcataacattaaactgttttttattacatatctatatttgtatagtattcaaaaaattattataatctttattccaacgattaatacgttcatgtaatctcaaaaaaattattttaatatttaatcaaattaaagtaatattttaatgaaatcttaaaatcgtatttaataaaaataatgagtttccattattagtaaacatcataatttaatttcttattcatttgggcacacatgtttatttggacataatattaggatatttgttgctaca

SEQ ID NO: 88917 - DNA, 4234 bp, Cannabis sativa
tctttattttcccatatttttgttatttttgtaaatagcccattttttttgtaaatagcccatttttatattaaatagcccatttttatatttatttaggtccaatatgtgaatgttcaacccaaagcccactatttattgtattattaagacttaatttttttttcatatttattttcaagccttattgtatttttgacaagtgttgctcaagttttgttgtatttatgatagtttaattattggtgatagacaaaatcacaaaaatcgcaaaacagtactacaccccaccattttttgcagtgcagtttctgtggttttttagtttcgcggtgcggatgtattttgaggcattagaaaaactgtatgtgcgaattcatttgaaaaaatagtcgaaaatcacaccacctgcactgcgaatacccctaactattaccacaattttttaaaattgaagactaatctgcatcaaatataaatttttaagacttatgtcgcaaattttccttaaaacatttttttttttttaacgaaacgaaaaaaaaaaaagaaaaggaaagaaagaagggcaggtcaggaaaagagagtacacgtatatatacactatattcagctcaatgcactattacattcagctcgactaagcaaaactaaaactacaccttaactaagtttgataaaacggatctttaatcttttaaacaaagagttttagtcttcgacttcttaaccatatcttcttactatgtttagcatttacttttgcttgtttttttattcacttttttttggggtgcttgtcaagaccaacaccaccctctgaaagtacatcgaccaagaataccaatatacgttaccacaaaaatagttcagacgtcaattaggcaaatggccaattattacaaatcacaatccatcttctgctacaagcctagaataaacaatataatgtattaagtggagtaatcaatatatatttcataacaattagagaaattacctttccttcttcgctcatatcaattcatgaccaaatgaaaagaattacaattaaaaaaaatatcaaggcaagaaaatccaattacagttgaaacttcatgcatatgagacaacagtaagagttattactctagcaatctttccccagctatgaatattcacaatccattagtacaaaagcgaaaggcaaagatggcaaatataaggctggtataatataaaatgttatttctgtaaaatactatggattgaatatattccagtgatgatctgcaggtaggctgtcctttatcttctcaagcctcttgagaatgtccaagaaagaaggcctgtggctcatgtctgccgcccaacattgttctgttaacctaaaacattcaacggaagcaaatcagtaacaaaaatctagaaatgaatgaagaatgcaccactctataatctgagttcggtagaaatctcgtgttcattttgatgtcataatgacattgttatgcttaaaaatgtaatgttgcagttgctttgaatacaaaaataagttgaagcttgacacattttctcagatcagttgataacgaaaaaagattaataagacttactccctcaggtcagggaggtatccctttgcccgaaatgaaggtctgtgtccttctgccacatatttggctgcttcataaggctcataatttgcaagtggcgggtccccttcaagcatctgcatcggttgacgataaatgagcttagtaagaacaagtggcaaatttgctcttctgattatatttttttaataggaacaaaccaaattacctcataaagtatcattgcaaaagagaacacgtcaacctttttgtcatatctccgatgcttaaaaacttcaggagccatatatcggtctattgtttgttgcatgcacaaggagcaaaaagaaaataaataaataactagaaaatgaaaatttagttactattatcttattttcgtcaacaaatgttatatgggacagcactcacaacttccagtctccccggtcattttgtacacatcgtgagaattctgaaccttgataagcttgcttagtccaaaatctccaacttttaaatggtctgcgctggaattgactaaaagaacatttctgaagtacaaaagaaaatttcagtaggtaaatatagaaagtactcttatggggcgtttggtgtgaggtttagattctcattctaatcaagtctcacttttttacttaaaatggtggtaatgttaatctcctcaaacacatgggtttcacattctctccaaatctactccctccaactcaaactcacatagcaaacaccctattaggtggcgtttggttggaagaaataaaaacatagctagaataagaataaaattccaacactttaaaataaaaccaaacaaagaaaaagaataaaatttgtttcttttccattctattccatttcattccttccaaccaaacgccactttaaggagtactataggttctctaccagaaaagcaagcctgcaactatacagaatctccagaacacctgtatcaggagcagctactaggtaacatattgcgagaaaaaataagcttaccttggttttaggtctcggtgaattatgacgtttggttcgttatgaagataagccatgcctctggcaacataaaaataatcagaagtgagatcgacaggatcttatttatttatgaaagttgcatttttcaatgaagtaacaggcaatgtttcccaaaaattttatagatcatacatgtttgatattctagagttgtttatttcagaaaactttctgccatcaacgatatttcatatggacatttacatggaagaaaagaaaatgttctgatatattataaggatatccacgtgaaaaacaaaagtcaatacatacaatgcttctaattattcagcaaagaaacactagtcaaaagacttaaaacagacttaaagaaaactgtgaatgctttctaaaattttagtcccaaaagcttactagtagtcagactccattttcaacagtgcaaaaaatccagttaacaaataaatactaacagaggcaaagaccaaaggcaacataaaaacgtaattgagaggcatgtaatttaattgccatcaaagaaattataggtatagcaaccatttctgaccatgacaataatgtgtttcgaaacattgtaaaattccaagtacctagcaatgtccaatgcaaagtttacagctgttgagggactaagcgaacctttttcttttaggtactgatgaagatcgccctacaacagcacataatggatgaaaataaggaacatggcttcagaattaccatcaaatttttcaacaaatgaaatatatctctaggaacataaatcaattatgcatcaacatacccctcgtaaatactctgtaattaacataagtggcttccgctcagtaacagctccaagaaattgaactatattagggtgacgaagcttcactagcaaattgacttcatgtcggaagtcctgactgcaggcaagttaacatgtcaggaatttataattacttcaaatttcaaacgagagatttttttttttttgggtggggggttgggtttttcttttaaatttttgtaacataattcttattattgaaaaattcttttgtataagagaagtcatattttggaaggtcaaacttaaattatgcatatatcaatttataatagtacaacaatgacaaggttgatgtctcataatgcatcggatcaaagtatgactctaaaaattacattaaaagaaaaactataaagatctcctaacaactgtgatgcaacagattatatcaaggttatataataattgatatgaaacttacatcaccaatctatcatctgagagagatggaagaatacgcttgacggctactggtgtcccacgccaataggctttcaaaatctcaccaaaagaaccctacaatcatcaacctttgataattaaaacaaatgttacaaataactaagaatacaacatttgcctgcctgctaacaaacaaacttcaagcagaatgcaggtaactccaatatatagtcaatttatgactttcagacatccatgcacagaggaccaaagggcaatatatacaacaagttaatgagtgaaaccagaagtaggctctttcactattatattgatcctgtaggtttctctttcctcccctgttttttttttttttttt

SEQ ID NO: 88918 - DNA, 544 bp, Cannabis sativa
ataaataaggtttaattatgaaacttgcatattagttatgatttattattttatgcagatttatttgaattcaggatgcattatatatgtcatatatgaaattttgtgtttttacatttttgtgcccagtaacatcagtatgcgacgtttggccattaaaatcacatttttgtatttagtagtagtggggtaatatagttagacatttagaatgtcgggattataaggagtaatggtctttgaccattttttccttaaagccactctaccctttagttatgttagtagaggtattttagtcattttgacttagagtttaggtggttgtatgttagggtggcagcttgccactatttgataaacagatttaatttatcttttctttgagtgtgatattaaacaaaataaaaaattgagaagaaaaacctatctttgacttcttcttcctcatcccttccaaccagcaagaaccaacaacaaattagagttttattaagcttattttgaggaatatctgctgtattcaagtgatagagatctaagg

SEQ ID NO: 88919 - DNA, 687 bp, Cannabis sativa
ttgaagtcccactcttttaatagcaaaaaaaagataaaaaaaaatcatctttttgaaaattaaaggggcgcgcctcgacatggaaatcctatgcctcagcccgtgtttccaaatcttcatgtcctctatagattactaaacacaggcctaggcataggatttctatgcctaagcataacctccatttatttgggcagtgagctttctgctgcattgactgatagtattttagtcataactctctcaatattgcttggaatttgacgattcaagatgtttcagaaagataaaagagagatctagaacttttatgtttcaactttctccaaaatctgatcagaacatagtctaaattaggcttaaagttttagcattattttcttgcataattttctctattttatagatcatctttttgtgagatttaaccaatttatacatttcaagtgtcgaaacttgaaattgaagaaaacaatcataattctgttccaaaaagtgataatgaaaaaaaaattaactctaaaaataacataaataataagctaaaaatatcctaacattaccgtattaaaattaaattcaaacaatcagttataagtgcttattattattactagagaactaattcgcacttcgcgcggtgttgaacaaaaattataaactttttagattactaattttttatac

SEQ ID NO: 88920 - DNA, 1119 bp, Cannabis sativa
atttttttcaccatttcaaaaaaaaatgtaagtcctattcaaaaaaaaaatgtaagtcatttcaaaaaaaaagagtaagttttcgaaacgtaaaagagaaagaaatatctagcttaattaaataatattgacaatggtattataataaataatttttttttgaattaataattattgtggacattgtcccacatgaaataaatggtagagaattgagaacatgttactccactcattgcaaattggttttgagatggaccctatgattctcaacaatattaaataaaaaaatttaacactgaagtatgatatttgtaggattttgccaccttaaattgttttttttttataaagttccttcaaattaattatggaaaataattgtaaatttttcattgggtttgcatgtcatttatttttcgagacaatttattaattaatgtaactatgatacatgtataattacgagtctatttaattaacttaagttaactataacaaagtatattgctttataattataaattttattgttagaatactatctagagtatattatttggaacgaactttttaattagcactacacaaaattgccacaaagcatgacactacatgaaaaaatatgaactcaagcttggaacaacacaaaaaagtatagattctcgtaacagaactgcaaccgcaccatcgagatcttaaaactacaaaaaagtggtgtggtacagtttgaacggtttataatgtattattattataataaaaatttaaaaatcaatctataaaattttaacaatacaacaaaaaatttttattgaagttttaaaaataaaaaaataatgtaatatatacatatattacatatatttgttcttatatgaaaaaagaataaaaattatattgtaaaaattagtaactttgtaatatatagtgtggtgcagtttgaactgcaattattaaatttaaaattgcaaactgtaccgcaccgcacagttgagaaaaaaatgcaaattgcacccgcacaaaagatttcaaaccatatttttaatgcagtgtggtacagtacgagtggtttgtacggtgtgggcagttcgatgaacatccttagttatcaaattg

SEQ ID NO: 88921 - DNA, 736 bp, Cannabis sativa
  modified_base (276)..(281): a, c, t, g, unknown or other
  modified_base (674)..(681): a, c, t, g, unknown or other
attagtaatcccgagtaggggattagggtttcataagtatattgggtagcgtgcctaattatttagggtgttacagttccatactagggtacaaccaataaaccacatacagtacgtacctcattacacgagtgttggtagggttgttttgtaccctatgatataccacacacaccctgtacattccgtacttgtgatggtaacatcgtaatgtactccttaacaatatactcttggattatagttttactaggatctagatttactaccatgtannnnnnttaacatcctaaatataaatttgtaaaacaatgtaatttaaacatgcacatataaagtttaagaaaccttacattggttgcagcagaattaaatgactccttctgctgagatctgtaacccttgtatcctttctatagcagagtatgaccaagatttgagcccgattctccttcacttgaattggattcttcacattcttacacactatgattgagaaccaacttgtgatgtgtgggcaggtactttatcactatagggttcgaaaattgaagagagaaagagagagagaaggattcgaaggattcgaaggctcaaaatttgactaaaggcaagtgaatggtaaaataaatggtttgaattattttgcattaaaaaaattgataaaataaatnnnnnnnnagacctcaagtggccggccataggatgtgggcccatcactttgcaatttttccat

SEQ ID NO: 88922 - DNA, 680 bp, Cannabis sativa
ttggataagtgctatgtcctttccaggacattcgttaaagtaaagcttgggttggatgtgtaaagatcgtttagcttaaatttggaaattagcagataattagagtttaattatggagtctatttattaattctaaattattaatttatagtgatttatttgcattcagaatgcattttatatgtcatatatagaaatttcataattttgcatgttcggtgcccggcaatattggaacgcggtgtatggcttagtagaatcacatcttagtattttagtaaagcggggcggtatagttagacattgggaatgtcgggacttgtcgggatttttgaaattcccaaaatacccttaagtgactttaagttagttttgtgtgggcaagggcattttggtctttttgcccattttgtgttttgtctttatgtgagtcaagtaaatagatgcatttagatttttagttatatttgctgaaagtaatttaataaaaccaaaaaccatttctttatatttttttttaaaaaaagagttagagaatcacatttattctccttctctcttttccctctcctaagccctagaaaccagcaaggatcttgggttttcttcagcaattttgggtttagatagcatctttgttgaggtttcaagctttggtaagttttctagttcctcttttg

SEQ ID NO: 88923 - DNA, 680 bp, Cannabis sativa
gtcggtttaaataatttgtctatgtaaaatagtctattttgataataagtaggtaatatgctaaactgagagtacatcccatacagctaacaactaatatgtccattaaatacaacaaaactacgaaattgaaaatgcaaaataataaagttaccatgagaagcagctatggcagagaactttaaaattgaaagaggataatatctcaccaccattgatgcatgcttcatagcatggtctcaaagtaattgcatgttcaagaggtgcccaatggcaagtaagtaaatcccttctaatcatctcaacaccactttaataatactgttcaaacaattattgcacccaaactcatcaaattcttggcaatagtgatataaggaccaagaacaattaataaagcaattatacctcaagcatatttctcaagaaaggctcttcattgaaataatctcagcgaacaaaaacaaaaggtagcttctatgcaagggcctcgctcatagtaccataaccaatttttcctaccacaaatgatatattcgattcattccattttgtaacaacaacatatcacaacagcattttacagaggatacatgatgcatgttaaatataattgtatatcgaatcgttcttcaatctgatctataattttaacaagctatatggcataataagatttt

SEQ ID NO: 88924 - DNA, 889 bp, Cannabis sativa
tttatttcgtaatgaatatttgtagtattttttttttttttttgtatttttgtattttattgtgtgtgtgtgcattcttcatttggttaactgaagaaagtagttccagttatcttcaatgtttcttatttatgttttgttttcataatcatcattataattgtatgacgaaattgattttatttggtttttataatgttaattattgttataaaataaaacttgttttggtttatttttttcttttttattcagatggaatttgattcctctaatatggatacaacgaaagatgttgctacagattcaagtctgattttgagaagaaactttttctaattaaaattaaaattcttaggaaagttattcacaagaaaaaaagtaaatctaatctaaattttaaggattcatctttggtatgtattttttttttgtaattaatttttttttttaatttatcttcttatgtatattcaattttttagttagttatactagataactggttttcgtatttaattattattttatgtaattgagatttaagtttcattctttcttttgttattttacgaaaatatttttactatgtcagatttatgtaatttccttgctttatgtaactggtatttctgtgtcactttttaattggttgtttaacataattggtttcaataattaaatttatttatatgttgagaattctcttgtggtatgcttacatttttttttttaaaaaaattaactagctatttcgtgtttcaatatataatttaattattttaggcttctatgttgtttctatattaattgttagttttatttaactcgctatctaatgtaactggttcctctatttttctaaattagtttttatgtttcaatttat

SEQ ID NO: 88925 - DNA, 721 bp, Cannabis sativa
aaaaattatggctaagtttccaaccttttcaatcgttttggtcagtgctcctttcgttaattttttgttattaagtgccaaataaatctatcactgtgtacacatatgtattcgtagcaaaattttattgggccacctaatataaaaatatatttaaaaatataaaaaattaaaatatttaaaaaataaattaaaatctttctttttctttttctttttcttttcttcttcttttttataattgaaacacaacttaaatacacaattaatacaaatgcaaaaatagtacttttctaaacttttttctattatgcatccacaatagaaaggagttatgtttaaaactgagatatattgaaaaatacctcttttatttatcaattaactaaatttacctctaattttatatttaattgaaacatacctatttttatatgtattgtactcaaaataccctgacataatggagtcacatggagagtatattgaggtgacaggggtaaaattggtaaagtgtttaaaaaaagaggtaaaaatgttaggctttaaaaaaagagagtaaaaataaaagaggacaatataaaaagggtataaaatctaatttcctctttaaaactcacaatgttgctatttgaaggggtaagttgaaaaatgcctcttttattcatcaattgatcaaatttacctctaattttatatttatttgaaacatacctctttt

SEQ ID NO: 88926 - DNA, 564 bp, Cannabis sativa
tgaaaagatttccgtatgacagtatttttgtaaaaattaacccaaattctaatatttttgtaagttttcctagtttaggtcaaactttctttattttagtccatcttataatcttagtgcgttggctatatatagaaagaaatatgagagctctttgtcaacctaagtcattctaagtgattttggcctaaacttgacaagaaaagctctctctctattctctttttgtgaaaatatagccttttctctttatcaaaattgttcaattagtgagttgagtaccaacccacactattcaaagtggtactcaaatatatgtggaagatcgtaaagatttgtcacttttcgagtttaaagaagcaatccaggttcatcacttgacaatatcctactacagaaaggaatcaagcattagagtgattaaatagaaaaagtcattaattttcactgccattattgtaaggtttcttaatcttatgtgttaattgtcatttttatgatttcatattttaggaggttatattatttatatgataatcaaacatacattttaataaattaaaa

SEQ ID NO: 88927 - DNA, 716 bp, Cannabis sativa
  modified_base (661)..(691): a, c, t, g, unknown or other
aaaatctatcatttttatattatatggattgagattgtcatattggcttaaaaaattattaaataattgatattaaaaaaagtttagtttgacttaaatgtaggtttatataaatatatttttgatatagtataaaaatagatattttttaatttttttaattaagtagctaaattaaatatagaaattcaaatttctcttttataatttagtattggatcaaaatctaatgatttaatatttatagttaaacttatttagtaatcattaatgaataatacctatcgaactatttcatatatatttggttaaaaaaattcttgataacaaagaacttgttggtagagccagccacacttatcagtgtaggcaaaaattaataaaataaaaaattatagatacaaataaaaatatatgaatatagaaattaaaactataaacttagtaggataaaaataaaattatgtgagatgaaaataaaattatttgggataaaaataaaaaaaaaaaatattaattttatgagagtaaactaaatgaataattacataagatactattttttttgtaaaaaaattacatatttacgtttaaaaaattgttttcacatttttacgatttttctatagaaacaatacgaaaataataagaaaactacatnnnnnnnnnnnnnnnnnnnnnnnnnnnnnnnatcaaaacaataacaaaaaataata

SEQ ID NO: 88928 - DNA, 603 bp, Cannabis sativa
ccaacttgtgtagtatctcatcattaaagtgtttcaccaaaggttcttattaaaggtaataactcttactattatgcccttttatctatcaacaccctgcaaccatcaagttccaagaaacaacatctatagtcggcatctcatcaagaacttatcgtgcctccaataatatggaaactagaccattcccaacaacaagtttatatcaagtccaattttcacaacagcagcatgaatttgcaacccaacccacaaataatgggatgctgaacatgcctttaagacacgagggtatgtgtaattatccagcttctaaaaacaagaagaccatcatcatacaggtaattgttacaatgctttctgatcatgacattaaagaagacaacatgatcttcacatgcattttaccaaatatgtggtgggtaatccttgtttccccattggctgcataagccctcataaccttaatacctagtgttggattctaatgaagatgttggtcgaaaagatcttggaatggagtttctagagtgttttgatatctgggcactcatcaaaaagtctttcaagcaagtcattagccagaaatgggctatcatgcac

SEQ ID NO: 88929 - DNA, 658 bp, Cannabis sativa
aggctcttctccaagagagagcaacgggttttcaatataaaaatagctttcttttttctgttttcttattatcaaaaaaaaaaaaatagctttcttttttttttctttttctattttttttatataaaaatagttgttgaatattgacttaattttctttcatttaatataatttagaggtctcaattacactttttaattctcacaaccgtccataaaaaaatcggacataattataaaatattaccattctaaaaaagttgtttagatctatttttttattaaaaaaattattatcaccttactttattaagtgtatgacatgtaatactatagagtccttaatcatttctctttaaagaattaacaacaaatttcaattcataatattttttaaaaggtatatttgcaacaaaatctccttaataattaaaactgttacatatataactataataaaaaaaaaatagtagcaaaaatactttattttacgattttattgcaccgcatattaaataagttaaaaaaaaaatgtgtttttgaattagaaaagacttaattgacacttaacaactaaaaaaaaataataaaatactttttaccatcaattacaaatattaatatggttttatttccttttaaaaactaatcaaattat

SEQ ID NO: 88930 - DNA, 1441 bp, Cannabis sativa
  modified_base (27)..(31): a, c, t, g, unknown or other
actaatcagattgtaaagagttttatnnnnngcataaaacccaacatcaacatcatttgaatgccatcttctttctgagagagttgtctcgacgaagcagtgggtatcattgaaagatgtctggagctgattagtgaaagtaccatgagtatgctttcctatagcgagatagatgccttgctatttgctgttcaagttcattcaattgttatgcatagtttgtataatgtatattatgcgttaagtcttttaacagtcaacatgtctcgtctacatctcttcatacataatgaggttgatgcctcgctttgtacttctgacgtagaatggtttcttgtcaacacgcgagacaatagtttgtatatccttatctcgcttaagactttacagtcagcaagttgtaaacatactctatcaactcaacatttaatgagttattccactttgatatgttctaatacaattatcattatatttgttcattcgtattctccctgtttgacacgtgtccttctctgaagtgccagccaaattttaggtataatatttaatattattttgccacatgtactttagtatacactttagtcgtccattgtggcacttaactgagatttttgaatggagggaaaaaaatcataacagaagtgatgtttagatagttttgccccccaaaattcgatttatatggttaaatgttaaaaaaatataaagttcgtgtaattttgccgccaatatccctttctcagaggtgtataataattttttttttgaataaatcatgtaattttatcaatattaatcaactaaattaatagtctgcaatccaataagaacttctctcttgttggagacacacccaagattagaattaaaaaaacgagtcaaataacagtcacctaattcttagatcatttgataaaaaactaaaaaataaaatcaaatgaaaaagattgcaacattataataaaccttaagaacacttatatttagttttatttactgcttatgagactaaaactctcaaaactatgtcacataaataagactaaaacactcaaaatcatgtcgcagaagaaaaaagactaattgtggaacaaaaattaaactataatagcaaaatacaatcccaactaagccccatctatgtttaataaaaaccggccggcctcacaaaaagaaaaaaaacctcgtgtagttataaatttcagaacaagaaacattaatttttttaatttaatttatatatattttaattttacaacatatcttacatagtgtaataaaataattaactagagtgtataatcacccattaatattttattgtttttgtcattatttaacttgagtcgtggtggttagggatgcacacgggacggggaattagcggggagtgctctccccgtccctatccccgttaaggattttaattcccatc

SEQ ID NO: 88931 - DNA, 999 bp, Cannabis sativa
ttatttatttattttttttgagaagggtggtctttttaaattacatttttgagttaatttgattttatgagagtatttctaatagtaaaaatttagaggatgtttgataatgtggacatattaaatgacaaaatattaagatgttatattattggggagatggatatcattctaaaaatttgcgtagatatattatacagtaacattgatgctattcatttttttaataaaaaattaaaagtaaaaaattattattagtagttatatatattaaataataatgtggagatcatacatgtagtatttttgaagagtattataccattagaatgtttttaaaagttagagtgccaaatatttatattgtataactaatgagttctcacaaaaactagttatatttttcagtgatactcaatatagcttagctcaagtggttatatattgttattggttgttagaattttttttaaaaaaatgttatactatttaggggtcccgaaaagtaggagactatatactgagtatataggtttggactttggataaccttttttgtacgcaatatcatatgtcatatgcatgtatattctatcttatacgaaggaaagtgggtgttctccataacctcgttgacgtcggctataatgaaatctcatcaatttgtgaccatacattagatgagaaaaatcctcccttatccatgattgagtctccccacgttgacgtatatatatatcatatatgtatattattctcatattataaattatatcattcatattcatacaattcatgagttcttgagatgtggaaatatccagaactgaattgtataaataggtcatgtattatatattaacaacataattcgtataaataaatgatgaaaattatataaatcaatacaaaatagttagtcatatgtaagtgtaacccaccaactctttctgtcacccgggtccatgggtccagtctaggtctgggtcttgggatcca

SEQ ID NO: 88932 - DNA, 3365 bp, Cannabis sativa
tccatcggtacatctcttttaggagggtgcattgtagcatcgtagaatatattagttatcataaatgttttcaaaatatgtaaaacacacaccagttatatttatcatgatcaaagaatgcaatatatcatttaatcataattttatttctctagaaaaacacaccaataataagctaaaagaaaagaaaaacaaacaaaacaattttttttccaagttaagtccataaaataataaacattttacaacactgaattagtagatgaacgagtagagtagattagataaacacatatcaatatgaaaagtgaaatcaaaattttcttaatagaaatgaatgtgaaaagcaaatatatttttgaatatggaaaagcaaataaagtccttgatatatgctttttgaatgtggaaaaagcaaatacaaagactttgaaccaaccatctttccaataattacatgggaaatttgtggtttcatattaagaaaaacaaaaagaggagagaaatcattgattctttgtctttttaaattcattttgctgtccaagtttatcattatattaaagggttaagatttgtttgtcaagtgtgttcaactgatgacattctttacaatgtgtccatcaatggtaatcttattacaaattgttatctttttctttgtatttggagagtgtgttgatcaattgagtgtgagttgtttggagtacgagagaaatgctcttcttgacttcagaactggccttgaagatccacgaaaccagcttgcatcatggaataatggcagccgcgattgttgtcaatggtggggaatcggctgtgacaaggcgggagcagttattacagttgattttcaaaacaggtatgatcgctcgtggggcattagtggggaaataagaccttcattggcaaagctcaagtctttgagacacttggacttgagttacaactacttcctgagcatcccaattcctaaattttttggatcactaaagcatttgaggtatctaaacctctctaatgcagggtttagtggtttagttcctccgaatataggaaatctctctagattgcactaccttaacatagaatcagtatacttagtatatgttgatgatcttgaatggatcacaggcatgatctctctaaaccatcttgtgatgactagcgtaaacctttcaagggcgggtttagattggtttggtataatactaaacaagttaccatccttgacagagttgcatatgtcaggttgtaacttaaatggtccttttccatctgtttcttctgttaattcaacaacatcacttgctgttttagaccttagtgtaaacaacttcaactcaaaaataccggattggttggctaatatcagcagccttgtgagtgttgatttaagttatggtggtctgcatggtaggattccacttggtctcgccgagctaccaaatttgcagactttgcttctgcaatccaatactaatctcagtgcaagttgttctcagtttttcaggggaagatggaaaagtataaaagttgttgatttgagtgataatatgctgcatgggaaacttcctacttcaattgggaacatgacatctctcacttacttagatctttccaagaataatgttcaaggagggattccaggctccattggtaagctttgcaatcttaagcggtttcacatatcagataacaaattgaatggatttttacctgaatttcttgaagaaacacatgatagttgtcattctaagagtccacttcctagtctaaacggcttgtatttgaacaataatgagttgaatggtatattaccagattggttgggtcaacttaggaaccttgttgagcttgatttgagctctaacttgctacatggtccaattctaaaatctttagagtcattgcaaaacctttcatcttttagtcttgctaaaaatagattaaacgggactctacctgacagtctaggcaagttatcagaattgtcttcctttgatgtttctttcaaccaattgactggtaacatcactgaagcacattttctaaagttgcataagttggaaagcttatttctctcttccaactttttaacactaactgtcagttcaaattggacccctcctttccaagtatggtatctccacttgggttcatgccatttaggtccttcattcccaacttggctaagatcacaaaatgaggtcagagacttggatttgtcaaatgctagcatttcaagttccatacctgattggttctgggaataccctaatcttaaatcgttgaatgtttccttcaatcaattaaaaggccagctacccaatccattcaacatagcttcatttattgttgatttgagctcaaaccagtttgatggtcccattcctattccaaaggaattggggcagttacttgacctatccaacaacaaactttctggtcctattccagaaaacataggtgattccctacaaagcatgatattcttctctctttctaccaaccagatagatggagaaatcccaaattcaattggcaagttccgatcttccatgaatgtccttgatctctcaaataataagttaataggaaaaattcccctaagctttggaaatttgtcaaaactagttgcattggacctcagtaagaataatttgtctggtacaattcctgactctttgggtcaactaagttctctccaaacattgcacttaagtgacaacaagctttctggaagcatcccatcatgttttcaatatttgtcaagtttggagacacttgatcttggtaacaatagattagcgggaaacataccacattggcttgggaaaggtttggagaatttaagaattctaaaattgagatccaatactttttttggagagcttccatcttcgctatcaaatttaaggtcattacaagtgctagaccttgctgataatgggctcaatgggagcatccctgctagttatggatatttcaaaggcatgattaaagtacaaaaggaaaactttcttctgtcctatggtgatgactatcccaagtattatgaagaaagaattgttttgattgtcagtggccaagaactacaatacaccaagattctttcccttgttgtcagcttagacttttctgccaataatttgagtggagaacttccttcaaatttcacaaatttgttgggtttgttgaatttgaatttatctaacaatcatatcagcggttcaattccagaggatatttcaaaattggggcagttgctatctcttgatctctcaagcaataggctcttaggtactattcctaatagcttgtcatcactttcattcttaggacatctcaacttgtcaaacaat

SEQ ID NO: 88933 - DNA, 501 bp, Cannabis sativa
taagatcctggtaaaaaaaattcccaacaattacaggctcgaagacctgagtcactggttggattcttcggtatggctgagccgcataagaggatcgaaaattctctagctgagttggaaagagggaaagataaacgcgagtcacctgtgccatggtcacgatctcgcagtcccagaggaaagaattccaaatgaagaagccctagaagacgcaacccccaaaggcagcgaagtccaaagttggctaagtcccctccaaagatagaaacatccccaaaaaggaaaggaggtccgcacttcgtcaactatacagaattggcagtcccacgtgaccatatctacgcgattgaagaaaagaacggagttttcagaaaacttcccccaatcaggggtaatcgcgagaaaaaagacccaaagaagttctacaagtatcacaaggacattggctataccaccatggaatgctggttcctacaggacgagatcgaggaattaattaga

SEQ ID NO: 88934 - DNA, 1639 bp, Cannabis sativa
tttgaatttctcaaaaattagtaaaatatcttaacactccataaaataaatagataaaaaaaaaaaaattaaatgtcgaaacaggtaaaagttgcgtcaatatatatacataccttttaacactccatcataaataaatatattaatattataatttgaaaataataaaatatattaaaatttaaagaaagtggagttttgggctttactatttgagagtgctcataagattttattttttcacttcaccagtttcgttgaaagctgtttattattatttttaagtgatttcacatcacacaaagttgggtagcttgaatggttaggcacgtggtttgctccctcgatgtctagggttcaagtctatccttttgcataattttaaattaattatttttggttttatttgattatagtttcacgtttatattagtgtaattaagtatcgagtcttatataaattaaaaagtacttttaggaaatatcattaactaaacgtagggtgtcacggtcacctataaaaaatgctggacaccactaatacccaataacaatgctctttattatttatttttggttgtatttgctttttccttttttaaaaaaattcgtgtttgattctagggttcaagtctacccttttgcataattttaaattaattatttttggttttatttgattatagtttcacatgtctactgtttaatattttttcggtgtcatacaaatattaatgtaattaagtatcgagtcctatataaattaaaaaatacttttaggaaatatcattaactaaacgtagggtgtcacctataaaaaatactggacaccactaatacctaataacaatgctctttattatttatttttggctgtatttgcattttctttttttttttaaaaaaaaaaaaccgtatttgattctttatttttaaatgttgcaacatctttttcacatcctttagaagagtgcagtaagaaactactttttcggtcggtagcacgaagatttaagatattcataacaaaatacttagggcgcatttaaaaagtcactgtgtaattagagacaattacacagtatgacatgtttgtctgactatgtaattacactataactgtgtaattggaggtaatcgagggattccaattacactcttcaattctcatggccctcgtggtccatgagaattgagtgtaattactaaaatttttatattttaaacattaactactaaaaaatattattttcctgtgtaattactaagtattttacaaaataaaatattagtatttcatacataattaccatttcatatctaaacacattatattttaaaatttagtgtaattactagaccgtataattaccattataataaattcacagttatttccaaacacaaccttatatgttccttaaagaaatttgaatgagaaaccaattcttttagaaagcttttagtttaatgagcctaaaagttattctgcctcacatatcaagttcatttattctcaaaaaatatcctaaacccttaattgaggctcttttgattctcttgacaaaaaaaaattgcttcaaaatttctactagagaatttggaatctacttttataataagattgtgatctatccat

SEQ ID NO: 88935 - DNA, 586 bp, Cannabis sativa
aagggtcctttaatattagatgttctcctactaggctttataagctcacccctatatttctcttccaggaactcagttggatacttgtgaatgtaggaaagtcgtgatggagaaagacgagattagcttaatcctaccattattaacagatgatttgtattgttatatagacatgacccgttagagatgagaaatatgaaggatgctataagtattatatatcttggtatttttcgagttataaattctaactatttggtgatacataactgtgagaatattattgttgtatatatatactgacgagtgatcctattttattacaattattttttatttattatgggagttattccattatattttaattatatgtcttatgtaattttgtaatatatattaagggatcatttgtaagtcttatttttttattcttcaagggtcaaagtgtgacttttgaccacccaaattataaatattatataactgtcacggcatagagctcgggtcgtgacattacttaagtcaatttcaaaaagattataattttacaaatattttaaagtgtcgttcaaaagtggttatt

SEQ ID NO: 88936 - DNA, 808 bp, Cannabis sativa
agcctcggccagggtggcacaggggacgaatgctcaaaatcaacctgaacctggagtgagaagaccacgagacagacctcgtggcttacgaactaggaaagaggaaaatgcccgggaagaacaacccagggaaaatgagataccccctgaaaatcagaacgaacagctagatgggagcaagcggaaaccgatgaatgagaaatccctcatgacaatgaggaggatcttgggactcaacctggagaatggaggtcacctactagaaatcaccatcattcttcccaaacccaaagagcgaagactcgtacaaaccctaatggagacatacgaaaaaccgctctcagggggaaagaacagagtgtgaagaagctagtgtgacctctaggcagtcaagaacccacagtcgctcaactcgaagaggagaaagtactcaatgagctgatgatcgagaaagtatgggaaccagtaaatttgtaagtcactcaaagacaaagtctatgagtaggatgcgatctgcgagtaagagaaggtctgtcagcaattactcccaaccggatctgcgagagcacttgaatcgaaagaaacctgaccttcaccaacagcttggtccaaagcaagaggatcccatccaattacggataaacgagctagaggacaagttcaggagatagcaagtgggtgaattaaggagacaatctggatacgactctgacgaggagcttgagccgtataatccagatataatgaataccccttttccttcgcgattcaaaaactcacatgtctcgtcatatgacaaaaccactga

SEQ ID NO: 88937 - DNA, 553 bp, Cannabis sativa
tctttattatatattagatataatttttccaacaatcccccacatgaataaaattgaccaacaataaggaacacgcagataaaagactcacaaggaattgataagactcgactcaacacagtgatagagttctatggtagatacctacataggataggtgggtgttaacctttgaaccttccctagtaaaatatatttactttattagctgatcagtggacgtgatgcctttgaactatctgttgttgatgtaaatgatgatatatctcacacagatatcttcctggcatcatttcagttctcatgattatgttcatttttggccatgaacatctgcctggttctgcaagaggttttagagaatctaacccccacaattctcctttgaagcgaccccacttctctctcacataggtgatctcttaattaagaacaatcctgcatttctccgtttggaattccgacgcaaaaagatcattaaaatcttaatgcttatcctttttccataatgggaataagtgtttcattagaatgggtaggggtggtccccata

SEQ ID NO: 88938 - DNA, 2344 bp, Cannabis sativa
  modified_base (1823)..(1833): a, c, t, g, unknown or other
  modified_base (2227)..(2228): a, c, t, g, unknown or other
agaaagatatcaaaaggataggttgttagtattaggactatttattggatcacatttaatatttttaggcgtattcaaagataatccaattatgcattgggtgttggattttgccaattgatccattccaattgaaattgctccttttgatgcatccatgtacatttgttggattagatcaaatccatcaaatattttatgtaattaagagtgtaattctgaatctatagtggaattagaagaaattagtaattaggaaaattattcatatatttcgggaactacatattaataattcggttacataagcccataattcccatattatagtaaagggagggaaaatttgaggagaaagtaaaagagaaggtttatttgttaattaagacactatgaagttttaattaataaatatatttaaatagtagattttatttgataattattaaatagataaaattagcatttgaataattaggatagaaaaatggtatttaaacaaaaaaagatggaaagtttcattaaatgaaattaataggggaacttataaaaatattgacttttggtccaatttttacaaaaatactaccacacggcagaaataacttttatactgtcttgacctatttttttttcttctatactgtaaacacagacacaaaaaaaaaaatgagacctctatcttccacacccacaaacagaaccaccacaggaacactagaacaatcggaaaacaactattaattccggtgagattgagaaaaaaaaaaatcgatgtcaaaaaaataatcatgcaaaaacaactgtaaaacaacactaaaacaaatcaaacaaaagaaagaaaaaagaattaaaaactaacaatgttctgcatagcctcaatactagatgcaataacagctatatttgcaagcctaattttagaaaattagaataaaaaaattactaaaacaacacaaaaataaatgtaaaacaattagcaaatataaccacttaaaaaaacataaaagaaccatacacctcaaaactttttttctagtaagctcgtcaaatgtatttatagaagaaccagaataaaaaaatacaaaataaccatagagagtggagaagaaatgtattttatagcctccatcttccacacccacggatggaaccaccacagcaccacgagaacacccagaaaacaatcattaattccagcgagatggagtaagaacagtgaaatcgacatcaaaaaaataaattatggaaaacaaccgtaaaaaaaaacactaaaataaataaaaaaacaaaagaataaaaaaaaatgattaaaaaaactaaccatcttttgcacagcctcaacaccagatgcaatagaggctatatttgcaagctcagttctgaaaaatcataataaaaaaaaacacactaactcttatcttttctaaaaatgaaactaaaaacttccaaaactaaataaaaaatgaaaagaagatgaagaagaagaattgagcaagaaaaaaaacttttatattaatgtagaaagatatagagaacttgagaaagcaaagagtgaaaaaaagaagaagaagataatgaataggaagagagaataatgagaaagtgagattaaagtgaaatgaacgggtattaatatctgaggtagggtaaattgcggcataaatacctaatattttagattttatacacttaaatatcttatctttatttttggaggaaaaaatactcaatgttataattctcttatactcgttactaccacttctgttaactcataaatatggacacatggagagcccagatgcattacatttatttannnnnnnnnnnaacttaatattcttaatatcagaaactaaatgctacttgtttcaaaaataaaataaaaatgagagcgatgcaataccaaattaccatagctgagtgaaccagtgcagtgtattaaacatagttatcgaattgaagtgccaataccatgtaaaaattattatgagaattgggttttttttttttttttgaaacaagtagcatttagagacatgtaccaaatcatgccctctgaactttgacatgtgacatgtaccaaaccaagtaccaaatatagaaggctaattaggatttctaccccccgaactttgacatgtaccaaattgtgccccctgaacttttaaggtctttcaaaatgccccctgaactattaagattgttggatttaaggactttnntctaattttagtaaaaaaaagtctaacatcgatgaaagtttatgggatatgatctagaatatgtcaaagttcgaggacatgatttggtagatatcaaagtctggagagcatgattt

SEQ ID NO: 88939 - DNA, 743 bp, Cannabis sativa
  modified_base (423)..(424): a, c, t, g, unknown or other
gttatctaaagcttttgttctaaaaaaaaattcacttaaaagtatagagtgaccctcaatgtattcttaagaataagaagaatatttttttaatgatttttcctttttttaaccattttcctcaaattttagtcacatctattttccctcacaacaaagtaaaagagaaaagagaacccacaacaactaattgacaagattgattgaccaatttctttaataaattttaattaatagtaatttcttttataaaataataaaaaataatttaaggtataaatatttaaattcaaggctctattataaataaatatgtaatttaatttttaatagtaataataattaagttatatttttataattttgtaagtacttagtctttaaatatcaaatcattatcatgtgttatttttttattggtanntttaaattaatttttttttaaaaccctaaaaatttaataatttagaccaatcataaattattatgtggcaatttaatttatacttaccagttaaatacctactattttagaattataatttaaatattatgaacgccaaaaaaaaattaagtatttatttataaaaaaaataaattaaaatttttataatacaaattacacaattaaatttgtttgattaatttgattataacccattttgctttaaatagggtaagttaaataaacttcacattattacccttgtcttaattctctttaactctttccattatcactt

SEQ ID NO: 88940 - DNA, 777 bp, Cannabis sativa
  modified_base (139)..(144): a, c, t, g, unknown or other
actataaataccccccaaacacattaagaggggggtcgagaattctgggttccataagaaccaaagagagaaaaactaccaagaacattctctgtggtaaatactctcataaataaaaagactcgtggactaaggctcnnnnnngccccaaccacgtaaaaatctcatgcattaaacttcctacagttttcttatatattattaaatcggttgccgaaaacctcggtcaacagttaataattattacagaaaaataataaatatttaactgtaatagtctgcagcagcagaaagtcattttgttactgcagaaaacagttttgcagaaacaaaccagaaccaacagaaacaaaaaattattgcagaaaataaaatcacttgacacaagagatttgtacatggtatcagtgttctttcgaacattcttagttcatggggccacgcccagagaaagaaatcaattagtaaagtctcaacaattacaaagacaattgacttatacaagtttagactccctctaaatctttgctgcaatccttgtaatgcacttcacgaatctaatttcagaaccaccttcaaacagcgaactcccttcgtctttgaggtgtgagtacttacttccttttgaagtaaggcttgaacaagtcttctcccaaagacctttttcttgtttaatcaagatgttctaaccaaccctaagaccagtataagaacagatatataaacactaaaacctagatgaacaactaggttctcacaaaaagaactctctcttca

SEQ ID NO: 88941 - DNA, 570 bp, Cannabis sativa
cagaaaacgaaaatgaaatagaaggatcttctgactcatctaacccacgcgaagaagacgaaaaagaagaagagctcgaatgtttaaacgaggaagaaggaggaggagggctagaatgcttaaacgaagaagatgaagcaaatgaagagccacccattctcccaccggacctaccggatgagacatcagctatggcggtttgggtgttgtaagacaaaaacagagccactacaagaacaggaaacaaacacttggagagcattgttgctgttttggttttgggtattcttgttcaagggtttaacggtataagattcttatacactattacacattgtatgcataaatatataaatatatatatgcattatagtttgcagattttggagaaagactgaaggaagataacttagagaagtgggtttcagaaaagctttggtaatttcccaccacataacctctgagaaataataaaaaaaaaataatatgaatatagttttttcttaaattaaattatatttcagatgaagtttccgggatggttaataatattctacacgaaataataac

SEQ ID NO: 88942 - DNA, 1273 bp, Cannabis sativa
  modified_base (825)..(831): a, c, t, g, unknown or other
aatatcaattttcacgaactcccctctctttaaaccaagtctaatctttaaaattcgtgaaattacgaaactgtccaaaaatcttgtcattggagcttcgtcgtggtgaaggatttgaccgtcgcggcaaaactttttccaaaattttccaaagctctctgccaatccccatcgcgggaaggtttttccccaccacagcgaaggatttatttttttctacttcgacctctttcagtaaaatgggcataactttctcatacgaactccaaatgagctgattcaagatgccattggaaagtaaaaaaaaaaacgatctaaaacttttatgttttgactttctccaaaatcttatcagacaatagtctaatttaggcttgaagttcccactttattctctttcaaaattttccttattttatagatcactgttttccgaaatttgtccaatttatacattccaagcgtagaaatctaaaatcaaagaaaacaagcgtaaaatagccctaaaactagaaacaaagagtgaacactactcgaaaatacgacctaaaacttagagactaaaattatcctaacaaatagtgacatatgaagctcgttggtaaccagtggtaaggatgctttataaagtattagggtcggtttgtcttataaaacaacaaattgattatctttactacattatgcttgagtgactgcttagtcatatgatgctattgttttaattttattctttatgtgttgattatgtttttatctacttttcttgttgagtctttgtgactcacaggtgctctgtggtgtaggtaaaggaaaagaaaagcnnnnnnnttatcctcaacacgcataaagtcaaagatggatggtatcatgctcatccattgctcagccttaagtggatcagcaccaccttcaaatactggcagaatatgcttccttaaccgctcatacaacgtctctaggaaatttctcgtatcctgtgacattaataaaggtgatagaggattaggattaggattaggagcaggccaagcttgttgctctttcagctcattgatctgatcaccttgctaccagatggtctcttacattgcagcgtacatttgtgcccagttttgtggtagtggaggatttgcaccctcaccactagccccgagcccgaaaagctcgcggttaaccctaccaaatcaccttgggtgcataatacacttgcaaccataactttccatcatttagaatctttcaaaccaaaaccaatgctaataaacatttc

SEQ ID NO: 88943 - DNA, 641 bp, Cannabis sativa
acagtatactgcagtatgaaattttaaaaaaaaatacagtaaaaaagtaaaatataccgcctggcagtatttttgtaaaaaaaataacaaaagttagtataccatgtaaatttctcttttgtttatcattactagcttccaatttcaatccttgagtccactcaactcaacataatgttaagccaaaaaaaaaagagtgtactcaacatataataaaaggagtctatagaattagagcactgctatgctacccttgaaaggcaggctcaataaatcaatttgagtcctaacaatcaccaaatcaaattgcaactttccatcacgaatgaaaaaataaaataaataaagcatactaattaacagtttacgtgtgggagataaccttttatcatgggctgccaatttttattttttatttttaaactaaggatttacgtcttaaaattataaaaaaattttacactagttactaaaattttaaattttttaatttttcactgtggagcggaattctttttcaaaaaactgatttttttttttcaaaaatactgtataagttttatactatgtactgtgttaaatttttacggttattccacagttattttttagttgttacactattgttttaattgttatgt

SEQ ID NO: 88944 - DNA, 758 bp, Cannabis sativa
tcaccacaattagccctagaatattcaatcttttgaacacggtgaattctcaaaaggcagtctttgaacaacaataacaacaaagaacccccacatagcaacaacaacaacacacttaaatcattttaccaccctcatataaacatcaaaagaatgcaaccttagccatgaaacaatcacaagataccttaaatgcaaaagggaatccacactccgatggtggctcggttgcaggagaaacgaagcaatggctgaggtacaatggtttctgaggtggagtttgggtttctggggtggagttcgtcgatttgggttctgactgggttcagctgtggggaaatcggagcaaggggcggagatggttttggagtggagtcggggtgtgggcgagttcgggtctgggtaaatgaggatctggagaagaagaacagggggcggaggtggttagtgaaggtcgactcggctggagctgggttcgcctggaaaaatggaggagggaggtggggcggtttctgaggtgggcagaggcggatgggcgtgggaggcggtcgggtccgagcaaatggaggttgggttcgggtttgctgggggtcgaatggtggtgggcggagtcgaaatggaggtgaacggagaagggggtcgactggagtggttctcctggaacaatggaggtcgaaagagatgatagggctgggtggggagtcgggtagggtaggaaaaaaatttgaaattaattttttttttttttatgtaataat

SEQ ID NO: 88945 - DNA, 864 bp, Cannabis sativa
gttttgtttgatcatttaattggtatggtttgattataatttttaaaaaaccgtaatactaatttagtttgaaaaaattgaaaatctaaccaaactaatccatgaaaaagattagcacaataattgtgaaaaatactttaacgtgcctaaacaagtaaggcattacagttcttgatctctttaaatttaacttgactctaatactatttgttgtgagtcaaaacacctcaatcaagaacaagtgtcaaagaattaatctgctaacaagaaattaattaataaccaaattaacaattgaaacagtaaaagaataataacaccagaaattgtgtagactaatctatgaaacagtgtgttttatgatcagaactactagaacaaagaacaagacttgagctccctaaactagtctaaatataatacattttctatctatgaattagtaaaaataatctctaaatataatacattattatgttagttgtatgtcttcaatatcaaacattattcggttgtacctttaatcataatatctcaaattaagtatacatagctcaaactgagttactctttcggctagaaataatgtgaaacacattaataataccaaaaacaaagaacaagttgaaactattttaattgttagtgagttttccacaatcaaagtcagctttcttgaacacccaagtagccaaaaatgaagccaaaaacttgtcccttaaaaagcttaaaactttattatgactctgttgtataaaaccaatcacataagctgtagcaacaaggtcaaagctcctccatttcctctcacttgcatacttcttcaaccccatttcaatgttcttatattcctcttcaagtttt

SEQ ID NO: 88946 - DNA, 820 bp, Cannabis sativa
ttggggacgaatcttcttgaggggcttcccgttgagtagaaccgagtaagaaacagtcgtcacgcatgtcattaaaagatcacaaactggagtatcaaaaccattagcacgaagcaccttctcaaggaaaatccactcaattctgtcataggccttgtgcatatctagcttaagggccatgagcccacctttccccttcttcttcttgatagtatgtacaattcctgggtgaggatggacgattccgcaatccacctccccgggataaaggccgattgaaggggagacaccagtttatccatgactaaccttagcctagttgccagaattttcgctatgatcttgtaagcgaaattacaaaggctaataggtctaaatttctccacactatccgccacttccgattttgggatgagacataagtaagtatagtttagattcccgtccaatcttccgtgagagaagaaatcctggaccagattgattacactctccccaacaatcttccaatactgtcgatagaagcatcccgagaacccatcagggcctggagcctttagagggtgaagagccgccactgtatttataatttcttcttgagaaggaatagcctttatcatgctattttcctcggccgagacttgggtaatgaataaactatggaaatcattagggatactcgggatctcagacgagtaaagctcttgaaagaactcattgaaagcctttccaatccttctttcatctctcaaccgcactccactagaagaagtgatctcccaaattctatttctctgtcttctaatgaccgtagatgcgt

SEQ ID NO: 88947 - DNA, 844 bp, Cannabis sativa
ttgataatcattagatgataattgcatcagttcgattcgattatttattggataagatgttccatccaacaatccatctgatccgattagattagattttgaaaatttacatttgacctgatccagttataattgtatatccgattatattagatctgttaggattggattgattggttataaacttgtaattagattggtcctaagtgacgccttaaaattgatagcatccttaacgataacatttttaaatgtgctaaatatttttatatcatccaaaaatataatattttattttatttttcttctacattatttttagcactcttacttctaaaaatgtattttttttattaaatcaatatataaatattacacttttaatttttaatttttttaaaaaatataacatcaatatcattatgtgacatcaatacaaataatattctttcatctctaataatataacattttttatatttcagtacctaaattttctactttattaaacattttttaaaatgttatcattaaagatactttcagcgatataccctaaaagtttttacataaaacttacacatatgactttgctaaggtctattatacttttttttagcataattcaagtgttcacaccaaaaagaaataataattgaagtggtcacttatcattaatttgggtcaaactagtgccccaactttgatttcttgatggtgtattggtgttagtttttcactattattcattaacggtttgaggatttatttattaaaaaagaaaattgatcttttttttattttttggaagcagaaaattgatcattaatgtgataaaaaagag

SEQ ID NO: 88948 - DNA, 587 bp, Cannabis sativa
tggttagtccaaaaggcataacataaccaaaaattcccaaaaattcatagtgcccatacctagtgcaaaaaacagtctttggaatgtccttctctcagattcacaactgatgatagcctgaacagagatcaatcttagataagaccatcttcccctgaagctgatcgaacaagttatcgatcctaggtaaaggatacttattcttgatagtcaatttatttagatccttgtagttaatgcacatgcgtagggatccatctttcatcttaacaaataacacgagagctccccagggtgacacactaggtcgtgaaaaccctagggttgcgatctttgggatagcacaaacttagttttatttgttgctaagtgacacttttaatattacgtatgttgtgtatgttttgaaaaatagattttggaatcccaaattctatacattttgtaaatatgaaatatgtttagtaatgttttaattattatgaaaattttattaaaaacacttttatctttaaagcctttgattgacaaaggttagcataataattaagaaaacactatagaagtgttacagtatgatataaaat

SEQ ID NO: 88949 - DNA, 1158 bp, Cannabis sativa
  modified_base (210)..(210): a, c, t, g, unknown or other
tcccagggcttcataatcactggccttcgattgaaaaaaatatacccctcattgagcacttgatccctgtattccatggaagtgaaccgaatgatgaacactccataggtgagcattcgaaccttatccaccttatctttccacagtcgtttagcaaaaccttctaatatatgcagagggggattagatcccagaacataacatacaatngatggttgccaaaaattcacctcatcttctatgtcatctagagtaatcttgaccttgtttgcctactctgattgattcaatgattgctccagattcctaattattgaaccagatcgtaaaataaggggattcgagatcttacctttagctaaatcactatcacattgattgttcgcatgaataaaatgcatcaggtcatctctcgcttcatcaatgcgtctaatttccctcagtgaggattttggagacagtggaggttgaaacaagtcttcctgtgaattacagctccttctccctgttactacttcatcctcttcctccgacaactccaatggtgtaataccgattacttcatcaatcgattttgtgcgaatgatgtctgaaacagaatcaggacctttctacctcactttcttagctgaattctttgccctcctctaagtctttgacctagtttttgccatggcaccatcttcaagctactagagcaaaaacaaggggaaaacaagtatgtttcattagaatcaccaaaattattggtatggcccaatcaaatgcttatagttcttacctggggctttgtggcatgatgggtagaaacaagactattgtcctgggttttatgaatgatagagtaagaaaaaaagttgaaagttgggatggtgaaagagattttaattaagattgtggctcaagctcttcctagctacgccatgagtgtcttcttgataccgttaaaaatttgtcgtgaaatagacctgctcctgagtaaacattagtggaattcctcctctatgcaaggtcatggtatctcgtgggatgcttgggacagattgcttgttcataaaaatggggggcatggggtttagatgtcttcatgaccacaatattgctatattgggtaaacaagcttggggccttttgaataatgatcattccttagttggt

SEQ ID NO: 88950 - DNA, 1110 bp, Cannabis sativa
accattttacccctaggcttattttagcttaagtttaagtactaagggcattttagtaattttaagagggggattaggtggccttttctagagttcacagcttcccctttagtgctgaatattgagattatgtgacgcatttttgaaaataagaaaattaaaagaaaatcaaaattagggaaaaactcttttctccttctctttctttgttcgaccaccacaaaaccaagggagaaccagtagatttcattctattttttgggaattcaacaagtaatcttagtctttcgaagaggaggtaagctctagcaccctagttctttagttttttaacttgaagttaacttgattatgcaattttgaggtgtaggggctgttagggtttgtttgtgttataattttaaattgagttacaaataggttcttgcaattcgttttgatgtttggtgtaatggatgcacaagttttattttgaaaaatcaagcttggttcatccatggcatgttttgattttgggtatatttttggtactattgcttgaagtttgttatgggaggtcaatataggtgttctggaagttttggtgaaatttggacacgatttgagcaggttttgaattgtttggggaaacctggtgcaacttggttaaccggttttccagtacctgtaaagcgattaaccggttttggtaaatttcccaaacaattaattttgtcgattcgtgtccattttagagccttttttggatgattccatgtttcttgggtattgtagtttcagttattaatagcagaaccttaagttggaggttcgggtttcccagattagggttttgggcgtgttatttaccaattatgttatgtgattagggcatctatctatcacgaggttttcccttcaggtcgaccaactcaccttaattcggaaatggggtaagaatagtgtagaacatgcgatatatatatatatatgcgaatgtatgtatgtgtgaaatatatagatacatacttatcattgatcttattagatatttaatttgattcaaataaacctagatatcttaaaattagtttcctttattttgagtttttaaggtttgttttaacaacc

SEQ ID NO: 88951 - DNA, 958 bp, Cannabis sativa
atgtagaaatagaaattttcaggtaatagttgatttgtttgtgtgagtatgccattgcttttcatggcacaagaattttttatttatttttatttttcgatgctgtttgttattcttaataattcagataaataccttcattactaaaattgatgtattattaatccaaaattatatatgtacgtctgacaaagtaaactaatgttcttttcacatatctagaaaaatgtctttgcattgttttttatttaatttatactacctgaagagctgaggattgttttgctttgtgttgtcgcttagcttcgtagttgctgttgttgggtggctactaacccttttgttggagttggttgtttgttttgtgacatcatgaacttatatttatgtatttagcaaatttattgtgaatattatgataatgaaatatatttgagtgtagatcattgagtgagtactggatatcgtatcactaacttctggtttcttaaagctattattcagagtacttgtcatcacttcttattctacctcccttagtaccggtggtgatcagttcattaaaggtatttttatttttactgatttatctttccaattgtgaaaaatatattgttttgtatagaaaaatgagattgaaattgaaattcattaaatgtatttttatttttactgatttttctttccaattgtgaataatatattgttttgtatagaaaaacgagagtgaagttgaaatttatatgaaagaataaaagttagaaaaaaaagcatatatttttattttgatgatagtgtgttagtgttagccacttgtattattatagtccatatgtgatgatagtatatatatatatatatctaatttccaagttcaaataaataaatactaaaatacaattatagttatcgattaaagtgttgcttttatattgtatatttttactagtgttaattt

SEQ ID NO: 88952 - DNA, 734 bp, Cannabis sativa
ttttttataagaaagattatatatataatgttattgttcattatgtatactatagtctgtacacatatttataagtagaaaaacgaagaattaaaaaaattaataaagtatggcaagtcctaccatcttaaattaatatatgtatttcaaaaaagaaaaaaaaaattattgaaagaagataattgttaaaataataaacggaaagttataaatagtgctaactgcaagttaggagctatgtaatgttgttaattcattaaatgaggtggacctttttaattgggtagacagaaaagtagacaggaataatagacaaaggatctgagtcctataaaaagataaattaagtaattaagtataatcgtgctatttagagttactatccttttggtgatttatttttaattcccaaaaatttaatcaatagttttcctataataataataaatatattaaaaataccttttccacttcaaattatgatatttatagtttgtgctagatatttataccaaccaactcatatttattcgtagaagggaattcttgaatggcttcaaaattgatcgcttaacctgcgcttcactcattggccggataaacaattacttcactaacagctatggtatggttcttagactgctaactaggattggttccggaacaaggttctaaggaggagtggatagggaacaacggctctttcttttgttgtagctttcatctatttctag

SEQ ID NO: 88953 - DNA, 628 bp, Cannabis sativa
aaaagaaatagaaaataaaaggaaaaagaagagaaaaatgagggaaataatgtctagagtgattgatgtaatacatcaatcattgacgtgtcaaaaagcaagaattgtgtttgcatgtggtaaatatgtaataaatttaagattgctttacccgtgtgtaggtatttatgtaataaagattgcattttgtatttttgatgtaaaaatttctatatattttcataacaaaataaatatataaattatatatatatatattataagatgtttctacaatgcatcccttaaagacactactacaaaattgggctttagaggtagtttttaagggcttttagcatcggtttctacaatgcatcccttaaaggcactgctacaaaattgttttaggtgacactgtagggttcataacaaccgacgctatagggatcctatggcgtcgatttttttcataacaaccgacgtcatacctatgacgtcagttgttatggaaaatcgacgccatagggtcttggtatttttcagcagcataattatatatatatattattttattattaatataattaaattaagtataaattatatattataagcataaataaaaattaaattgaaaagttaaata

SEQ ID NO: 88954 - DNA, 659 bp, Cannabis sativa
ttttttttgaatgaaagtagaaaacttcattaagaaagaatagccaaatcggccattacagcattgttgataatattaatatttctttacaatattagtggtgcaattattgtatttttaatagggaaatttaaaatttcatacttacaatactttaaaaaaaaaaattcctaaattcatagttattaaaattagtcataccacattactaatttcctaaaaatacccctcacatttgaaatccctaaactcatcagcatctctctttctctcttttaactcactctcgctcaacccacccaaaaaccccaaccccagctgacgatgacggcgcagccgacttcgacccacgctcgacccaagcgacccacggtgactgacccaatcgacggcgcagagctcttcgacccacggtggatccacgtcgaactgctaaaatgtcgaaggtatgttgtgatttctttgtttttttttagaaagtgttaaagatttattttgtttgtgattttatttgggattgtttgtgaaacctattttgttagatttaagaaaatttttgtggaatggaaattgggtggattcagatttgtgaaaggagaaaccattggggaagaagagggtgcgatgggtccgatggtccgatggtatgggtccgatgg

SEQ ID NO: 88955 - DNA, 627 bp, Cannabis sativa
tacatacaaatactatttttttttaatatatattgggggagagtatatttaaagttagaacctcctctttacgagaagaagtgcaaaactactagactaagtctatgaccacactacatacaaatattattaaaaccaaaaaataaaagcaatcatgaataaatttcgataataaataatagcagaaaatataaaataaaaatagcataaaaaggagtaaaataaggtaataaataatactagaatatataaattaaataacaataaatataaacttaaaaatggcaaatagaatgaataaagcaaagttgaaataaaatactatattatctattaaggaataataaatattattttacaaaataacaaaataaaattgatttcacaactaaaattaaacttaaaacaaataatttattaagataaacatataaataaaactaattatatactatgaaagacataataatgaaaatattacaaaatgaaattatataataataatacaaaaaatgtatttaataaaaaataaaataccattaaaaacagtttttttagaagaagatatgttattataaatcgaaagagccatttacaacaacaaaaaatatagcagaagagatttct

SEQ ID NO: 88956 - DNA, 560 bp, Cannabis sativa
  modified_base (451)..(452): a, c, t, g, unknown or other
taaattacttaattaacttttactaaatattaaactacaaaaaataataaactattcttttataactaaaaaaaaatctaagtcaaacaaccttacgcattgtaattcttctaaaaataaaaaaaatatattttcgaaatctttttatatctcatatttaattaatcaaaaataatttatctttctacaaaattacttaaaagtatattattttatacaaaaaatttgaaaaattatttcaattgatgaaaataatttacttattattttattaaataaaaaaacacaattttaggtatataagtatatatatatgtaataattacttttctcttcatcacattagattattaaaataatagatttataaaattttaaaattgttaaattatatacattcacttaaatttttagcattaatttgagacaggtataaacaaacccatttatnnatgtgtgagggccatagcctttattaaaaaaatattacacttcaaaaatatatgtattttctaatttcataattgtaaagttaaatagtaaaaagctccacaaaatta

SEQ ID NO: 88957 - DNA, 724 bp, Cannabis sativa
tttttttttccatttttatagtttgggttgctctaatggttgttttggtagtttttatgtgtggtttgctatttaatattaatatatatatatatcaaatataaaaatattgaaccatgtatataagaatattgactactccactcattaccaattagttttgagatgcaaccccaacatggcatcaaagccatattcctagcgaactttcgatccacacctatcatatagttagtgagtcgtaagcgagcaaaatggtactcccaaccgcgaacaataataagcgagcaaatagaacttccagccgcgaacaaaaataagcaagcaaattaattgcactatttatgataaggtgattcaaggttggtaagcaaaaaaataattgtcatcttgagagtgaatattggacaatattgtctcatatggatcaaatgtaaaaatattgagtcatatataagaacatgtgttactccactcattactaattggttttgaaatagaaccccatgaattttcgtaaaaatacaaaaaaaaaaaatgctttaaaatgtgaaataaaattataattattttacaaaattatagttacagacaagtataatatacacaccctttgtttttttttaacagtgtatatactcatttactatgcattttacaaaatactgttattttaaataatgatatcatagagaaataccttatataatttatgaatatacat

SEQ ID NO: 88958 - DNA, 657 bp, Cannabis sativa
taattggattggattggatcggttcggttcaacgggattggattggattacgcccacccctactagcaccagcaaatactgataagaacatcccaaccatgtcaaaagataagacgaaaaacacttgataattaattcatagatgcataaaattaattatattgttgattctagtctatggactattatctatattaacagttgaagatggattaaatagattgatgactattatctatatcaatagttgaagatggattaaatggattgatgactattatctatatcaacaaggtgtatcttcttttagtggcccattacttgagaattccaaaattaagtatgtttgacttgaagtaatcttaagatgggtgagctcctggaaaatttttctaagaagcgtgcaagtgagaaagcatgcaaagtgacatacctgtatataagagtcataattctgtgggaaagaccccataaatttgaaggagagtcgtatatcttaaaagacatatataattgagtagtgtaagaaattcaagggacaaaatatactattttttttaacattgcatttgattttttttttcttataatatgctaaaatacagtattaattgggatttttacaccacatactaaaatttttaatttttttatttt

SEQ ID NO: 88959 - DNA, 511 bp, Cannabis sativa
ccccacaaagtaaaaatcctgaattcatcactgtatataatatgtatatatacacacaacaatatatatttaaataaatataataatattttacatgtattcgaataagaaagagaaaagaaaagtacatatttatatacataataaatatatatacatatcggaccccatttagatagctagtatcggacacgaaatatgtccaccaatcagttactatgcatccgatcaccatccaacttatattggaccactatcgaaccttctccatcaacctaaaaaacttaaaatttggaacctcctatcgaacctatgtccgacctatatcggacatatattggacactatcaaacctataacgaacactatcagacctatatcggacaccatcaaagcaactcaaaattaaaaaacaaaaaaaaaactagaaaattatagagaacgcttttgttaatgttcattccattcatggtctatgttcgtggcggtggtctcttcattcgcggttgag

SEQ ID NO: 88960 - DNA, 736 bp, Cannabis sativa
tacataattagtgaatattagacaagcttaatcacaaataatctttgaggacctcatcataagatatgaaccactccaaaaaaattggttttgttacattaaacttatttggctctttaggttcactaaactcaaaccacccactccatcaatatatatatatatatatatataaatataaacaccaataaaagagctataaattagtgccaaagattccaaaaccattgtttgtgcattttggcaccttaataatttttctagacactatatatccaaatgaatattatatcattattattgcatagagggtaattatacctcatcatcattatcattacattttattctatttgatttttttagaaaaaaaaattgtgttaaaagggaaaaaaaaaaaaaaaagagaaacattttccttttttttttttttttttgtctgttattgagtttgaccaaacctaattaacaattaattaattttaagaaaaagggtttttctttcacttatgttttctctaatcacatttaaaagtcagctaagtactcctagaccaattatggtcatattgacccattttcttctctcaccttatttatttattttctaattaacaaataaatttcaaccacaaatcacttttagtctccaactccttgaccaacatttcatttttttttcatttctttaattttattttattttcctattaactaggggaatattctcataaat

SEQ ID NO: 88961 - DNA, 1142 bp, Cannabis sativa
ttgatgttgaataaaatggattacattgatatggagttttatttagggcataaaacccaacaaatagtatgcatactggtattgagaaaagaggggaaattgatatcccgattaatgaacaagatagaaggtgggttaagggtgctgagatcatgaattgcaacattaatggagggagggtgagggtactaaaagggcagagctctgtcagtaacctttttttttaacggaggaggatagtaaaaggagagggaggaagggaaggactctcatcgcatttttacagatacacactacagtaggctactaagtagaagtagaaactataggcgaattcgcgccttgctattaagtaaggtggaatctagctacttgcttgttaaaggtgcttgcccgcggctattcgtagatttggagttctatagtcgattgtgctactttcaatccttaatagcaggtattaggtgagaaggcgcctatatcatagcggttacttattgcctagtatgatcaagttttccacaaaagtaacagaaatcaggcagcctttcatatttaaagaacaaccatttgatgatctccctacctgttttaataaaccgaagattcataccccttctaagaggtaaatgtacatcaagaaggattctcatcctcaggtaaggcccaatacccttcccaataatagttttatctacctcaataagatcacccaccttagaagcaatgaatttggctagatcataggatttgcacataaaagggatcgcataaacctggatccaaaatggcacatagtgaagatgctcatgagtaatgggaaaagagttatgaggagctgcaaaaattgtgacactttgagaaaagtgccatgactgaccctctggaattctacccttatccccctcacactcaaaggtcaccaagaaaagcccatcagcatgttcagaaactacaatagggaaacgacactgcaatgaccagatttcagatagagttttcatcaaagagggacggttaaagtgtcgaatggtgtgcaacttaagaagaagactaatgaaaaaaggggcctcggtggggttaatatcataggtaaaaatagtattttcttcaggggttaacactagggcattcgaaacatt

SEQ ID NO: 88962 - DNA, 1246 bp, Cannabis sativa
aagtggtgaacagcctgcatgtgaggagtatgaggggctgacatgaattggcttagggcgtttatagcataggtgatatcgggcctagacaatgtgaggtataataaacgaccaacaagttgtcgataggcagagggatcatctagaggtgtgccttcactgccattaagttttgtccttggatccatgggagttttagcaggtttgttacctgtaaaaccagtatcagtgagaagctgtaaagtatattttctctgagataagaaaattccttagatgatcgtgcgatttcgaagccaagaaaatactttactggccccagggcctttaatttgaattggttgtgaagtgaagcttgtagttggtgcaatagagcattgttggggcctgctatgatgatgtcgtcgacataaaccaatagagaaatgaagctatttcttgtccctttagtgaataaagtataaccggcttgagattgctggaagccttccatgataagagcgtctgaaagcttggtataccattatcgtgatgattgttttaaaccgtaaatcaatttatgcagcttgcatacgagattagaggcggtaccatctgtgtttcggggagttaaacctggtggaatgaccatataaacttcttcgtttaggtcaccgtttaggaatgcgttgtttatgtcaatttgtaaggtgtgccagttttggattgtagatatggcaagcttaaatgtaaccatcttggctactgctgagaaagtatcaaagaagtcgagaccttcttgttgagaaaaaccttgtgcaactaatcttgctttgcacctttcaacactcccatcactgttacattttatcttgtaaacccatcgacatcctataactctcttgtttggtggaagcttgacataagtccatatttttttcttcaataaagcatataactcagtttgcattgcttggttccacaccttgtgctggctggcttgtttgtaattccgaggttcaaaaagagctgtgacagcaagaataaaagctcgatgagtagcagataatttttcatagttaataaacttactgagtggatgaggtgtagaggattggtcttgtaaaatggagttgcattcgtaatccctcaagtatgcaggaggtttggtctgcctagtagttcttcgaagaggaacttcatttgtagcaggtgtgttgatgttgttgtctgatatggtaggggcaggagccatttgttctggttc

SEQ ID NO: 88963 - DNA, 622 bp, Cannabis sativa
ttcacgatgtaaatgctgaagatgctaagtgttgatatgttgttcggactgtccactgctcgactaggaggacctcatccgtgcaggtatatgtggtgctctgctcgaaacaccttatggagaatcggttccacgtgtcaccagcgtgtgatgccacgtcaaagtggcaaaattgggatagcaatagggatggctacctacaagatattttatgacaggaagtgcagatctccaactcactgggatgaaacgggagaaaagaaatacctaggtccagaatcagtgcaacagactaatgaagctacagaaaagatcaaggcaagaaggcttgcctatcagagtaggaaaaatagttatacagatccaaaacgctgacatttacagttttaggtaggagatcatgtattcctacgggtatcttcgatgaaggagattagacgttccgggaaaaagggcaagttatgccataggtttataggaccattcaagattcttgagaaggttagactgatggcatatcgtctagccttacctccagctctttcagcagttcacaatgtatttcatgtttctatgttacgaaaatacgtttcagattccactcatgtactgagttatgaga

SEQ ID NO: 88964 - DNA, 1254 bp, Cannabis sativa
  modified_base (41)..(49): a, c, t, g, unknown or other
  modified_base (434)..(434): a, c, t, g, unknown or other
  modified_base (1205)..(1205): a, c, t, g, unknown or other
tcaattagaatataatttgcttagtcccaagtgtattcttnnnnnnnnnttctactgtatatatatatatatgagtttacttttaatggtattaccatgaataagtaaaattaaaaaattttaaatttttatgcttaatttttttatttaattaaaaaaatcttttatttttatattatatggcctgagattgtttcatccgtaaaaaaaaatttaaaaaaaaaaagttttttagcaagaataataaaaaaaagaaaaagttgattttgagttaaatatttttgtatgaatatatttttgatatagtgtaaaaaaagattttttgatattttttttaattaataagttaaattaagcatagaaattcaaatttgtgatttcattattcgttagatcaaattcggtttgatattttttaaaattaatatttatanttaaatttgtttagtaactattaatagataataccattctatatatataaagagattgttcatatattaaaatatatattaaaaaatttaataggacaacagattgttcattcatattgaaatgatgtttttcagttacgttcttgttaaaaaaaaaaaaaaaaacatatacgtttcaactctttattggctattagagacacatgttgctactatttaattttatgtgagactgtttttttcactaaatattttattttatttttgaaactaattaccattttaatggaaatatacagtacagtacttagtacaatgcttatccattttggcacacattgttttagtctaaattttttataatacgtatatttatttatgatttattgtaaatttttgaaaaattatcattatttaagtaaattagggctaaaccttaaatcatatatttttttacggtcaagtctcctaaacacatgttagttaacattttaactttttcatcgatccaacttcttctgttaagtgacatgctacttatatgtatattcttctacacatacaaaattaaaattattccacgtaattacatattaagaaaatataaaaaaataattattaaacataaaaaaaataaaaatagaatttacataaaattattacaaacatacaaactcatctatatattttttaatatgttcctctctctgttccactctatcttttcaattctcactataaaaaactgttatttttagtgacaactttttngtcacaacataatttttttgtgatcaaatgtgatttttagtcacaacaa

SEQ ID NO: 88965 - DNA, 669 bp, Cannabis sativa
taatggtgaaaggattatcataccacgaaattgtggcaagtgatgtgccaaggggcacaacagaagcacttgcacctaccaaggttaaaaatgaatgttgaagttaatattattatgtgttttactgttatgtattcttgttgaattattgttggactttgttaaacatttgtggcataaacaagttttcatataaatcttacaaattttcatacatagaaacccccattataaaagaaataattttagtgataaatagagtgttcaaatcgaaaagcctaaaagtaaagattgttcaacaaatataataaataaaatacccagatctcagctcaatgtgaaaccgactcaacttgtcccttgtgagacagtgggagttcatcacttgtcataagataaatctgtgtttaggcacaagtaacgaactccaattaaaatagctttgtgataatttacatggttttggactaaactgttgctgtataactagttagtcctaaattctgtacaaggtgatgtggcatccagcatgttgacacatggagaacaatgagaattcagaaccggtaattttccctcaacatactactacaaaaatagtttttcttgacgtttttaaatagtcatttaaagtattcccgtcggtttcaataatcgtcgcctatatga

SEQ ID NO: 88966 - DNA, 629 bp, Cannabis sativa
tgcaataatgcacgctaattttttttttaattaaatttaattaagtgatgttaagtgcaatatatgttcattttcttaattaagtaatgtatttttattctttaatttttaaaattttgatctttcagaattttttttaaaattgcagctatattaatgcattctttaattaaatgtgattatatatacatattttatatttacaataaaaaataaaatagaaaaagagcacaatgattgatagatttctaatctaaatcatataaatcaactattaatcatacatcttccaataaaaattaagtattaacaatctattattcaacctaaaataaaaacataccaaaactaataactatcacattcatatatttgttaatttgttgatgatatatatttaaaatctttgttaatgatattcaagtaaagtaaatgattcaaatccaataaatttcatatatacaacagatattttattattacttcgatttatttatatgttatacattagtttagtacttttaaatttttttaattgatttatttgttaactttagttatttacataatttttatttttaaatatataataaaatttaaatttctttaattgatttatttgttagctt

SEQ ID NO: 88967 - DNA, 712 bp, Cannabis sativa
ccaaagattcgcaaacataccaagggccccacccaatgaaattactttgatgactagcccctgacacttcgctgtttggggaatagatctcattagctccctacctacaggaaagcgtggggtaaagtatgctataattgtggtggattataacacaaagtgggctgaggccgagcccatgaagaccataacttccaagaaatccttagactttgttataaaaaatattgtgtcgttacaggctgccccacaagatagtctcagacaatggaaagcagtttgattgcgatgaattcacaaatttttgcgaccaacacgaaatcatcaaaagcttctctgcggttgcaagaccacaaacaaatagacaggtagaagccgtcaataaaatattaaaggtcgccctaaagaaaaaattgttggcctgcaaaaataactggcctgaggaactgccacgcgtattatggacctaccggaccaccacaagaaccacaaccagacactccccattctcaatagtgtacggatgtgaagccatggtatcggtagaaaccttgatcccttcccacaaaagatccacgtacaatccagcaacgaaccaagccttgttgcaagaagcactggatcagatagacgagcttcggaaggaatctcaaacacgcatggcagcgtactaaaaaaatggcgaaatacttcaattccaaagtcaaagata

SEQ ID NO: 88968 - DNA, 759 bp, Cannabis sativa
cctctccacttaaaacagatgttcattgagggattttctcaataaacttcttattgtaatcacttagaaggtatggcattaaaaaatttgaaaagtcatcaaaatcactatctgtagaggatgaattagaactagaatcatccatttgattgttcttagtcctgaaaatcatattagcatgcaaaaaataaatttaggaaataaaaaacataggctaaaagatatataaaaaagacatataatgtttgaaattaataacaaagtcatccagtgttcaaaaaaaaaataggtaccagctaacatcatcatagcataacaaactataataatatatatataaaaaaaaagacataggtatcaataaacatcaccttagcataacaaactataataatatcaaagtctatctagccaagtcctctttctagcagtagacatattaataaaagtctctctccaatctaaatctttgaacttcttgacagctttcatgtaaacatcatcatcatctccttcaattccttcaaggatttgcatgcattttgtgagagaaaattcatctttttgacttcctcctacttcacttttactattgtatttttcagctttagctaaagtagcctcagctcttacttttgctacctcggtccatgcaaaaattgcatcactcatttattgtgatctttgtcttttcactcgctctacacttgttcttgctgaattttttgttgaacgtttaaaaatatcatcaacaagacg

SEQ ID NO: 88969 - DNA, 691 bp, Cannabis sativa
tattgcagagtcttttgtgttagggagcacctttcttaagattatatcccctactttgaagctttgttctttaaattttaaaataaagtactcagctaactttctttggtaagcaaccaggcgaatgcgagatgcttctcttctgccttccaataggcccaaggactcgtttatcatttggtgattgctgacttggtcgtatgtcatccttcggtgggagtgtgggtctatttcgactggtattattacatcatatccatatgcaaaggtgaagggggtatcaccgatcgctattctttctgttttcctatatgaccataggacttcgggtagttgctctggcctgttcctctttgtttcttctaatcttttcttcaatgtatctttcaaaatccagtttactgcctctacctacccatttgattgagtgtgggcaaccgatgagaagattttcacgataccatgtcttgagcagaagtttttgaacatgacactgtcgaattgtgtaccattgtctgacactagcttgtggggcaagccaaattgacatatgatattctttactacaaagtcaagcattttttggagattatagtggctagttgtaatgccctaatctatagggacaccacgtgtgtgattttataaactagtttaatactagtagaataattaattattaaaaaccgtg

SEQ ID NO: 88970 - DNA, 818 bp, Cannabis sativa
atttatggatgcttattcttgctaacaccaaatttccatgaatgtcgttgaccaagaacatacaagttttaccgctgacatgggattatattgttacaatgtgattctttttggactaaaaaatgctggcgccacctaccagcgacttgtcaacagaatgttcgccgatcaaatttggcaaagtatggaggtctacatggacgacatgctagcgaagaccaagctagcaaagaatcacgtgaaagacttgaaggagtgttttccattttgagaaagtaccacatgaagctcaatcctttgaagtgctcatttggtgtttcatctggaaagtttttgggttcattctcaattctatgggcattgaagcaaacccagaaaagataaaagccctcatggatatgccttcaccttaaataaagaaagatgtacaaagccttactggttgcattacaacactaaatcggtttgtatcaaagtctatcgaaaaatgcctaccctttttcaacttactttagagtagcaacaaagtggaatggactgaagaatgtgaacaagctttccaactacttaaaaagcacttggcagagccccctattttgtccaaacaaaatacaggggagatctttcatttatacttagccataactgagacaatcattagcacatccttggtacgagaagagaagaaggcccaaaaattagtgtattatgtgagcatgcgcctcttggggggcagaggcaagatatccaatcatagaaaaacttgctttttgtttgatccatgcatcaagaaagctctgcccatatttctaagcaca

SEQ ID NO: 88971 - DNA, 596 bp, Cannabis sativa
actccaaaggaacattttttcgggtttagtttcatgttatacttctttaatatcttaaagcattctgtgaggtctgaagtatgatacttactttttattgattttacccacatatcatcgatgtaaacttccatattccgccctgttttgtttgtgaacatttcgtttaccaatagttgatacgttgccccagcgttctttagtccgaatggcatgactttataacaatagagtcccatgttagttatgaagcttatatgttcttgatttgggacatatatttttatctggttatatccagaatatgcgtccataaatgacataagctcgtgcccagcagttgcatccactaactggtcgatcttgggaagtggaaaatagtcttttgggcacgctttattcagatcggagaagtcaagataagttctccaagttctgttggactttgggacgagaataggattggctatccacgagggataaaatacctcgcgtataaagtcattgggtaacaacttgtcaacttcctgttttagtgccccttgcctctcggaatccaagggcctcctttcctgtctcttcgctgggtagtttgg

SEQ ID NO: 88972 - DNA, 1102 bp, Cannabis sativa
gcttgtaatctgataaatagttgccagcaaattgtaagatacgagatgcagactttggagttttagcatgtgtttctgcattcctttccgtccaaatgcgccaaagaagtgtaatgaagagttcaaccttatcagtttgaagttgagaggagacatagattaaaaaaatcagagaaggagcaggacttagacaattgccaattgattgctgaatcccaatttttccagacttgtttagcacgagtacaccagaaaagtgcatggttaatggtctccaaacttagctgacatagaggacattgaggagatgctgaaatgtgtcgatgttgcagagttgcagcagtaggtagagcttcatggaaagcacgccaagcaaaaatttcgaattttgaattttaccaaaaaacatcaggtgtttaaaattcgaggggcctgtgatccaaggttgtgaattgcagaaaacaacagcacccgaacctattctccattttaatcctttaagatgcaattcctttccccaaacaatcgatctccaagtgagagatggttgtgtaccaatagtagcatcaatgaaattgccattcaaaaaatacctgctcttcagaactctagcaagaagtgaggatggacattctaggattctccaagcttgtttggccaaaagagcttggttaaaatgaacaaagttacgaaaacccataccaccatgaatcttagctttgtagagaaatttctaatttttccaatgaatagaattacaatttgcaaacgaaccccaccaaaaccttgccataagttgctcaatttgagtacaaagtttgattggcaattgaaagcaactcatagcataggttggaattgcttaaacaacagctttgagaagaacttctttcgctccaatagaaaagagttgttctctccaagagttaagcaatttcaaaattttatcaagtcttatccctgcctgagaatgaaggtagccctaagtattgttcatggcatggctgaataggcatattgagaagttgctgaaagaattgttgatctgaaactcttgtgtttggtgaaaaagagagcacacttttgtcaggattaatcactt

SEQ ID NO: 88973 - DNA, 530 bp, Cannabis sativa
aacaaaaaggcaagtcttaattaagtagggattataaaataagtagggactcaactatttttggtaaaaaaaaaaaaagagaacctttttatattacacttcttattcagagtagatgggaggttttggcagaatatttagtacaagatattagatgtagttgaatgtcaatgtcttgatattgcaaaacaaataaagatttttgtttgtttgtttgtttttgcttctcatgtttaattaccttttaggcttttacatttgtgtttgatgtttgttttgttgaatttaattcaattataaataagatctccaatagtttgatttatgaacttattttgtaataaatatggaattagattcttgaattacttaagctctgagatgttcttttctacaaggtcttgttgaattagtttaaaagaatttcactggataaatactatgtctgtaattgaatttaatataaaaaaattccaaagttttaaaaatactttaattactcattaaattactggtgagtttcagatttt

SEQ ID NO: 88974 - DNA, 880 bp, Cannabis sativa
atttttcttttatttctaattatatgcagtataatgtaaagaatctctaccttcccattgggttgagagcttgggagcaatatatatagctacatgtatatttataaataataatactccaataataatcaatcgaggtaagaataagataggtatactactgattatgcttgcccaactgtacttcctaaattattattataatatgttatatagtatatacaccaactgtacttgacttaattacatacaaattcacctaattaggaagatttgttgaattagctcattcatgtattcaggattaacacattcacaacagaaaaaaaaaagtataatattttttttaaagattcggaaggtggcctatctctgtccatatcattttcaatatttttgaaatatatatatgtatatataattccagacgaaacaaataattttattttatatgttaaatgttagtcatgatcatttagcataactgtataatttagaaaaatatatataactatacatattgtagtacacgactcatatattatatataaatagaagaagaaattataaaatgaaagagaaactaataaattattatctattaattaaatcatgctgttaattaattagagacgtgtataaaatatataattataggtccactctaatatccttctatttttaattcatttttatcattttttttttttttgacgtatctgttttctttttcgttttttaatttttaaaaataacttcaaaaaaccaaaccgctaaacattttttttaatagtagccgctaaacattttttttaaaaagaccgctaaatattgttattaaagctatatatatcttttttttttttttgaaataatcgaa

SEQ ID NO: 88975 - DNA, 707 bp, Cannabis sativa
attcactacagtgaaattgggcattctaatactacaaaaaattgtgcctaatagatagctatcagaggcgaggcgacatatcactcttcaaaaatcacttctaatatttcgcgccaaaaataatacttttagagcatattttttgaagatgctataaatctacaatcatctaaatatataatattttattttatttttctttcacatacatctttacttttaaaaatagtctaatagtataatacattttaaaaatattataattattatttcacacattattatatgtatataattttttctttataaaattattatatatattgtacttttaattttttattgtataaaaaaaatatagcatcaatgccattatatagcatcaatacaaatttcaagaataatatttttcttttttatttctattggtataatatcctatattttgccactttggctttccacctcattagctattctccaaaatattaccataagagatactgttagggtgagttataatctgactttttttatcacgcctaatataataaatgttaaaaaaaaattataatatcataaatatcaatatattttttataaattacaataacaatagtataatataactttaaaatattgatacagtaatatagatatctattctatataaagtgtgtctatataactgaaattcttggtttatg

SEQ ID NO: 88976 - DNA, 864 bp, Cannabis sativa
gtggactaggagtgttcgaaagaacactgataccacgtacaaatctcttgtgtcaagtaatttaattttctacaattatttttatattctgactgttctattttgcaactgcaaaactgctttctacagtaacagaattacaatatgcttttgcagacgtatatagttttatattttcgtatttattatagacatttgcaaaaattcagtttgtcaggctggttgttcgggttgggcggtttacaaaaatttatgtacagccctagtgacaagtgtccatgcgctgccaattatgtatagtaaatgttagagtagtggacattggacaaaatgtatgttattttttcttttgtgttgtgccccctttttaggtctaacataggggaaaacttttgattttgtgtgatctagtttcagaaatatgccacataggatttcactcagacttttcctcaactactcttccaggattactcagggcctgagggtatccggcttcgtctctttgagtctttgtctctctagatgaaagtcatccttctaggaccaagaaggtctggcttggttgaggcaaggtcatagttgaacctggagccttaatccgactttgcttataggctgactcattagtcattgctctgtctgggcctgacaaataaactaagcgcgttaattttagcccctgaaaatatacgtatcatgcatctgaaaatgcggataacacctacctatatttaaaataccttttattacgaactacctatgtttttataattagatttaattattaaaacacatttttataaaatctaatttataattcaagttcacttatttaccaaaaaaagattattgtacttaaag

SEQ ID NO: 88977 - DNA, 1077 bp, Cannabis sativa
aaacaatcaaattgagcaattaaaaaatgctcaaggcagctgggtttcatgggaatcgaaccttggagaagtggtgcaagactatttcaatgatcttttttcttcggcaaatacaaactgtatggaagtggttgattgtgttcagcctagtgtttcggcctatgtcaattctgaattgtgtcagcccattcaagaggaggaagttaagaaggcgttgtttcagatgcatccagataagagtctaggcccagatggaatgactccggctttttatcagagatgttgggatatagtgcgcaatgaagtagtggcagtggttcggtccttcttctctaatggtgtccttgaagataatattggcgaagctaatgtggtgctcattcctaaaaagaaaaacccagaaactatgtcagaccttaggccaattgctctgtgtaacgtcatgtacaagatcattacaaaagtgatggttaatagaatgaagcctttcattgattctattgtgtcagaaaaccaaagtgctttcatacctgggcgcttaatttctgataatgttttggtttcctttgaagttttgcactatctgaaaaggaaacgcaaaggcaaggagggatttatggcgctcaagttggacatgagcaaggcatacgatagaattgagtggccttttctcgaagcaatgctcagaaggttgggtttcaccgagagctgggttcggttgatcttatcttgtgtaacttcggctcgatatacgattgttcatggtaatcatgaggtcgggcctgttattccatctcggggtattcggcaaggggatcctctctcctcttatctctttatcctttgtgcggagggcttatcagctttacttagacgctatgaacaacgaggatggcttcacggttgtaaagtagctaatggggcgcccagaatttctcacatgcttttcgccgatgacagttacctatactgtaaggctactgaatctgaggctcttcgagttaaagaagctttgcacaagtttgaattggcttcaggccagaaggtaaatttctcaaaatcatcgatctttttcag

SEQ ID NO: 88978 - DNA, 987 bp, Cannabis sativa
  modified_base (607)..(610): a, c, t, g, unknown or other
aatttatttagtgtccaatttatagttatatattgatttattttccttttacattgaaacaaaacaagtgatatatgtgttttgaattaaattaataataataataaaaaatgttgtataaaaccatataaataaaatagcttcaattacaggaagggcttaatgataaagaaaacagtgattcagacactgtttttttaaggtcactttgatcttggtatacctagatcaaaaataaacttattaactatatacttgcaagaataaatcaaaacaacaaaaacaacaaattcatagtaccttttttttttcaaaccatgtactaaaagttcgataatggtattacaccctttacttacaatatatttgagcaattctcttctctattataaagaagttgatgtgagttcttattttatatggataattatataaagtactattttttgccaaaaaaattacattttcacgtttaaagatttttttttatattcttacaattttctataaaaacaacacaaaaacaacaagaaaattacataaaagtaactaaaaaataaagtctctaaataacattaaaataataacaaaaaataacatacagatnnnnaaaaatcaacaacaaattaaaaagagtacaacatgaaaagaccatattttagtaataaaatcataaaaatatttaaaatttcatataactgtatttttgtattttttttttttttgttatttttgtgaaatttcctgtataaatgattagtgccctataaggtatgaaggtgtgttagtttccaaagaagattaaattgccaccaaactctctcaattttattcttggtagcaaatagcaattaagcctcaatttatttttgataattttagcaccattatactattattggtataattaagtatcatatttcatataacttaagaaaatagattttaaggcatatcggtaattaattatggagcacgatctatata

SEQ ID NO: 88979 - DNA, 586 bp, Cannabis sativa
ttgatagttccttgaaaaaattctggtttttttgttattataattaataaaaataaataatatttgtaccctaaatatatataaagatataccttattaattattaagggaaaaaaaaacaatatatagtacaataaattttcttaatttattctaaacaagtttttttaatattttgtttgttaatttcattaagatattttttgatagatttaatcacattcattaagatattttattatatgaaattgcactattgcatctgttaatttcattaagatattttaatagaaagaagtttttgatagaattaaaaaaatatatattgtagttttacatatacatataaatgttttttacaaaaataattattttaacaatatttatttaatattaggaaaaaaaaagtttttatatatgtctttttgtttcattattaatttttaaaatatattttattatttctattttttcagattatgaaaatatataagaaaattaaatacataaatacaaatttgaaaatatataatgtaaaaaaaattaatggactaatggagtgttttaataaatggatataaaatta

SEQ ID NO: 88980 - DNA, 1081 bp, Cannabis sativa
  modified_base (701)..(701): a, c, t, g, unknown or other
acttcacaaatacccaattttttgattgccgaaagtgacattaatttatactagccccaagatcacataaagatttctcaaattttaagccgccactctcacaaggaattaaaaagctacatggatctttaagcttttgaggccgctttttctgaattacggcactacattcctcagttaagctcacagtttcataatctccaattttttttctttatcaacacctctttcataaacttaacataattgggcatctgctctaatgcatcaatgaaaagaatgttgatgttgatgttgatgtcgatttttttaaaaaaaaaaaaaaaattctaagaacttagcaaagtcctcatcaagtttcttcttcataaatctttaaggataaagaattggcagtttatacattggaagatcttccttcttcatagacttgtcagtaggcttctcttcaggggtctcttctttggcttctattgggtcttcaacctctgaccgattgacttatcttctacagccgcatcaagtactttaccactcctcagtgagatggcattacattgttctttcagattgacaactatatcactaggaaaactactatttttctgcaaagcactcataacattggccagttgtcccacttgaatctcaatttttttatggaagtttccatgttagaaatatgagtttctatgttgtcnaaccttgcttcattcttgttaaacctcttgtttgtatccatcataaatgtacccaaaatgtcttctaaggacttctaatattcttgttgttgagcattaaatccaggaggtggttgaaagacgttttaagtgttaccatcagaaagattctcatggtttctcaaccccgaatggtagtagttaggcattaaatcacccttgtagttgttattgtaaggtctattggccatatactgtgcttgttctacattcatctcaggcccttgtgatgtagatgcagcagcaacattctttacaactgatgtattcttctgagcagctaaggtagccacttgattagatagtagaaatttaagctgctaaatttgtcataggatcca

SEQ ID NO: 88981 - DNA, 585 bp, Cannabis sativa
aataaatttgtctgaagcttaacatcatcatagctcaatagacgggtcgagtctgatacattgtttatcagcatggagacatgaaacacattatatactctggacaacgtaggagttaaggctagttaataggctacctggcctacttactctagtgaacatgtatctaatatttttctcgtacaacacttattaaggtacctaacaactggtatattaaattatcctttttgaataaacacctcgttagagacgagattaatctaagataatccaaattttatcaaatatgctcacaacatgtttctaatattctattgatctactcaggttacgcacctttcaaggatagaacatcatactatttttttttatttaatctccatggttctcaaaaaccttgtttaattcttaacattgtagccaaagatatcgaccttggaatttcaccagattagactattcctttgtatgaattcgatatcttcatttatggtataaattgtatacactgatagacaacatattaactcggtatgtccaaccgttactacttggtccaaatcataagatcccatagtacat

SEQ ID NO: 88982 - DNA, 653 bp, Cannabis sativa
catatataaattgttgaatatttcttaatacaaaaaggttctaagaagattacaatcaaaatatttaaaatataaataaaagttatgagatgagagctgctaaaactaagcacaacattcataaaatgttaaaaagaaatacatgttgaaatttggccatgtgatatctctctaggcgacatgtcacctatagtgtaaaatctcaaaatttggtaattagtaactaattattaattttttcagcatttagaaaataaatttacttcaaacagttcaaaatttctcacattgactttatatcatttatacactttataaatgataaaaataggcccccaacaactatatttctataactaccttttaattacattcaaatacaattagtaactcaatttactaattaattagaaggaataatatggaaaggagttacaaagtttgttattttcatctttttaaggatttgcaacttcttcttataatttatactcaaactatgtaacttcctacatatattaccatttgacaaaatcactatttaatttattacacttaactatttgtaacataattatttaatataaatataatgttatataatataacatataccaaaaaaaaaaaaaatataacataaattaataatttat

SEQ ID NO: 88983 - DNA, 917 bp, Cannabis sativa
ctccagaattgagaaattataactctgacgcccacttttaataatgggactcacaattaaatacactcacaaataattataaaaactatcaataattagtgctaattgcctttactaatccatattataaatgcggtcatcacaattatccccctgttaaaggattttgtcctctgaatctaacctgaatagctctggatattgagttctcatgtcagactctaactctcaagtggcttcctccaccttttggttcctccaaagcactttgaccaaggcgatggtcttatttcaaagaactttttcttttctatcaaggatttgaactggctgttcttcgtaggataagtctgactgtagttcaagggcttcataactcaagacatgagtccgatacgaaacatattttctcaactttgaaatataaaatacattatggacagtcgataatgctggtggtaaggctagccgatacgctacctgcccgaccttctcgagtatctaaaatggcccaatgaacctagggcttaacttaaccctcttcccaaagtggctaatacccttcactggagaaacctacaggaaaacatgttcctctgctggaaaagtaatgtctctatgcttcaaatcagtataacttttttgcctgctttgtgaagcaagaatccgagcattgatcttttatatagcttcattggtcctctgaactaattctagacctaagtacttcctttctccagttttatcctaatgaattaaggagcggcatttcctaccgtactgcatctcatagggagtcatcgctattgtactttggtagctgttgttgtaggagaatttaattaaaggcaagtacttactccaagaaccctcaaagttcatgacacaggctggtaataaatcttcaagtatctgaa

SEQ ID NO: 88984 - DNA, 924 bp, Cannabis sativa
tacacaataaattaaaacacttatttttttagattaattaaaaaactattttgacattttattacacttatgccattttaattaatcacttctatttttttagttgctaaaactaaattagttataaataattatatattcattttaaaaatatcacattttatttttttaagtcacagttttaaacttttttataattaattttttaatcaatttttaattatattacattaataaaaattaattttttttcgtttttcagtacaaatttttaatgagtcgtaacatacaataattagaaaaacaaatttctaatcgtcttaaaacatcccactaaacaaatatattgatcattattattaaatattaatatttaatgatattactttattactatttaattataatttaaattatcatatatctaaatgtaatgttaaaaagacgaatagttttgttttatttttaaaatattagattatttatttttaacatttggcttggtagaaaaattcatcaaagagaataattagtagtatgacttttgttaggtcctattatctgtttgagtaggtatattataggatttttcacaaaaatactagaatttgggcaaaaatttagaatttactgtcacacggaatttttttacaaaaatactgtctttttataaaacaacaaaattgaacaattaaaataacagtggaacaactaaaaaacaacgtagaacaacattaaaaacttaacacagtacacagtataaaatttacatagtatttttgaaaaaaaatacagcattttcgaaaaaaattctaccccacagtaaaaacgttagaaattttagtatgtggtgtaaaaatccctatattatagtgtttatatttacatttatatgtatataattattataattgtatatatata

SEQ ID NO: 88985 - DNA, 696 bp, Cannabis sativa
agacaatataacatataaaattgttaattataatataagaaaggtaatatatgaaattcataattgcataaaaaattcaactaagttgttgattaattccttaagtggacatgaagcaaaaccaataattgttagtaaattaataataatcgaaagtttaagcaaacaaatgcaagtctagtcaatttcatatttgagtacgtgacaaattatatttgtccatatatgtaaacatttcatcactagtatattttatgatacaccaaatatatataagtgcattttaggtatattatttatgaatggatattattaagaatatttaaatttttatgctttgttattcaattaaaaaaaattatttatttttgtactatatggttgatgttgttctatcggtccaaaaaagaattagaaagaaaattgagtttgagttaaaaagagataaaagtaatactaaatataaatatatttttgatataacgtgtaaaatatagagatttttaattaaatagtaaaataaaatacataaattctaatttttttttattatcagtcttgaattaaaatttcattattaaaaattaatatttttaaaattgacatttaattatagttattttttaaaagttaccaattaaaaaataatttatatatataaagcacatttcacttttcaacatgtggacaaatggt

SEQ ID NO: 88986 - DNA, 798 bp, Cannabis sativa
ttctatacgattttttgttgcgatttaggttgcagcgctagttgcaataggaatttctatgtacaattccgtaataatacgaaaaaaaactgttttgaagtgtaaaaataaaaaagccccaaaataggggaatacatatgctgtttttttttaacttttttcttcaaatatacaatttgggtttctaaagtggttgcagcgctggttgcaataagggtttcttatacgattttttgttgcgatttaggttgcagcgctagttacaatagggattttcatgtagaattccgtaaaaatgccaaaaaaaaatgttttgaagtgtaaaataaaaaagtcccaaaataggagaattaccccatatactgtttttttaactttttattttctttcaaatttacggtttgaatttctaaagtagttgtagcgctagttgcaataggggattatctcaatagtatatgggctagattatgatgagatatatagcccaatcgctaagattacaaccgaagactcgtagctagtaaagattggagactatggtagatggatgtgaagaatgtatttttacatgaagcaacctagaggattcgaggatagatctcatccaagctatgtttgcaaactataaaaagtgttctatgaattgaagcaagctccgagagaatggtacgacaagattgctgagtttttagtggagagcaatcatgccatggtgcatgtagattcaagcttattcatcaaagtaaaggcaacaaaattgcacttgttcttgtatatgtcgatgacctcatcatt

SEQ ID NO: 88987 - DNA, 658 bp, Cannabis sativa
tacgtaatttatacataattttttgaaatattcagttatataaaatagatctaaaaatattaaaaaatttgtaaaaaaatcactatccatccaaggttgaatctataagattctataaaattgagaacttattatataatatttgttattatactttgtaagaaaagcggaactccccaatatgttgaatcttaatacaagttgtgacaaaaacttttttcgcgtgagaacaaagcgtgctccttatcaatcaccttttgtagtaaggaaactcctctgtttttagcttaacgtatagtaaggtgaaacttcttcgaggccccgtcgtctaggacagagaggttgtacgtatagagaaggaaagtctatttttcccagagtctagctaactctaacccaagatcaatcttgaagaggttcttcttattcagtagcagatttgaccgaaaggcgtacatcaaaactagcttttagagcctcgtggacttttagggttggatatttttctttcattttttttacattttttttttgtgaaaaaaaaaaaagaaacatcaaactttatttgacttagtttgagattttttttattattttgttaattaatttttaattggtacattatggacttaattagattaaaaaatgaaaaagtaga

SEQ ID NO: 88988 - DNA, 545 bp, Cannabis sativa
atatgtatattttttaaaaggtatcttttttatttgggcccctaaaatgagtgggccctaggcgcggtgttagaaaataaaatgagtcagcagccaactgtgtgcctcctcttatttgttacaatgcaccatcattcataggattctccttacctttgtggtcccaaattgtataacaacttttgcccctttaccgttagaatattccttgttattatttggtaatgattgtatagatttggtgagctgtaattatgtagaatattcttgattcctttctctgcctataaatgaaaatactctgccagcatcaaagtttgagctgagctttacaattcctgagcattattttcctgtcttgcttttagtgttttcaaacttggtatcagagctttctcgccggtggtggtaagcctcatcaatggctgatcagaccccttcccgtggtgctcaagaagagtcagctgctaacacggcaaccagtgcagtcgctcagtcctcagctccatccatggccgtcaatggacctcaagttgcaagcacac

SEQ ID NO: 88989 - DNA, 1167 bp, Cannabis sativa
tggcacaaactaacaaacacgcagaaagctgacatgacactaaaatgaacttagtgaaatcagatgcaactaactacagaaaagatgttagatttacaatactgaagaagaaatactaaacaaaagtatttacataatttgccacacaaaaacatgatacttacaatatcccccttggcaaattatgatcaacgacaaaacacttaaagacaaacaaatgtttagacatacacaaacatacgaaaacacaaagcacacccaaaatattaactctgtgtacaaagattatcaaaaggtaaaataactccccctcgatgatcataatcaatcactgctggaataagagaccagaggagcacaggaaccaagaatcctcgagtcaccaccatcaggagcagaagactgagccacagtggaaatctccccctgaacagctaccacatttgaaggctccccttggacaacagcagtatgcgaggtctccccctggataccagcctcaatatccgcaccctgctcaaaccatgaatcaatctccctttcaagaccagctgatggagaaacaacctgagcaccttgaatatcagtagataaatgtacttgaaggtctacagacgtctatggatgactttgttcagcagatggatctactgctgcatgagatggagagaggccaggagaggccttattctggtcagacccattagcagaagagctagagacaatcccctgagaatgaacagctggagaagcttcagattcctttaggacatttgccatagcagtgagaacatcaatgactaatttttcaaagcgatgttgcctgagttgatcacgagcataggaggtggccagatcagtaactgaggtgatcaactgagattgccaggaagtggaagcagccccatctcgagaagttgaaggagcagttggagcagaaggcaagtcttccattagagaagccccaacggcagatacatccatgactggcagtggaagtggtttgctatgcacaagattaaacgacttaccaatggttgggactggcagcaatttgtctttctcataaacaactagagagcctcgtttaaccactctgttaatcaagctgggataaggcagggtatgcttgatactcttggaagaggcagaactcataatacgatc

SEQ ID NO: 88990 - DNA, 502 bp, Cannabis sativa
tggagcagaggtttgcaaaaatgctagctagactttagagaaaggatgaggagatttagagactcaggaattagggtcctcctattgcacctcgtcctctgacaccattagttactattcaagtgttgtcagttgagcaacccactgttggtaattaatcgaatggaaccattgtatgaaaggttctagaacatccaatttttctgggaggcccagatgtgatgaaggctaagcagttgatgacttttatgaataaaattctaaattttatgggagttatcggtaatgaccgtgtgacttgtgaggcattctagttccaggaggatgccctggtatggtgggagctggtatctctcactcgggatgtaactataatatcttgggatgagttttaagatctcttcaatgccaagtattataatgaggtggtacatggtaccaagagaagagaatttactcagttagtttaggaagaatctgtgccagtaatacacaactaagt

SEQ ID NO: 88991 - DNA, 616 bp, Cannabis sativa
tgtaatcaatcatttatgaaccaccttataaaaaaatatattatagccgcatttccaccactacattcatccttattcttatagcttggtatagtatcactcaaaaatttgatatttttattttaaaacttattattactcatgtctaacataatcatatcttgattgatgcatttaaaactttgagtacacatttgattttatattaaaatataagagatttaatattaaattatacttttttttgaaaggtaaaattaacttttattaactttcgaaatcagttaccaaagtaggcaacaactcagttggaatatttttcatactgaaggtacaatcaggataaaataaagacgctctagcaaactcatgagcaactctattagctgaccgcttaacaaaacaaaaatagacattatttagactagccaacatggctttgcactcttggatcacacatccaaaatgagaagacagaatagtcgagttccgcaaagcttgtacgaccactaagcaatctgtctcgacccaaactgaattgtaagtttggtctttaatccaacttagagcttcccgaaagctcagagcttcggcaatggacggagcaatattacca

SEQ ID NO: 88992 - DNA, 920 bp, Cannabis sativa
aatgtaaaaaaaggaacataaatgcaacaaattataatttatgtgtttgtctaataagtataaatataatataccttttcgagtttgttcttagggagatgacaaagaagcttttgggtgtttgattctactgtttgggactttttgtcacacaagtgatcaccggccttgttattttccagtaccttgatttttttggaacaatctttttcttcagaaagttttatcgttgtatgctttttttgctccattttttggtaattgttgtggagttttcgttttgtagactctagtttcgcttcaaagtcaacactttgggaccttttgtgacacaagtgatcatgagccttgttactttccggtaccttgatttttttggaaaaatctttttcatcataaagttttatcgttgtatgcttcttttgctctattttttggtaattgttgtggagttttcgttttgtagactctaatttcgcttcaagatcaacatattgctgtttcatgcatattataattgtaaagtaagaacatcaatgtaataaattataagttttatgtgtttgtttaataagtataaatgtatatacctcttcggatttgttttgcttaggcaaataatcagaaagcttaggagtgtggagttcttgttcggaatgtttctcactcaatctaccaccaactttgattatattttctttttcatcttcatattgtatcttgaaatgttgatctaatacacattcattatacgttgttaaatattcttcgtccattggaggagttggaagtcccatgatgtcatcctcatcactctccttaattccattaaatatggaaggtaagctatgtatcatgtctttatccatctataatcaaaattaaattaatatattaataaacagaataagaataagaaa

SEQ ID NO: 88993 - DNA, 1475 bp, Cannabis sativa
gcttcttttgttttatcttatcttttgacaaatctctttactcatcctttctcttagcatttgacccactaaggttcatttcattttgcacctcttccttttacaaaaaaatttgtgttcttacattaaactcatttatgtttctaacagggcgaccttgcaaatcatcccatagttcacctcccacggttgaagtcagtagttattccaacttgaagagttgacaattgaatactaccatttagatttttgactttggttgctgctgtactaaaacgacttaaatatgcttttagggactctcctagttgctacttgatattagtcaatgaggatgcctctagcctcttatcccttgcagcctagaattgcttctaaaaatccttagatagttgctcctaggaagttatggaatagttagtgttaacacaaattttcgttaactaaataattatccttttttgtaatgaataaagtgcataattaattatataataactaatagtatgaatggtaataaataacaagagggtttttgacgtgattttgaagttaaatcttcgtagtccacgagttcatcttattcagatttgatagattgcatatagaataccataatactgtttttcaggaatgaataataaataatcacaatattatctatttttccaaaagtttgcctttttttgttccttgggttctgtccctataatagagataggaaggactacaagcatattcacaagaagaaagatatgactgcaattacagaggacagtgatgattgctcaacagatagagaattattttccatctcgaaatcctcaatgaacaaggagtgtattcttaattctggatgtacttatcacttgtgtccaaattgcgaatcattttttgattataaatgagttgatgtaggtaaagttctaatgtgtaatgagttttcttgtagggtcattaaaactgaaaagatcgtcatccgaccatatgatggtggagttaaagtgctaaagaatgtgaggcacatttcggagataaaaagaaacctcatatccctaggtgcgcttgaaaatgagggttacagatacaagtccatgaatagaaacttaaggatcactaaaggtttttttgataataatgaaaggtgaaaatattaaccgtttgtatattcttcaaggagaaattgagaagctagctcaatgaaagggcaagaatcgaatatatgcagcggtggcatcacagacttattagtgaacaaggtctcaaagaattacacaaacaaagtatcagtgaagatttaaatttgtagaccttactattttatgaagcttgtattttaagatattcttaaaaaaatttacatactaacattatgttacatgaaaagttatagggactaattagcaattgttagtattgcctagttagtataaatatgtaatactattacacaaatggggatcaatgaatgaaat

SEQ ID NO: 88994 - DNA, 910 bp, Cannabis sativa
aaatatttattgattatatctctatgtttttatatagagaataatttttttaattgaaggataattagttttaaaatataatttttagaaaatttgaagaaccatattaaaatatgataaatccatccaatgttttaaaattcttttttaaatttattaataagcgtaaaaattaaataaaaattacaaaattttcatttatatatatatttttataatttttttttttacttttatacagaaatacaatctaaaatgattcccctacaaattatgtaatatataatattttatcatttatgtattataaatatattttgaaatatattttaaaaaaattgatggatgacatgccagtaaaaatttaaaaaataatacccaagtgaaacttaaaaaagtaaactgcaatagtaaaagaaaatttaaaaatataatattttattttctctataaaataatttaaacattatttattgacattctcacatgtaaagttactccaataaataactctttaaaaataatctcgaacattattatttaatatacattttaatttttagttagaataactttttagctttaattttttattaaaaaaaataataacatcaatattccaacataccattcatcaaatttttagaataacatcatatcatttcctctctaatagtataaaatcttaatattttacagctatgcctatctcaccaagcatcctttaacattttaccgaattaccctaaaccgttccctaaattttactattatttttcttttgattcatttataaaattaatttataattaataaattcaaattataaaggagtagttttttcttttttttttttagggaaattataatttataaaggagtagttggtgcctatatcattcgtgcaaat

SEQ ID NO: 88995 - DNA, 932 bp, Cannabis sativa
aatagtaattttataaattaataactatctatccttctatcacttcattcttcctaccaaacaaataaaaagagtattattctcctccccctccattatactctacatcgtttattaattctctattcgtcctactctccttgtggtatagtttctccaaatgaatagatctacataagtctgtcccagtaatggaaagttagtcatctcccaaaagtatgttcccacatagctaacttatcaattcgaaaggagcctcgtggaatgatagtttccatcactctcaatcaagatcaaagaccaaagagaagaaaacttgaaagtgctatttatgtggaaggtcttgacacttgaaaagatattgcaagaagtacaaggagcaacaagacttcaacaaatctcacaatggagaaaggaaggacaactgacatcatcaccacgggaaggattatactgcaatcgcgacggatagtgatgaccgctctgtggatggaaaatttttctccatctcgtaatctttaatgaacagtgagtggattcttgactctggatgcacctatcacatgtgtccaagtcgagaatcattttttgattatagatcagttgatggaggtaaagttctaatgggaaatgatcattcatgcaaggtcattggaattgaaaaaattatcattaaataatatgatggcagaatcaaggtgctgacaaacataagacacattccagagttaagacaaaatctcatatccctgggtgcgcttgaagatgaaggttgtggatacaattccatgcacaaaagtatgaggatcaccaaaagttttctaatagtgatgaaaggtgaaaaaatcaatgatttatatgttctccaaggagaaactgttccagtcggagaagcaagtttagtgaatgggctagaatcaaatatgcagttg

SEQ ID NO: 88996 - DNA, 570 bp, Cannabis sativa
tattattggaaaataacactaaaaggatagtataaagaaaccctccaaaacaaaacttaaaagcagcaatagaaacatgtgtagtttccataaatgatcactgagctcctatgaaactttattggtgattacaaaactttaattttgactttactaggctatcagtgcctttaggaaggtaaaattttccagatcgaaaatagtgtaaagatgtaatcattttgcctaaaaatattgcttagcgctttcccttatgtgctgtaatttttgacttcaatcattttcctgctatatttgcacttagtttcatatatgtctattgtagttgtatctttcctattgattagtttaaaagaattagcctcaaagctttctcacattctcactcttccatggtgattgaaatttattgttctttggtgattctaataccctctttttactcattttaaagctttgtactgaaggcattgtcttccatttttcttttctttttttaaattttcctctttggttctcttatgtcctctgatatatatattcttaaaatgcaggtggtggggtgtgggc

SEQ ID NO: 88997 - DNA, 1564 bp, Cannabis sativa
acccatacaagcagccaaaaatatatcctgccagtgctatgctcgcacaagcagcagaaaacctatcctataagtgttattctcacacgaacattcaaaacctttatcaatatcacatgcttataatactaatatatataccaatcaatgatataaaatatcataagcacatgaacatcaaacccacaatacagtcatatgtttcaacatacaccctgtgcacagatgtccactcttcttacttcagttcctcagtatatccttttctctccctcgaacttctcgctgagtttctttgttgagaacaagatcctaaatccaataacacaataacacttaaaagatattcaagcataacctaatattacaatgaaatcttatgtcaaactacacaacacattggtcaatttaacttgcatgacacatcaaacacaatcatttatcactatgatccacactaacacataagatgtactcaaatgaacatttttaatgtgaaacatgaactcatacaaatattttttacgtgaaattttaataaaataccatttattaacaaaatatacaaatatgtaattatttaccaaaatcagaagctaacattgttttggtcaagaacagtcatcatttgttttctctgtgagttctctctttttcagttcctaatccccttttcttttacgtgggttacttttatttatacgggacgttcttttgattgcatgggtaacatgttgtttacctactctcctcttgacgcgtgtcctttctttctattccttccaccttgctacgtgtctgcgttttagccagcatctatttttattattgctctctcttggtccgacggtgttatatccttctaggaagtgcttatctctccctttgtagattatatctcttttctccgtcaagattcctgtctgatgcggattgggtctcctcccgtcggagatatttgtccttactaaggctctatcttggtgtttttccttattacgttctagggacaagtcttccgtcagtaggttggtcgagggactccttttgggttcttacctttaatatatccttctcttggcccttattctgtcagcaaactttggttctagccctccatctcttctttcaattttcgtcggtttttacttctcttttttgtcgttagtgctttttgttcgtatctaacctttagggttcttgttgggctgcacagtgttgggcctttttaatgtacccggacttcggacttttgagtacccattctgtttgggccttttgattcttttattttgttttattgggcctttgttctgtgctcatattttcccctccgaacactactccccccagttccagttacaatcttataacctggactgcttgttgactactgcccttttggaccaaaattttattatttatttatttatatttatatatatttttttatttttcacgtcttatgccagtttttatgtcagtttttgctcattactattttttatttcaaatttcacagtttcataagaaatggctatttttatgatgtgatcgtggtgtc

SEQ ID NO: 88998 - DNA, 821 bp, Cannabis sativa
tttattgtaggactgaatattttgggcgggttcgacccggactcgggcaatccgtccagacccgacctggtcaaactacaaatttaaaaaaaatatatatttgggtgggtcgtgttcaacccaatacccttcggacgggttcgcgtgttaagtttttaggaccaccaggtttcgggttgaacccgaacccgcccgccaacctgcatatttcatatattatatattcttttttattttcttactacatattatatattaattaaaaaaaataaaaaaaagaattaaaaaaaaaactaaaaactaaaaaaccctaaacttccttttactttttactatatatatggatgcattttgaaatatttttcacttttatcatgattcatgaacatgaagatgaagtttaatttgatgaacaagtcgttatattatatatatttaatttaataaataaaaaaataaaagaaataattatttgaataaaatattaatttttttaaaagagttgaccgagttgaccgagtcaacccgaccaaccgaaacccgccaactcgtgacccgtcaacccaccaaaccgactcctattcgggtccaggttcagttttatttttttaaactcgaaacccgtgaacccgaaactcgcaaacccgaaattcggtaaacccgcccgatgttcaaccctactttattggtaggactaagatgggcttaaggtgtcttattttcagacattaaagttttattatttagctttcttaggatatctctcttatgttagttgtaattttgtattgcagctcatagattgactaaatatgctctta

SEQ ID NO: 88999 - DNA, 545 bp, Cannabis sativa
ttcagtttgtaatggcttcaaagaggatacatcgatagttttgcaacaaattggattaaaaaaacaaagtctggtgattgcagctttaacatgagtttgagatgttccccgaatagcaatatggagtaattgttgcattaaagcgtgacaatcatgagacttaagcccaataagtcttaaatctttcattgacactaagttgtggatattggatgaataactatacaggacttttacattggccaaaatcgcacacacttgatgtttttcatcttttgtaagattaaaacaagcagctggtaataactttctcctttcaccaactttaacaagaggagctaaagccgttctaattcccatttccaatagatcttgtcgtgctgcaaaacaatcctttgtctttcctggaacgttaagaaaagtttcaattatgctttcacaaacatttttctcaatgtgcatgacatcgagattatgccgcaacaaaagatgtttccaatactccaactaaaaaaaattgattttttttccaacaagcatcttca

SEQ ID NO: 89000 - DNA, 732 bp, Cannabis sativa
aataatctaaatcaaataatttttcttaatattatactttcggcttattggctttgtataaagttgaaggtgggatttgccatgcacctcaattgagttttctaagatcgtgtcatttaggagcaaagtaattactaattagacatatcattgcattaccatttatgtttctacttacaaagcagacccatgaggcccatgagttgtataaagtaggccaggcctaaaacagcccaatcacaaaagaaaatgtaaaaatcgtgctttggaaaaaaaaaaaaggtgatatatttacattaatctttagcattgtgtttcaaaacacaattataagtttctcaaaaaaaaaaaaaaaaaaaaaacacaattataaaacttggtgctaagtttaatagttttattaaaagtataaaagaataataattttatcattaataaaattatgtaaaagaataaaaaaaataaatagtttataagtaatgatataactaaatatactaataaaataataaaagtgacataaaagtaaataataaagttgtgtatttaagatgatacaaattttgcatcatagcaaatagtgatgtaaatttgacacaatatttgttatgatgtaaaatttgtatcaccttttaatatattgttggagtacattttttactctgtgagttatattttaattttgcatctatattagactatgtcctgtagatggtataaaatttatactaa

SEQ ID NO: 89001 - DNA, 1195 bp, Cannabis sativa
cagcttgtaaacctcattgatcgcaagtagagctcgccacaatccaaagttatttttctctgtaaacttctctagattaaacttagcattccttatttcttcttggatcgatctttaagaatcttgaaagctttgaatccaattcttgatctccaagctttgataccacctgtaagaaaaatgcatatgatctcacacggcaagaaatctccaatgaacacactcgaaatattccatagatccaaaggcacaaccacaaactgagttagtaaaaattctctatatgttttattgattgtgtaataggaagaagaaattagaacgaataagtaaaataaatagattgacgagttataaaattaataccctagattccattattgatattcaaaattattgtttgcttactttaatattttttatagttaaattatttttcttgttttaataatattccttaaatttttgtttgtagtagaaaaataattattggtacttagtaataattttcgtataagatgatactcagggccgtctcaaggtgatgagaggcctagggcgaaatttgaaacaaggccttttcttttaataaaattttttaaaaaaattaattaaattttgacacaacatcaattttaattcttttatctctatgtaataaataatattttgtaatgtaagctaactcgatcaagtaatatttaattattaagaacatctctattgaagtgctatatattttagcaaatttgaaagaaaaaaataatatgtttaaattatatatattttaaaaaaatatataataaatataaattttatttattattaacagtatcattaaaaatgtacgttaatattttaaaattaaaagtactttaatatattttttttaatatagtgtaatacaaatatttaagttataatattgttatttatttatttttgaaatgctaagtaaaacttttcaaaaataatagtataaaaggtgtgtaatcaaaaaaaaaagagtataaaaagtgactaaggtgaggatcgaatcttgaatcctcaaggccaattaaagctccacttaccatctgtactacatgtttttcatctaatttattaagttaaatatttatatattatacgtttttatatgtgtatatatattaattttaattttttcggggcctccaaaattgtggggcctggg

SEQ ID NO: 89002 - DNA, 703 bp, Cannabis sativa
ttcactaatgcggcaaggaattttccacgaagtccttctttaacatcaattccaccagttgaagaagagaacaatttttggaaataattaattgccacctctgcgatttaattctcatcagtacacaaattcccattgtcattaaacagccccaaaattgtattttttttccgcctagccgaagctttgaagtggaaaaattttgtattgcgatcaccatgtcttaaccaaagcgcccgactccgttgtctccaatacatctcccgtttttcttccacaccattaagatccttttccaacttttgacgggctacccaatccatcaaatttgatgatttggacagccaatcaatttttccttttaactccttggaacgagcaaaagtggcatttttttgagtgatattccactcatgtaatctccttccacaattggaaattaaatgagtaagggtatcaataggcttcccattctctttggctctccaaacttcattaataatcttgtggcattcttcattatccgcccaagcatgttcataatgaaatcgagaccccgatttccttctaaacaaactccctttggcaccttgattagcttccaagagaatcggtgtatgatccgagttccaccatttaaggagagtggtcttattagttttgaagtgatccatccaacccgagttacatagcacacggtcaa

SEQ ID NO: 89003 - DNA, 623 bp, Cannabis sativa
  modified_base (28)..(50): a, c, t, g, unknown or other
  modified_base (571)..(592): a, c, t, g, unknown or other
tttatatgtgtttaaattccattgtttnnnnnnnnnnnnnnnnnnnnnnnaaataacatacatggtagtaaatctagatcttggtaaaatatactccaacaactaatcctaaacctcaccaaaaagacgcacctccggtcagacaaccctcgaggatgtagaaggccaccagtgcttttaagcctagacacccttctgaccctcgagacaatccaaaaataatctaatttcaaaaataaccataaaagcaagtttgtggaaaattctatttttcaaattcaaagccaactaatatctaaaactaatttaaattaattaaaaaactaataaaattaattttattcttattattagatttttatttgaaaaaatagattctacacaaaattctaccacaatttgaattttgtttcattgaaaaaacgatttttaaaagttgacaaatgcaaaaaagggcgaaataggggagtatgcattgcatactccaatgggcgcgaatgggggccaaaggtgttggaattattttaccaggatctatatttactaccaagtatgttttattaacatcctnnnnnnnnnnnnnnnnnnnnnnaataaacacataagagtttaagaagacctta

SEQ ID NO: 89004 - DNA, 787 bp, Cannabis sativa
ctgaaaccattgagcgatgcaatactgttgcacaacgttccatctaccgagcctagatggcaaatctagggatggatttgaaattcttgggcaaggccatgagagaagtccttgcttactgcaagcaagctaagaaggtagacgaggaagccgaggcagaagaagaagaagaagaagaactatccaagtctcctaccatgtaggcttggtttttatttattcatttttttatcgaggaagatggccttaatgccgagacaatggtttgccccttgtggcacttttcgaaagacaaatttgcaaggttggatggccaactttgcttttattttatcttttatttgatgcctcgtattttgcatttgactttaatatatttgcctatttgtgttttcattcgcaacttaaaaaattatattttgatcaaatttaaaattttttaagcatctccattgctcgtattttcctttgatattatttaagtagttagtaatctactatgttcgtgagctaatattatctgctatgcttttgattcgcgagcagttatcagttctgcttcgcataaacaattataattcgttttaagcaaacttaaatacacttttaatgattcatcactttgtatatttttaattgcttacatgaaaagttaggtcttctgttgatatattaggtttaagtattttttttcaaggcatcttggtgtcttgtttaatactttcctacaaaatgcgagtcggaagtattcagcttgcatgtagcttaatgttgtttttgtgagtta

SEQ ID NO: 89005 - DNA, 663 bp, Cannabis sativa
aaaactaacatttagtaaaggtatggatccatagttctaatgctttaatgtaatataaaactttaaaaaattattaagagctccaaagttcaattctatatagctacacttaaaatatttttttaaaaataaaaaaagtaaagattaagaaatgatccactttttgcttaaagtaaaatcttttaccattacactaaataatatttgttatattttcttcttatttaatattttacctagctcgcctattctaagggttaacccttactaggtgacaagggtctctctctcattatatttaaaatttaacacgttcaaaatttcatacctttatttttttgtattgttgttgggatttgaacttaaaatgtgattatttgaacataattgtttattattaaatattaaagtcaacataatataagaatatggattcctattatgcaacataatctttaatataattatgaggtgacttcataaattattatttaaagtaagtgtggttcaatattaaattacattaatagtttatgacgctttataaaagatgataaacatcatagatgcttttaacatttcactattaaaataaataatcaacccacttaaattttatttttggcttcgcctctggtccacttcactttcatgatcacattg

SEQ ID NO: 89006 - DNA, 664 bp, Cannabis sativa
gaatatctctaaagctcaagatcgggttgccagcctccataattccaatgagtcaagtgctgatttcttttcagagcttcgtaaatctgaacgtattcttgatgatcttcttgaacaagaagaggtatattgacatcaacggtctaggatctcttggattaaatcggggaatgctaacactaaatactttcactcaagagcatttgggcagaaagcgaaaaactgtattaaaaaacttcaaactcctactggttcgtttgtcaccaatttagatggaattactggtcaaattcaagattactttatctccatttttcacagcttaggtattgatcataatgctctagcctgtactcttgaggtgattcctacaaccataacccatactatgaatgactcccttctataatctttctcctttgaggaagtttatgcagcagttcgtagtatgggttccgataaaagtcttggtcctgacggtatgtctgctatgttttacacccatcattggcctattgctggccctttcgttactcatgctattattgatgtgttaaataaaaatggagacccctctctcattaataacacattaatcactctcattcccaaaattaagtccccaaccactgtggctcattatagacccattagtctttgcaat

SEQ ID NO: 89007 - DNA, 1134 bp, Cannabis sativa
tttacctgacttttgttttgattgcggaatcatcaggcataaggcattggattgtcctttgagggattttgctggggttaatcctaacactgaccgtgggaggtacagttcgtggatgtgtgctccgagttctccgccgtgtgatcgtttttgataccagaaaaagcgagagacttctccctctaacaggccgattatgactatgggggaagcttcaaagattgtttcggctgttgagagaaaccgagttcgttactctggccctacgccagaggagttggcccctacctctattttagaagcttgagaacgtgatgaagaactggctatcaaagccaatttggatgaaaatgctcccgtgactgatggggttcaatcagaggtgatcgggtttgagatgggtagacagaatgttgatcttatggtgtccgaagaggtgcccttgccttcttctgcgcctcaggtgtgtataccggcggtgggtagtgtggtgcccgatagtgatattgggaaggggcggtcaggtaaggtgtcttcttcagaagtgaatgttggttcaactaatggtgaggtggacatgcatggtgcgggagagttgagtgacaaccaaaaggtaagggtcactgaagatcgtaaggggaagggtgttcttgttcattcggatcaagatgagctctcgttccgccaagcactccaacaaacttttgagccgattattcaagcacaaaaatcgaagacttggaagcgtctcaattctgcaaagggccgtggccttactggggtgtctaaggcggctgcttttcccattagccctaagttgtctcatgtcattgttgcaaatgccaaatttaaggtgcctcctaaggttggtggaggtgggaaacggaagatggaattgggtgttaattctgcaagtgtgaaaaagggatgtttggatgagcaatctgacatggttcctgagcatgagaatattttattggcgaggcctgcggagcaggctcaccaagagcaatgagtcttctttgttggaacgcccagggattggggaaccctggtgcgttgactgccttacgaacgattgttcgtaagttttctccaagtttagttttcttatctgaaactaaactttatggt

SEQ ID NO: 89008 - DNA, 624 bp, Cannabis sativa
ttagcattagtttgttttttcttcggcttgtaactgtttgtaaatgcatataaataaacatcaaagctaaccattttgggttaagcttttcttgacaatgttattttcttgctctgcatttgctctgtttctttcttttctggtttttgcctcgataaagtttctacattatcccatatcacatcaccatctccctcattttccattttctccaattttatttgtgggataaagaaataggacaaataatttcaattaattaaatgcaccttaatctgttatctctctttattttatctccccattataaaaaaaaaaagtcattaaagttttataaaaaaatagcttctttttctaattgcatttcatagaacaaatagatgattgaagcttttgctttcttacgtttactctttaaaactattcattttagattgtgttaatgttattaagagtgctgaatagtatgaaatgcaattagataaaaaactattttttttttacagtcttaataacttatttttaatgcagagagataaaataaatattttttttttcacgtattaattttattaagtttattgaacagtatgttgggattaacattaatattaacatatagtc

SEQ ID NO: 89009 - DNA, 919 bp, Cannabis sativa
tttggaagaaaggaaaatggcgaccgtcggtggaatcaaagaagttgatgggaatcagaacagtctcgagatcgaaagccttgctcgttttgctgtcgatgaacacaacaagaaacaggtgcagatcctcattttctatccgattacaattttttttcttatttagttattcagatatcgatcgatgaccgatcgttgtgtagagggaaagaactgagattgatttctttgttttgggatgcagaattcgcttctgcaatttgagaaggttgtaaacacgaaagtgcaagtggtttctggtacgatgcatcatattacgttggaggctttggatggggataagaagaaggtttatgaagccaaggtgtgggagaagccatggatgcattttaaggagctccaggaattcaaatatattggtgatgctccttctggatcatcctcttaattctgagctatatggtaagctgtaaacgtctttgatttttttttttcaaatctatttatctaattctatatatgattatgaatacgggaatataagaaaaagactctgtttttgcaatcttacttttattgcaatattatgaaaatatatatttcttttgagtagtatcattagacgctctgataaaattgaacctcaattgagttgtttcatatttcaaaactgacacaaacaatgatcctgatcacttaactttgacccttgtgctatttggttacaagtactattgtgtaaaccattgttttcatgttagtatttgcttaagtttcatgaattgacatcattagacttgatcacttagtagttaacatgttattgatcattatataagaaagatgatgtgttattattattattttcaattcgtttgttagagaattcttggtcatgatctcagaatcggttgattac

SEQ ID NO: 89010 - DNA, 884 bp, Cannabis sativa
aaacaacatacttgtgagtagatccaagatcctggtaaaataatttccaacaggtagccccagcattcttcagacccaatggcattactttataacagcatagacccatatttgtctaggaacttgtatgttcttggttgggtggatgcattctgatttgtttataccccaaataggcatccataaagctcaggatttcatgtccagttattaaccccacgagctgatcaattcttggaagtgaaaaacaatccttgggacatctcttgttgaggtcggtgaaatcaatacatacttgccattttatattcagcttgggcaccagtatggggttctccacccaagccaggtagaaagcttcaatgatgaaattatgtgcattcagtctttcaacttcttccttgagtgcttgtgcccattctttgtccagtagtattcttttcttctagacgggatgaaagtttgggtcaatgtttagggcatgagacatgatagtgggattaataccaaccatatcctcatgtgaccaggcaaaaacgtcgagagtttctctgcaaaattttactaaagctaattttattttgagcaataaaccttttcctattttgaatttcctggccagaatatttgggtcaatttccacttcttccaattcttctattagcccaatatttgtatttatttccccaagtcggggatccatatcttcgtccccaccttgggtgacttcctattgggcaatgcttttacccttatatgaactctggccggaggtattttccttcttgaccttggttagagcaaggttgtagaattccagtgcaattcttaatttcctttaagacatcccactccactttttgttgggaattggacgcacaaat

SEQ ID NO: 89011 - DNA, 1307 bp, Cannabis sativa
ctaagaaaccactttcattgtcatgctcttctcattttttcattttcgaatctgagaatgaaggaataacaaaaaaaaaatctgagaaataaggagagagagggagagagaaaggggaaagatataaagagagagaggaacatagagccaaataaaatacagagagagataaagagaggaagagatttacctgtaatagtgaaattgaagccatggaaatgaaactcctctgatgaaggtgaataacgagagagaaaaccaaaagtgataaaagtgtttttaaaattttttaaaatcatctaaaatctgtttttaaaattcaatcaattctgttttttaattttaaaaacaaaaagtaaaattaagttaccgaacacaattttcatttgtgttttcaaaattttaattttaaaaacaaaaaactatttttaaaatgtttaccgaacataccctaaattgataaagtaataaacctcatacaacctagctctaacataacatcaatgcaacctatttttttaagtttttattggttcaatttacttccctatagcatagggtaaaaacacttgtgcctaccatagatttaccctatatatatataatctatatatttgaatagagtgaattagttacttttgcatgtgaatcaacattccatccgtaaaagtacagattttaaattttttaatctaattcaatacgcacaagtgtgaatatctgtactttgtaaatttgatcgtgtaaattaaattggattgtatattttataaacatctctacctaaaagttattacctaatatatataaatataaaattcgatatttaattacatcaatagttagttagtgatataacattaactaatgtgttacaaaatttttgtgccttctagcatttctagttactaaacacaccaattagttgctcacaattcacaccaactatctcctcgagcccaattacaactcatataacaccactcactcatatttggaacttatctcattaaatataatatttttggttgtcatagaacaaaatgaaaaatagaaacaagtagtttatcacattcacaacttcaaattcatcattcattcccaaagtaacatatattgactaacaagtagtttagggagacccatattttttcgagttgtgtcttattcacatgattttttttcttcttttttggtggcctaacttctttaaaatagatcaaagtgaagaaacccatattatgtatcaaacaaactcatagacttctggtgtggaaacagaccaaaaataccaaaaataaaagtga

SEQ ID NO: 89012 - DNA, 625 bp, Cannabis sativa
attcttgttatacaattcaacattagttcaatcgattttttctttttcattaattaagtaacaagaaccttaattgtttaaaattgactattttaaactctgctttattttttttttttatattgggagagaagattcaaacttgaaattttctctttgtaaagcaaagtgtagaactacaaacctataattataatataaatagtataatagataaaaaaaattgaattataatttatcaaaacccatattgaaaatataaatattctttccgatagtgacaaaaataacacagcatactataagggttattaacttagtttaattaattgtgtcgtgcatgttttatttgtattcttttgtccatttttttgaagtggtataaaattcaataatattaaattaaatttataaataatatttatgtttaaatatatagtctctatctaaatccaaatcgctagtcaaataactatttgtaagtcatccaactaactattatttgaatttatcgttcctaactttttcgtggccaaataatcaataatttctagtgttggtgttggtgatgttgaacttgatgaggtaatatatatttttactttaagggcccgtttggtatgta

SEQ ID NO: 89013 - DNA, 539 bp, Cannabis sativa
gtgtagtttgatctttttcctatagatttaactacaccaaacacaatattaattcaaaccttaacacttagcagctaccaaaccttaacccgatgataaaattttagcgatagaacaaatgttgtgtttggtgtaattaaatttatcaaaaaaagacttttgtgatgagttctactctaataacattcaaaacaattaaacattggttataatgaagttggtctcatcctaaagggaattcagatgtgtaatttgtctcaggttatagaagggtgatctccaaatgttgtgtaaggcaagaaattaacaagtgatgcatatttgtatttctttctcctacaaaatttactaataattgcatatgcactgtgcatttagcaatattggaacaagttcaaatgtaagaaccaatttaatttgatgtaaaatggagataacagagacatcagataatgaagacacaacttcattttgtttcaacttctctattaccgaaacccgtagatccagtgacttgtacagacttttcatttggacaa

SEQ ID NO: 89014 - DNA, 657 bp, Cannabis sativa
tggagccactaaaccagcaagtacaaattgcagaagcagaagctagaaataaattcattcaagctcacaaaaagtaccaatctttcctacatcaaaaagctaaaatcaattgggtcaaggagggtgatgataacacagcaatctttcacgcgagtatcaaagccagaaacaacaaaaatagaatcctttccatattggattctcaggggaatagagtcaatgaaccaagcagaatatctgagattttttcagattattacaaacatttgctaggcacaagcatgccaaacagaaggagagttatagcaggagtaatggaaaatgggccaacaatttctaatcaacaaagagaaagcttgctacagcctatcactgatgaagagataaaaaaagctatgtttgacatacctggagctaaagcaccaggtccggatggatactctagctacttcttccaagataattggaatttagttggagaggacatatgcaatgcagtaaggtcttttctccattctgggaagatattaagggaaatcaactgcacagctctcactatcatccccaaagtcagattccccaacaatccaagtgactatagaccaattgcatgctgcaatgtgatctataaagttgcaactaaagtaatttgctcca

SEQ ID NO: 89015 - DNA, 873 bp, Cannabis sativa
aatacattaaaaataaaaattaaaaataaacttaagaatcagattagggaataaatcacatatttctgattttatttcttattttccaacactttccttcaagctaatttaaaaataagctatttgctttgttgtaggaatgtatggcatgcatattagtccatattcaagttttctcttaatgaccacaacattttacagctgtcccaaacctctcaaaccaagctctaggcaattgtttgaggtcgtataagaatttgttttcgaacccattttttcctcaaaatatggtggtagattcatatgtactttttcaaagtcttcatttagatctaaagtattagattcttatctctcgactgcgcgttgtcactgacggcgacgaaactcacgacggtaacgaaactccctcgctagtgggtgacggcgacgaaacccaccaaccgtcgaactccggcttccaaacccacggccgggctccgttcaccagtcccctctatctccgttaatacttgtaaagactacgcctttatctacgtcattttatttttcattatagatgacaagcaattttttgttggaagaagaaacctaaagtgaatggaagggcgtgacaaatgagttgtttgtgaggcaatgatgaaggaatctctctcttccgagaagaccagaaatggacgacccaaacccagatccccgaatcccccaaaccaagatcgccaaaccctcttgatctcgacgacccagaaccggctccatctcctggaaccagcgagagcaatatccacctctccgagaccgaggctttcatcgtcagaatctccacctctgccatcgccggttgggtgtttgaagtggttgatattagggttc

SEQ ID NO: 89016 - DNA, 617 bp, Cannabis sativa
tcaaattcaaaaccacaaatattctcaacattctcaaagtcaatctaaatttctcccctatttctgaaatactaaaccataagaaaaagtgactctatcagctaaatgtcgtgtttcactgttaccggtcattaaatatgaaaaacataaaattttataatataatataaatagcacacctaaaattcaaatatatatccataaattcataaatcatatttaaaagtctaattctgaattaaactctaattttgttaattctcatattaaaattaggcggtcattacatgttcctagaaataacacatgggtagtgcaccttccaccacttatccaagctcaaaaccatattcaaaaaaattaaagcattacaaactaactttcttcgatgtagtaaaagcttacatcgaaatatttcatatgagggagctagacaacttggataagtggtgaagattgtatttatatttgtagaaacttagctatgagaaatggtaaagattccattcaaacaacaagaggtgagccaaaaattataataactctaaataatcattatgtaatatgaaatagttgtttttcaattactctaaagttgttttgatattactactaat
